United States Patent Application Publication US 2008/0039413 A1 - sequence listing, part 20

SEQ ID NO: 2608 - DNA, 171720 bp, Homo sapiens
ttccaaggagtgagcctaagacttttttccccttttgcaaattgctctaagaagtaccatgatttcttttaaactgatctatgctgtgtttgcttattctttagttgaacacactatgaagaattccaggtgtactagtgaatgtaatttatagttgccaaaaaaaaaaaaaacctgaaataaataaatgttagattgaatgtgtgtacattttctcttctagctctgacatggcatttagggttagcagaatgtattaaatagtaattttcaaactacacagtagcttccttccttgtgagaggcaagaaagaagtctgagtggatagtactcactttccaaggcccccacctctagaatggctttatttttatctgttttctatattgggtttcaaaaaagattttatttgaagaaatacttctgctgctacaaagtttgaaagttactattttaattattctgctctctgtaactgaaagaatccctttattttggttattcattaaaatataatagaaggcagtcagattttatcccagagatgtattcctgagtgtcttgatatagtgtattcatgttttatatgtgttgaccactatattgtcattggagggacatagatgtaaatgagtttgacgtgtgtcaaaggggtttaaaggggtgtggattgaatgaatggtacgtgcgaagtatatgctgattatagaaccacttgatctctgcattccaaattgtaaaactgactcaactggagaaattataacaaagaggtttgtggtagaaatgtaataagtatagaaaagcaaaaagaaaagagaaactgctttagtttctgtttagagaaagctgctgttaatatttttggatagtagcctttcagctttcagatattttctacttacatatgcatatttttgaaacaaaaagtaggctttttttttgctttttaaacctaaacattaaatatattttcccttgggtaaacctacacatcctaatccctgtttatagaattttaacataatttaattgtgtttggagatgaggtggttttcagtttatttttcatattataatgctgtgacgagtatccttatctgtacacttctgaacattgtggagttctttcatgtggatgcctggagataaaattgtgtcgagatatatatgtatttttaaatgtttgatctgcattgctagattgccatccagaaaagttaatcaatttgtattcacagcagcagtgtacaagagggctggttttctgaagataacatttttttcagtcctgttcagaggtttggtcaatcttacctgtagatgacttcagccaccaggctggatgggagcccacagacaaaaggacattggtgtatgttatggtgaaaaccatcagtaccatgcctagctcaagaatgtgaaattgaacctgaaaaaaactttgaacctacaattttatgttctgaaaatagttattctaatgtgagggcattaataagaatatgtaccatcaaagcttcagaagattttccatacaaactaaaatcacttttggagaaagtacctaaataaaaagagaaacaaatccaggagatactgtacggtttgaaagaaaggtaatcaaatactcagaaaaagtttgttgatgacttaaaaaggataaataaaaagtaagactaaagaaaatcagtatacccattaataataaatctttagtaatctataaggggaagaatgcttttcaaccttatacactagaagcatgctctttaaaattaatgcaacaggatgacgacttgatgtagaaactatatgtggaattatagattaaaatgtgattgaaacatatttagaaaatgtgattatcttcctgatcctactccctttaggaagaacttcttaaactggaagcaggaaaaaaaaaaaccataaaagataaccataaaagaatataagttatggtatattataaattcttaatttagaaatcgtgcatcagtagttaggcattgtggctcatgcctgtaatcccagcactttgggaggcagaggcagaaggattacttgagctgcttgagcccaggagtttgagacgggcctgggaaaaatagggaaactccatttacacacacacacacacacacacacacacacacacacactgtgtccatgaacttgggaggatgaggtgggaggattgcttgagcccaggggttcaagtccaacttgggcaacatagggagaccttgtctctaaaaaaaaaactaaagctaaactacaaactgtgaggcaatatctgcaacatttataactagtaatagcttagtatcaagaatgtatgcagaaattctacaaaccaacaaaaaaggacagtgtcacagaaaaacaggcaaaagactgaaccaggccttccacacaattagaagtgcatgtgggccaataaacattaagaggttttcatctctcaatcaggaaaacgtaaatcaagatgacaatgacatgttcaaattcattcgattggtgaaaatgaagaaacacaataaagtcaagttttggagagggttttagtcattaggatcactcacatattgctgatgggggtatcaattggtatatccactgtgaaaaaccattcactagaaaagttgggccaggcccagtggctcatgcctcttggctttgggaggccaaggtaggaggatcacttgagcccaagagttcaagaccagcttgagcaacatagggagaccacatctgcacaaaaagatttttttgaattagctgggcatggtggtgcatgcctgtggtcccagctacttgggaagctgaggtggaaggattgcttaagcccaggaggttgaggctgcagtgaatcatgattgtgccactgcactcttaccttgggtgacagagtaagatcataccttaaaaaaaaaaaaaaagtatacccatgggtcagcaatttcacttttcagtatatacttgagaaatgcttgcacaggtcccccagatcacacatataagaatgttctggaataaattaaaatgtctatttttaggaaggtgtaatgtgttcacagaatgggtgattattacatggcagcaaaatgaatgaataccagctacttgcagcacaataactcagaatgaaaaagcaattctgagaaaactatatgtgacatgatacttttcttataaaagtcaagaacaactaaaactgaacagctgtttaggcattgacatatgtgacaaaacttttaaaaagtaataaagttcaagatagtggttacctctggagaggtagaggaggagcaaatctatgagtaagtcactggtaatgttttagtccctgggttaggtggtgggttttggggtggttcatttgtcattaaaagtaagtacatgagctgggtgtagtggtgcgtgcttatagtcccagctacttgggagtctgagataggaagatccttgaggccagttcaaggctatagtgtgctatgatttcacctgtgaatagctactatattccaacctgggcaacgtagaccttgcccccctttaaaaaaattcaaaaacaaaataaatgcatggacaaatgaataagagagttatgcatggaacatcggtggtgtattatgaatcaagcattattactagctcagttatatgtgccttcattccaaaacaaaaaataaaaggtaagaaaattgttgaattgcatttgagagagaggaaaggaaagaattcaggtctgaatcttaggcttttggcttgagctattgcagtttattgagatggggaaatacatggtggggaaagtttgggtatgtgcataacagagacagaaattcagtgtttgacagatcaagtgtgaggtgcccactgagcatcaaagtggatatgttaagcaggtattggatgtacaaatctaaattcagtaaggtcagtccaggagaaaatttggggagtagttagccatgggatcagatgggcgctttagggacactttggagatgaagtacagcactgagccctgagttcctgtgacagagaagcagcctgcaaagacgaaaggaggagctgttaggaagagcaaggcaacagaaaaggaagaaccagcatgctgattatgttcaggagagtgtttctacgctgaatttaattgccaagattaccaattctaaagaagaggaggactcttggacaagtttttagaagttggtttggagctggggtgagagcctggcctaatggagacagctctggattgggagtcacttagacctacattctggtctaggtttggctcccaaaaactgggaaggttagttaggtggccactcctctctcttcatggtctctctcagcttgaagacaatttacagtctttgactaagcatccacactggaagaacaagatttggtttctgaacattgggtcttagtccttaaaataacttgcaacctgttacctcttcacttactcccatcgccaccacaagaatcctgtgtgtttttgttttgtgcatccagtctaaaacgggtctgcttttattcataggcttttgttttcagtggtttttgttgttgcatttttccctagataaaatgttttttctataagacactgcttaaaagagtccaatgcagtatgaatttgtatttgtgtttaacttttgtgcttaacagatctgccatggctgaactctcagttgcttaagcaaaattctggggcttattctaggttcctttatttgtcattgtcactcccattccagttatcagcaaattccatcagctgtctccgagacatcttaaatctgtctacctccctccatgtccactgctaccactctgcccaagctattatcatctttcacctgaactcctgcactaatgtctgctgtccttgcatccactcctgccctcctacaatcactgacggcagccgcagggatctttataaaacgaaaatcagataatgtcacttccctgcttaaagccctttgagtggcttcccattgcacttagaaaaaaaaaaaaaaaaaaaaactggccaggtgcgatggctcatgcctgtaatcccagcactttgggaggccgaggcgggcggatcccctgaggttggtagttcgagacctgcttggccaacatggagaaaccctgtctctactaaaaacacaaaattagtcaggtgtgatggcgcatgcctgtaatcccagctacttgggaggctgagtcaggagaaacgctcgaacccaggaggcagaggttgtggtgagttgacatcacgccattgcactccagcctgggcaacaagagtgaaactccgtctgaaaaaaaaaaaaaaaaaaaacccaaactcaatagaaaatcaagttttcatagtggtagttgttaacagagaaataacaatgaaagctttaaaaaactccatgaaaatttgcaaaacttaaaaaaaaaatgtagaagaggactaaacttgataaaatattaaaagaattgaaacccttcctaaaggcagcttctcaagggagcacaagttcacacacagtttacttttggaggaacgtctgaggtcatgaggactagattctagagctacaggtctcagggacagtctcgagggatacagggcccccatcaccacatccccagatttaaccgcagcagctcagcttttatctgtatctgttggagctctctaggaaatgtcaataccaaagcaaacccaaatcacaactagattagattactattcaagagaatgattctctaccgaaactgtgcaaaatggggatatcaagagagttggaaaatgtaagacgtaaagaccataatcaggaaaatacgcatcatatttgttattcactgagagggaggaatttccacttaaatcctatttccagcagctggattgtgctctcagtggagtgctctggattctgattaatagagattttctagtcctcccagcaacttccttctcaattctcttcactttccgcagatctcggcaccagggttgcatcttgtgggctccattgtgttttcacacaatgtgctatttgtccttcacagtgttttggtttatttttctgtttgtccatcttgtttttgaacaattgccagcatttaaaaatgaggaaatctaaaatctgcatttcaagctgctcttttttaaaatgtgccgtttcgacaacactgagcccacagtcttgaatgacaacacttgggtggagctgagtgactccacctgtcgggtggctacacccttgctcagggtatgcactccatggtttgctctatggcccaccatcctggattgtctccctgacaccaaggctaagggacccactttactcacttatctgctgggccttggaagtatttcagttcggaaccccaattctaaccttagcttctcaggccattaaatgaaatctcatttctatgatgcttcctgtcacatcactgtgctgctgagaacatgaagtctgtgggtgaattggtggacgggatccagaatcattacttggcagtggattatagtgtgatgactcatttccggtggtctccaggagacttggctgggagcttctcttggagtctagggttagccagaggctacatgttttaggcatcttaattcatattttatctaaaggcatataaatccttaaaaaaaatcatttgacttcatccttgctccctacatccagccagtaaccattgctttgttttacatcgcgtgcttcaggctttactacagcctacctggattttgcagtagcttcttaaactgcttaaactttggatattgccccagccaacacattctgccacagagatctctctgagttaaatgggattgtatcatgccccacacccaagcagatagaaactgtcaatagatacacttagaatgaatatgcatggaatcaaattacattcagaatctaccactataggtagtgaatacaacaggatagcagaggctgggaagggtaatgggggttggggggtgggaggataaaggggttgggtaatgggtgtaaaaatctatagaaggaatatgatctgttgtttggtagcacaatagggtaaatacagttaataatttattgtatatttcacaataaaggagtggatttggaatgttctcaacacaaatgataaatgtttgaggtgatggataccccaattaccctgatttgatcattatacgttgtatgtttgtatcaaaatatcatatgtaccccataaatatgtacaactattatgtatccataaaaattggaaataaactaccaccatctttcttcagcctattttcctatctcctctcgcaccatactaggcacacaatctctgtacctgtgctgtcttccaagccattgctcatgttttaagaaatatacttattgtttaatatatcctgtaccactgtaggatgactgtagttaacaataatgtgtagtttcaaatagctaatagctggaaggaagttgttgaatgtttccaacataaagaaatgataagtgtttgagatgatggatatgctaattaccctgatctgatcactacacattatatgtatggaaatatcattgtgtaccccatgaatatgggcaattattatttgttaattaaaaaaataaaaaaaagacccacccactgtttaagtgtatctacatcctagctctttgtggcacctttccagatcctcccagattaaattactgtcctttctctgttctcttgagacattttcccagctatcagtctgccctgagttacagtcacttgtgtttttctcatgccctagatttcagtttatggagggcagggactattatttattcatttttttatttcctgcacccagcagatagcttcacacaattgttgaaaattcatttctttaaacaacttgatgacttgtccttatagatctgacagccagtgtgaccgtcaaaagaagctcctaaaccttttcttttctaagctaaacttagtttgctcattttcaagtaacagtatatgtgtgtaaaatatgtttggaattatgtcacctacaattctaataatgaaacaatagacaaatttggaaaatgggtattctacaaggcaatgagcctggactatagaaaaaagtcaaaatcatgaagagcacaaatcaaaatgacaaggggactgttctatagtttaaaaagacataaccaaaggcagtgcatggaaatccattggatccttaatcagaaatcaaaagccataaaaaatattttggagactggaagaaattacatatgagatgataatattacatttctttggtataatgatgatattgcaattacatgtgaaaatgtccttattgttgggacacatatactgcgttatttaagggtgatatgtcaagatgtcaccaacttattttcaaatggttcagtcaaagggtatggatatatatatatatatatacattcagaatctaccactataggtagtgaatgcaaaggaggatagcagaggctgggaagggtaataggggttagggggtgaggggataaagaggggttgggtaatgggtgcaaaaatatatagaaggaatatgatctagtgtttggtagcacaatagggtaaatacagttaacaataatttatatttcacaataaaggagtggatttggaatgttcccaacataaatgataaatgataaatgtttgaggtgatggataccccaattaccctgatttgatcattacacattgtatgtttgtatcaaaatatatgtaccccataaatatgtacaactattgtgtatccataaaaattagaaataaactatatatataaaaactatatggatatatatataaacaaactatatatggatatatatatatccatatccttccacacacatatccatatccacacacatatccatatccactgctaccactctgtctcatatatatatgtatatatgtatatatatatgtatatatatgtatgtgtatatatatatatatatgagagagtgtcaataattggtaagtgtagatgaagagtatatggatattttatgatactattttttttccaaatagttgggaaaaaagaaaaggaaggggcgaaaggataatttaatttcctaattgtattttcttaggctattgttaaatgaattatagctaagcagtgaaaacaaaacatttattcgggtatggttttatatttaggagtgaatcaagttactagtgactcaactgtaagaattattaaattggtaatgcagttttcgttgcttgttagagagacttctcatactttatggtttatgctttggaagcaaataagctctagaggaaatggaacaggtatgtattaaggaatttaagtttttgctgtaagtttggaaatacttaacaaattctaacttttcattatcacaagccttttaaaattacctgtgatgataggtatctataaaagtaattatattgatttatcccttttttctaggttaaaaaaataagtatgttttattggtggtagctaagtggatctagttgataaaggtggagatataaatatattggtgtaaaaggacaaatatgagataagactatgtatttattgcccatttatgtaattgcatgtgtcactaaggacaaaggtccttaaagacgaaaagcagagtagaaacagttccttatattaagacagatgaatttgctacctcttccctcttcatgaattttttttaaatgtatggttgtatatccttccagttttataatcacatttgaaaactcaaccatctttctgggcacaatttgatggctgaagatatgcttcactccaataaaaagaaaatgaagatttttcaagagcattcgtaggcttcgaatcaaaaggacagtacttatttcctgaggtctgataaccgttgttttatgaggaaatagtactaggatcacagtaccatggatgtggtaggcgaaaatgaggccctgcagcagttctttgaaggtaagaggccaatttccagcatgaatttgctgcttctgagaaatgctcactatccctgtttcaccttttccgtattcacttaaactttgttttgaaagaaatgctatcatacttaggtaactctcctaatatcaaaagtaggggtttatttgctacattgggagcaaaattcaatggtatggatagagattttaaacaaaacaggattttcatcttatagtttggttgttagaatcaaggggtcagcatatttatgttgttattacttgtccctgtcctgtactagattttattttttcccatgccctatgtttaaaaaaactacatagccatgctcaaattccatgtgaagggaaacgtgaccatcatttttacacggtaaggtattttgcatgagggagtatgagaagaagtgagggaagacctgctcatttacagaatctagggatcagtcagcagcacatcgagaaaagtgctttaggtatttcttgtgctttgtaaagtgcctgacaaataatatatatttaaaagttgaatggaatgggctgaatagtaaacaatgctgaacactaaagagtgacggggcgtaccaaagaaatagtgagattctatgtcactattgggaggaatcaacaccatggggtagtttctgtggcttgggtttttccagaaatggcaagaagaaacataagaccaagagaattatcacattatcttgtcctaccatccatcccattgagtgttctgtctctgacagtggccaagttggtattgtctacctgggtcatgcttggcacatggtaggcacactagtgttgctagactgttattgcctgattttatatcatatataattttcgtttgagcagcaggtggcaagcttcaatctaccattgcatctattttagagaaaccagcaatttattgtatacatgcaaaaatctactccatttccttctagagctagggaagacctgaatatcgaatttggtctaccttctgttttttgaaagagcttttatttctatgggatccctatactgtccttgtttatactatttttggaggtttctatggatatagtttctacaagtcccctctacagcttgttacaattatctgatcattattataaaagtatttgtcttcagtgtttttcttacattatctgtgaatagttggaaaaggtggtagacttcacaaattaaaatgaaggcactagcttaagtgagtcccatccccctgaaaatcacacagctaattgtcaattttttcttacctctactattcagcaaatattgagcgcctactctgagtcaggttcaacaaccactttctttaaatggtagcttgtagggctttggatgccttctcttacattttaataatttcctttctcttgacccttttcaaatgaaggcagctgaactgaagctgatattcttgatctgcagtccagtgctctacctctgagctataccctctccttgaatctgatattctaatgagaagaaccagttgtttcatgtcatgctcctattgatatgttaactgtttctaatcaaacaccatctcatatataaaaaattcagggtttgaaaatcaagaaaaaaatttgacaatttgttacccacctgaaagctattttctccatttcctcaggctcttcattctaagaaactaagccctaaataatatatgttttccttataaacatttttatattaaaaattatcttgaattaaatggccttgactgtcaaagctcatgatgatcttagtttttttttttaaacttccaaacgtgactaaatcttcatggtgtctcaggaaaatgacaagggtggttgttctgggtagctgataattctggttctaattcaaatccctgtctgccactgatgcaataggtaggcttgtgagctaaagcagaagaggcgcaatcaggcactctagagatcgcaacatcctctggaaactcagacgccatgtgagatgtttggttttttcagcaaaatggtaccacttcaaaaaaaaggttgtcataagacgggtgcattgttttatttataataactaaaaattggttacaacctaaatttctaatagtggtggatttattaattatggttctaacatataatggaatattttatggctattaaaaatgatgacaaggaaaaatgtttatgatcttaagcaaaaaagtgacttacaatgtggaatatataaacacaattagatatatatagataactttctatagcaaagtttattaaaactgggttgaaaacagttaatatatttccattcatgcacacacaaatacatagaaaaaaccatatgaatatactttaagcattaatagtaactaccttggagtgataggattatgaagatttttattttctttatactttattatctaagtgctttataatttgaatatataatgttataatcagggaagagtttatcttaaaggagaataggtttaattcagcaaaatgcttctgtttaagatccatgtgtcaagaaaaattgtaaaagattttgacatggattgaaaggattactgggtgtcttccatggaaatctgtgcctaaatcacatcattctgggctatgggattctatggtgtttgcccctttcagtgtggtagagctatgttaaaactctgtaaattgcaggtaactgatatcggtgcaaatgatttttatatatagatatgcaaatgaaatatgttcttgggggatcaatagtttcagtaaaagccatttttgcatttatttataaattcattctatacagtgtatgtgtgtatctgatgtttgaattctcctttgaaacggttgtaacatcttcctggtcccttcattaattaagtagttaaatacaatctgtgacatgcattcatattatatttctatgagagtcatggttttatctttagaaatctatatgctttaacgtttgcaaagtttaagttaacttgaaactttaacgtttgcaaagttttaagttaacttgaaaacattgtcaatttcacctcaagtttgaaattaataacatctgttgagcatttaccatgtgccaagcgccgtgctatttactttacatcatatcattttattcttacaacaaccttctggatgaaaaggaattaaaagatgaagtacagtaaatcccattcctcactttacttcatttatctttgatagctataatcttagactcttaatttgtactatcttgatatcagaggactcattatttgtttccaagctcttaaaaatagtttattaaaaatgatttgaaaacagtattgttgattatatttaatctcgaaagaacaaatttttgagaagctatttatttatcttcttcatcctgaagtaggtgctcaaatgctttgttggcttagcgttgaaagcaaagaggagattcccgcccagattgagcagagtggggaaaagtatgccgtgggaaaaactacatactaagatcacaagtaaaagctcaagaaggaaactggcagaaactctggctcacttgttgaggtttgtgggagtagctgctagaacctgtggaaggacagtaaccaccaggcagctcttgagatctatgaggaagaatagtctgttcaggaaactgccatcaaaaaagctttgaacattttctgcccctgtctcgctgcttaagatttaaattctccagatagctattatcaaaagagggcagtggggatgcagggaaggcagaaacatctgctgtccataagctgtataggaataccacggaagtgccccatgttcaggaaaatgggggaaatgctgaaggctttggagcagacaagcagtgactgaagtgcttaattcaggtgggattaatctagaagggcttcagggaggttaagcagaattgctgtgtagaggagagccgttgcttggaaaaagtgcctgtatgatattggcatatagtaggcacttactgatatttatgtagtgaatgaatgaaagaacagtgcaaaagactagtccattcaacaagcagatattgaattctaaccagggctggggcacccagcaagttcaactgtatgaagagggaaaacttgcccagtagcagaatggtccggtgaatagaacagagatgttgatagaatgcctcagattccattattagcagagataaaatgataaatgtcttaagtggttcctgtatattatttctctaaaatgtgaaaacaactttgattagctggtttctgaatttctgacagaagagtcagaagctctgaaagccgaatgcagtgtagagaacagaacctgcccagtgctggcactgggcaagtctgtcttatgggtaaagagtatctctggcctcaggccagtctctcaattctctgtctttggggccacaactttcccactctcttagacaaccagtttcctatgccctcttccttctgtcctaataaaacctaagcttgcacagaggagcaaatggcaaatgatctaacaccaccttacacctctgtagagtcttgtattcaaagtgctttcatagaacattgaaactgtctggatcaaaagcagcagaaagattacctcctccaggaataggtctggttaatctctaatggtggaattttaggtattatattgtacccagcatctttgaaattatcccacagatatatatagatatagatatctatatatagataatatatagagagataatgtatctgtatggatatattctaccttctgttttttgaaagagcttttatttctatgggatccctatactgtccttgtttatactatttttggaggtttctatggatatagtttctatatatattatagataatatagagagagataatacatttatatagacatatagagatatctatatatatatatatctctgtgggataatttcagagatgcaggagttcattgttcatctgtgcagcagcctctgattctgtgtagaaacagcagggacttcccaggagactgggaacaagaacatgccaaagacaggaagaaccagccaggtcatgcaaggaatttaggattatctgaacatttctatgaaattatctgaacatttctaagaaatacctttcttctttcattctgggatctccaaaatgaaggtgatttaattagaatttgaagtgtgccgtaaggagattagagctgacctttgtcacctgcccacgctacctttgagacctgtcagatttatcaccatctctggggagtcctggaacaaaatcacccaaacaaacccttctgagtggaggactccccaccttctttggtgttattgatattgtcatctttcaactttgaagttagaacctggtttctggaagactctacaatgtcttggaagctaaacattcaatacatggacaattgtggataatatagataacctaaaagaagaagatcattatcactagtaattttactatttagtgctaactgtgttcagtttggtgtgtatcttgtgtgctttttaaaacaaaaatgggattatataatttgtactttttagtaaacatacagtaagcatctcttaatgttagttattcatcatcaacaggggtcagtaaattatggaccacaggccaaatctggcctgcagcctgtttttgcaaataaacttttactgtaacatactcttttacatattgtctgtggctgctttgatgctgtgagcgaagaggtgaatggttgcaatagagaccatgtggcctgcaaaacctaaaatattatctggctctttacaaaaaaagtttaccaacccctgatctacaacctaactaataatcataataactgttgtcaagcacttactatgtgctgagtgcagaatcatccttaggaacatgggttctgagttagtcatcctggctgtgattcctagctctgccactgactacctgtgggactatggataggttcataaggctctgcaggccttaatttccttgcttgtaaaatggggataaccctattatctcaaaatgttgtgaagcactatgcctggcacagagagacagtaatttttagttcctagtattctcattgtttcttaattattattttctccgtttagcatcaaggcagccctgggggatttctatccttgtatgagaaacatgaggctgacagaggttaggtaacttgcttgcgggttatccacatagtaagtggctgcaaggtcatttattccttaccttgtttattcagtcagttgtcaaagtcaaaataaaaatgtagagatgaatctctaaatttaatgttttatttgggaagaaagaattgcaatttggagcatacaggcaggctaggttgtctttggtatgcttgaagaataaagaggaggctggaggttttatagaaaggaaaaatgttatgtcttgttctttgaggaaattaattggcactattaaagtttagggagctggcaagttttggttggtgagtgacagtggtgggtaaaactagtattaaaagttgtagcaggttgtttcagcaacgattagatataaaactggtctaagtttatatagcaagcagtttcagcatccaggcttgtagagaattacattttttgagcaatgttatatgccctgagtgctttctccccctggcctcatgactctgttttagttggctatgacaagaatgacctaatttgtgtgatcaactttcacacaatcaaaaaatatttgactgtctctcatgagcctgctgctctcctaagagccagggactctgtgatgaattagcagaatccttgccttatagtggcttcttctctagatgaagggagaagacgataggagataaataaaacaatgatttcaaaatgtcattaattatgaagaaaataaaaccggatggtggtgcagagagtctgatgaagagagagttacttgagctaagacaatcaggaatggtttctgaggggatgacattcaagctgagacctgaagaatgaccagaagcaagtcatgcatctgtctgggagaagaacattttaggtaaaaagagcaactgtgccgtcactgagcttgaagtggttgggagaggggtaggaaaggaacagtgaggtggaagcgcttgaagtgtgagtgacaatggggagggtggtagaaaatgacattagagtttggatttttattctcagtgtggagagttttaagcaggagaacaggcaggggcagatgggtgggacgtgggtgtgaggaagacagaggaatctgtttaggatgatgcctaggtgttggtgtcaacaattcatggatggtagtacaatgtacttagatgtcgaagactgaggaacaggcttgtgtgtgtgtgtgtgtgtgtgtgtgtgtgtgtgtaattaagaattcatttgggacattttacgtttgagatctcttttagacaaccaagtggaagcgatgaggaggcagttggattattgaatttgaaacccaaggaaggattagagctgctgttgtcaatttgggaatcatcagcttaaagagtcatcagtttaaagcccctgagactaagtgagatcaccaagaagagtacagatagagaaaagggtcccagatcacattttgggatccaagtgaaagtaactagtaaaggaatgtttagtgaggtaggagggaaaccagaagagtgtggttgttaaactaggaaagaaagtgtttcaagaagaatatggttaaacgtttcaaatgtttctgaaatacaagacaattgcctatagaatctggggaaaagaaggttgtatgtgaccttgaaaaaaggatttcgtgcagtggggaaggatgtccagtcagtgggtcgaagacagcagcctgtgatcagtaagaaaaccactatcatttaatgaaggaaaaccactgccatttaatgaatgctttactttatgttggatattgtactaagactttatattaattcttaatttgcacaacacaatgaatgataatgttgtcagtattttagagaggaggaaacagattcagagaaggtatgtactttgcccaaggtagcacagctattaggtatgtgaagtgcttagatttggacagaagtctgtctggctctgaaggcttgtgtccctatccactgtgcacattgtcttctaatcaggtcacagggaacatctatagagatagttgtagaactcatgtctcctgtgaagcagaagatagggcttgctttttttttttttttttttcggtacaatttgcatgtaaaattattccggactgctagcagttggcactttactgccatctgccattattccttagaaaatcccagctctagcacaataagatgaggtgttagtggtaaaaaggtaatggtttatgttcattgagcaggcagctccagaaactcataatgtaagtccactaataagagtacaaagatatcagaacaccatcactgttctttagtactgctctgtgcataacaaaaatatacagaggaaagttaggcagcaggctatgctcagaagtgcagtataaatattaactcttaatcttgtaattttgggtaatctgactcaggacaaaaagtccagcaagatgggaccccagtggttgataccctggtattaacaatataagaaacaaatgtcatatatggcaataagaagtaatgtgttctgaagagagcatcatgtgacttgatgctgagaattagtgtcattctcgtagggttaaagctaccaatagctcaactattaagagctgagaaatatgcttcctaggaatctctgtggtatgcaggctaatggtgtatgccttgtttcaggcacacttggctttgaatcctggtttctttgcatcttagttgtatgaccttttaaagtttcaatgttctccatctgtcaaatggggataataacacctaccctcttacggttgtgaagattaatgataaaacgttaaaatgacagaataaatggtagtggtttttattatagtatttgcaagtgtgaaggaaccaaattgcttgttttatttattgtgaaacaagaacaagtacagctacatacatagatccatacatttctttttcaaagaaacactcctgtctccagggagttattaaaagttttacatgttcacattaattccagagaatttataatcataaaatccatttatagcccttagttgccaagcaacaaaggacaaagtactgagtatttccttttattgcaaaaggttcagcttttccatgttggtcttgaaatcaacatttttcagaaaacacagaacagtgaaacttaatatatttccaagatttagttggcattctttgtttggggttagactcaaagctgaaagaaatatattgttattattgtcctgttcttagatcgtctgaagcattttgttctaattttatagtaaatctgtaagaagttctgaagttgagagactgcaaattcattttaaggagataacttttttcagtttacctatgttctgtgatgctctcattttaaaagaaccggttcttgtatctatcaactgtctttcaggaaaggccggggtggtataaaattcatacagaaaaatgctatctgctgaccttgttaatcactgacctcaagtaggtcattcagccatgccttggcagggtttggggaagctggctcagatctgaactaaattctctacctccttaaaagggatagaagtttttaactacttctgctgtttttgttcatgaaaaaccagaagtaaaggtttgaaagtccatataatccagaaggatatattactatttaacatcccataaagaactccagtacaactcatatatttaaccgctcataaaagcatgcatgggaaacagtttcttaatttgcatagctatttttttattcatctgtattaaaacagtgcaaaagcagattagacatctttggaattttactgcccttgttcctatctgtgttctgtatatgtagtggattccgtagatggaaagagagaagacaatgatcctctttttttcttccattgttggattagggaagcttgttgctttgaaacaaatctattgataagtctcatgaaagttcctgacatggaagaggttcccttgtccccctcacagggtgtgtgacaggggcagtggctcgcttcttcagtgccctgctgctcaaacctctaggagagcatacagacgggcaggctgtggggctccaacaccatggcagtgtctagaggtgaatgcttacagctcctaaagccccagtggatgtgtgttacagtgtgctcttttagttttgccgtctataggcttgtgttaaccacctcaactagaccctctaccttgtcgcaaggacaagagggctttctttatcctgggttcttgccttggtgtaccggaagaatcggatcacacgtgggcttggagaatgagtgcaaggttttattgactggaagtagctcgcagcaggtgggggaaccagaagggagttggttttcccactcagtggcccggattgccctggccaaattccgtgtgcttctgccggtcaggggctagccggcatgccggtgtgggtccattcctcttgacgtccagccgcctgtgtgttccttcaccaatgtgctcctcttgccctccagctgcttctgtctctgccttgctggggtctcgggtttttataggcacaggatgggggacgtggcaggccagggtggtcatgggaaatgcagcagaaatgcctgtcctcacctaggtccatggaggtggagccctaactagggaacacaccctcctctacccagcactcccgcatcagtcctatgtgcaggaagaggcagaaatgacacaaatgattataattccacaagataacagctagtcaaagctcttctgctaagagtaaatattccttggaacgatttttctgtgtgaatataagagtaagatctagctgttagcatgagcaggctaattccagtcaatcagaagagggacactttaaaatctattatccatccatctcaagtgttgttccttaagaagcatttgaagaactgccattagctccttttatccgtataaggataagacaaacaaaaatttgcttccttcccctgagagaggcaggtttctgtgtgagaatctgaaataacctttactggtggtgaggaggtcaggtctgtgaaacaatgctcaggacctgtcctcccctttgctggctttttgtgaaaatgttagaaaaaacaaaaatctatagacggccaccaatattaacgtgtgtttattttgccagttcattcttaacccaacttcaaagtttctttctcactctgccatttgtgttatgcttgcttatagagtttgacattttacaaactcttgcatttccatcaacttgttggtccttcacacatttaaaaaaaaaaattgagccttaacaaattgacagatatgcctaaaatcggattggtaaatttcaggcaagaccctgtgttttcattccaagtccaacactcttttcatctgcacaccactccgcctacccagagggaagagcagggaaagacaggtattggcccattagcttccgtattctagaacgagatgccaataaatatagtcagtatttgggaaaattgcctcccttctatcctcctctcactcacttacccctagccattgtataattgctcacaaactggccactggctacccaactccctcttcaggacagagtcaaagtttccatcttttcggactttgcctaaccccctgcttggatgtaactgatctgtcatgagttcaacaattggttcattgttctgagccctgtctccgggggagtggagaggaattggaaagggatgcacacttactgtgtgccatgaaccagtagtagattcatatatgttatcacatttcatctgcaagccactctgtaaggtggtaaaacccatctccttcatccagatgaggaagtaggcccagagaagttaagcaaaagtagaatttaacccaggcctgcctgacttgcagttttctaagtctcatgctcttcttacctctgggtcacatggggcttcctccttctggagcacacttccctgccttgtttacttggttaacttggttcactcaagattctggctttggcgtcattccctcaggggctcccagtgtgtttccacagtactttgcacttcacctttcaaagtatgtaatgaatgccttttttccgtgtctgtctcctatggacacctggaaggagggaactatgccttcttcattcttgtagcctctgcacctagggactggtacatagcagtcactcaaatgtatgtgttgagtcaataaataaaaaactcaaatcccttttccaggattccaagtcttctggatttccttctttatcctgcaactggctaaagactaggccctcagacagtgctctatttgactgtcctttccctttctgcctgactcgggaggacagaaaggcattgctggggaaggacaggcactcctgaaagccataatgagcagttttcttgtcacatcttgctgaacttgtgccatgcagtgtcagcccaggggacattgatttaatatttaacactgtacattccaggtgagccaactcacctgcagcgcctgtgggtggtgtctcctccttagctgtccttccttttgaaaggctttttcccttcctcctctgcctcctcctcttctcccctctgtttttcttcttcatcttccacctccttttttggccttgggcaaattagactttctaataggccaaaccagaataataattcttccaaactttggttataaaatcaatgagattattcacttctatgagacatgttcctgtcatttaaaagaaattgtcagcttctctttcccaaatttaccttctatggctaaagttaatgttgcttaacatgtagtcaattgtgttttatttctttttggttgttttatttattcttctgtatattaacattaatgtgtgttgtcgaagaaaaaatgtatgtaacataaaagtttaatcctcacattgtaggactggaagaaggcttagctgtaaagtttctcaaactgctggaaaaattgattcccagacttccagaaaggccagaggatcatgcttaatttatatttcaaatcactaatttaaaaggagaagtgtgaacttgataatgtactagtaaagaccctgaaatacttttaccatgatagaggttacatgatgcaatgaactagtcactttcccttcttagtttgaatcccattaaaatttttagattattcactgagaagctgtgcaaagccacaagtgcagctctctaaagacatcgagccaaccagcagtcatttattctttaccctgagtgattcctaagtttgtgaaaaagcaatgaaggatggattcatctggcattttagtaaccgtaatgctaaaggaacgtagatccataatattttaaagttatatatgactgaccccatcagcaggcacacccaccttctttcctgcaaacggaagccaaattagttcagatagaggaggagagtccttgaacccagaaagaacaggttctgactcagctttatcagatgaattgtaattcatttaaactagttatcatcatctcaatttccccctctcttttcccttggtcttcataattcagcactgcaactcttctttgcaaccccttctactatttccaaatgaagactaaatgctaatatttgctgaagtacttagcaatattaataataatttaacatgtcttaaatttgtattagacatgtcattgtttttattaacttttaatgtttttcttcaactctacattcttctgctattttttacaattctgcaaaaagcaaagttgttcaggaacacgtacattatgttatagtagaaaacacctgagcccctgcaatgacacttgtgttactgaacttgagcaatacttaagctcgctaagacaacttctctgaaagatagggataataatagtacctatctcatagaataaaattgttttgagtattaaatgagaaagtaaatgtaaaattcttagcatagtattggtacataataagagttcactaaacttaccaagtattatcaatcttctccattgactgtctctcaaatggcttagctcatgattcttttgctccttactggatctcctgtggatcccctactatttgttagcattccttttaaaacctgggtcccacatcctcaagatctgacctatgcatagaggaacaggaattgcactatcctagttctgtactcaatacttttattattatactctacattagtttccttgtcttttcaaaacctatgacaaaactaaaagacccatgtctttgtcatctattcattcataagccaaatttccccatattatatttacataattagaaaaaccgatgcaaacatgtatgcttaacctactaaatctcatcctgccaaagtcagctatgaatgcaatcagtcacgattagagtctgacgctttctactatattgtaccttgcccactgccttcaggctgtctgaatgtatgtccagtttgccttctctatatttttccgaattacaaataacattattgagaaggatgcgagcaggtaattaatttcatgctgaattttaggattttcttcaggttagctctctgggggacagttattctcccaggtacaaattcacctgattctagcataatttcctctacatttctccatcttagctataaatacagccatttttgacctctcctctctactccccaagttgtatcaaaagctccttccaaatgtctgcttgggtctgacatcccgctgcagtgttcctgcctgttgacttccctgtgctcccctctcctgccttagtgctgctcactgttgtatccttgtgcctagcacactgctcttcattacatatgcaataattttgaatgaataagttcatttagcgtctagttgaaataaagatatacatttcctccgagagtctcctaatctgccagtcaggcagctgaacaggaaaggcaatgaagcccatttgcatggctagttcttggtagacacatgcaggtttctggatgttttctgctgttcttagagtccagcagccaagtttttaataatccttgccaaatttttgcatctgtgacagttttagaaaacccacgtgggggttgccatcctgttacacaatgtgcttgaactatttactcaagttgaataaaggttaatttttattttatctctcaattatcaggcacataaattccaggtgattcatgtcatgtgaaagtccagccagagacagtcttttaattcagttattatttccaacaatgggtcacgttacttccgtttgaaataactgattagattcttcttgggtcagtgtaaaactatctgcacaaggagactgggagattcccaggattccaggttgttaggtggagtttttcttgggggcagtgccctgctgctcacttctatctccaagagtacagaagagtacatggccccatgcagataaactcatgctccttccccggctcctcatccagttctctcatatttgctatttcaagtgaccagcatgaccatcaagacagggactggggaatcacctagatttcttacagtcagtcacaaaattcaatggcttatcctcccaaatactagccacatacagtgatgtggtaaatgtttaatgagcaactctctagttttaggggaagggaaagttgggaagcagccctgatttgtagcatttgctcatttccatggtgtaaatgctctcactatggctgatttcaagctactcacatgatgttaaatatgaagttggaagagatgtgcacaagcttgtacaacctggctccagcacattgctgcacattcttccactttcctgaccacaccacaccaggtcagactttcacagcattcaaggccctaggatctgtttctgttgatagttgtagccttgttgacccccgctcttagaagcttttcctggcatctttttgctcctgttgagtcattaaagtgccccacaatgccctgtgtgcatctctgttgtcacattatcttgctatgatatgtttttatgtcagtttttcttactggtctataaacttcttgagcacagaaactaatggtaatgacaaggggtagaatttattgagctgggacctatgctaagcactttgcttgtattatctcatttaattcccacaactcctctgtgaggtagatgcttgtattagcctcattttgaaaatgaggaaagtaaataaaggaagacactgagaggctagctaacttatcctgggttacacagctaagtctcagcaaagatgtaagccctagcctgactatagaaccagaatccttaactactattgcttctttgtgtttgggtctctaacccttagcactgtgcctggcccatatcacatgtccactgtgttaagaaatgcaatgtgggaagtttatgctggcaatgtccttgactagtctctttaaactagtcttgcccagcttcagtgcaatctcccaactgcaggctaaatgatctttcagaattataaacctaatcacatcactcccctgcttaaagattttcaatgactctatcactttcaaaataaagttcttatcataatacactttccaccattcataattacatttattcattcacagctttatttactcacctaacaaggtcaacatttattgaatagctataatattctacatcctgttctggatgcttaggatttgtataataaaaaataatttttgccctagaaaggcttagagttgagcagagagaaagagatgcacaacacataattgctatggtgattgaaataaaagcacatacagctggcagtggggtccgggaatggtgtggccctcagtctctaccatgttcttcacctgcctcctggctgtggtcagactatgggcatgtttccagagtcctgctgttgattatttgaatttatttgcacatgccttttttgttcctaggatgtttatcatcttttacctagtgaatccctacttaaccttaaaaagccctctcaggtgtcactgataggaagtccttggctcaccccaggccagcctaattaaaaggcttccatagtatccaagcacacgttcatcattacttaacaccttgcattgctatagctgattttcttgtccctctcactggaccgtgagcttgtttctgattttatttcaggacacagaatgaacactaagtaaatgtgtaagtaaatgaataaagcaattagttaattaatgattggtaatatctctaagaaaatgtcatccttacttctctaactctggactggttgtgtctctacacaccaacattagattttagatccagtactacatttaatggatttttcaaggcaaaagtattctaagcaaatgagagaagtagagtattttatttctctttatctcctctatcttcttttcttcctctcctcttccttcttctccgaaatatctattaacatttctgctccagtttttcatgaacactggcatgtcagagggaaactatgtttaaatccagaaagcaaccctttgggagaccctcattattatttttaaaatcctttaaacaactagagttgttggaacaaattttgtcatcttgccagttgtctgaattctctgggcgtcactgtgtgcaccaagtgtgaaagaataaatcaagaagagggccttatcactgttggggaaagtgatgaagaaagctgttggatggaaataagaaaagatctttatataggactggcaggtggtgagtggagaaggcagggagtcctgaaagcaaggtctttgctgtgccttccctgctcacgcccttggagaagccccataggcatatgtagattttttagtaggtcctgtgggtacaacttggttgtgtttgtagtactccctgatggactcatcttcataaccaagtgcctttttattgtcttcctacggccaagagcagcagtacatgttactgtcttacagctcttgctgctcctggaaagggaggcagagaatgagggtgaggaagagctttgctttacaaaagcagtgcagggacagcttctctgacacacccaggaggcctacgcagcttctccctttgtaagcaaaactgtggcagcccttcctagctacagaagtaaagagtggaacctgatttcaaactgagcctccctgatgggggataggatgcttaagggtgccctcttggcaggcttgggtgttataaacaagtgttaaaaacatttagagcaaagcgattatttttaaaagcatgagatttattttaggagccatttgagagttgttctctgtgtgtaaaacctcctgaaaacaattttatctgacactgtggatttatctttttgagtaatttcctttggatttggaaaacacagataggattttggagtccaagaggaagccagttactgcagggatcatctctccttattcattaaggcgtttgggcaagccacatcaggcaggtcctagagctgtggcccatctcctatttctacctgggggagcaggttggggccggtgggtgatctaaagcaggtgacacaggagtcaggtcttagaatctataggccacctcctatttctacctggggaattgtgtggcgggtgtggaggggagagtgaagggtgccatataaagcagatgggacaccagcaggggcttcagaggaaatctaaacagattcttccctccatctgcttctgttagcagtcggcttgccctaagcccagtgaagcagtagaagcaagtcaatcctccctgcagttggctggcattgctggggaggcggcggggcacggggcggtcgtgagagcacgatcagtagcctgggttggcttccctgtgtgtcacttacaagctgtgtgactctgggcaagctggttaacctgtgtaatcacttggccttatctgtaaactggaagtagtattgatggacacctcctagggctgttaggaagattaaataagatcacataagcaaagtgcttgttcttttgcttggctcagagtgagaaattcaaactctgagcatccctgggtaactgcagaagtatttaaattgatctccttctcttctcgtccccttataatcttcccacaagcaaccagaatgaccctcgaaaacataaagtatatgatgtcactctccaaaggcttcctattgctctgccctcctgtcctacacccatgctcctgtgctctaacccattggatgatttgtttcttgctactgccattttttctccacctggcacgctctgcccttgatccctgcatggctggctccctcctgagagaggcatccgcatagaaaagtgttccctccatcacagtctgttataccagcctgttttgttttcctcacactctgaaaatatccttttatttgttattttttatatgttatatgtgtcccaacctacccccaatgtcacctcctttccctcccttagaatgcaagccctctaaggggttcttgtcttctttttcacagctgggtccccagaactttgtgcaatgcttggcacatggtaggtccttagtaaattgtggttgaatctatgaaagaatgaagatgtcttgtccatcctagcctttcttcaaagtctaactgaagactcaactccactatgaggtcatttctgaccatctaaatctctaggaatcactcctgtgaatccaggaggcatgtgggatatattccactcattttcatcttagctcatgtcaacaaattgagttggtgatgtctcctccactattttcacaattctaaaatgtagagaaagaagaaaagcctccaaattctttttatgaagccagcataaaacttgaggggtattggagtgagggatagaaagcagaactattatgtatttaaactgtacctggaaaaaacccacaaaatttattaagaactcattcaattatctgtcatctatttcagattttaataagatgaaagaaaaactttatgactttccactgttgggaaaagcgaaaaaaaaaaaaaaaaaaccttgttatttcaggttctacagatgtgaatattataatcctctagcaaagcaaagcacggaacaaagtatacctcacagaatggagattgggagttgccaaagataatacctgcatcatgcagtgctcttgacacccttctaaatgatgggattgagtgcatttgtttatccgtggcagcttagagaacagttgactccagcaaaactggctctcctctgcattcagcacaaataaactccttgccttagtttaacccttggatgctggcttttagatattggctattgactatcttttttttttttttttttttttttttatgactgccacagtactagatacttttgtatgtctcattcttttttgtttgtttgtttgtttattattattatactttaagttttagggtacatgtgcacaatgtgcaggttagttacataggtatacatgtgccatgctggtgtgctgcacccattaactcgtcatttagcattaggtatatctcctaaagctatccctcccccctcaccccaccccacaatagtccccagagtgtgatgttccccttcctgtgtccgtgtgttctcattgttcaattcccacctatgagtgagaatatgcagtatgcagtgtttggttttttgttcttgcgatagttcactgagaatgatgatttccaatttcatccatgtccctacaaaggacatgaactcatcatttttttatggctgcatagtattccatggtgtatatgtgccacattttcttaatccagtctatcattgttggacatttgggttggttccaagtctttgctattgcgaatagtgccgcaataaacatacgtgtccatgtgtctttatagcagcatgatttatggtcctttgggtatatacccagtaatgggatggctgggtcaaatggtatttctagttctagatccctgaggaatcgccacactgacttccacaagggttgaactagtttacagtcccaccaacagtgtaaaagtgttcctatttctccacatcctctccagcacctgttgtttcctgactttttaatgatcaccattctaactggtgtgagatggtatctcattgtggttttgatttgcatttctctgatggccagtgatgatgagcattttttcatgtgttttttggctgcataaatgtcttcttttgagaagtgtctgttcatatcctttgcccactttttgatggggttgtttgtttttttcttgtaaatttgtttgagttcataactagtggcaatcaggagctacagttctttggtaattgtctggtggggtgggaggttcttgtgccactcaaactgctgcagtaagacaaaggcttagtcagagggctctgaaggaaactcacatttcaaggcccttttgttgttgggtgctaatgtattcttctgctcagaaactgcagaaaggatggggtgaaggagggcatatagaacagagagcatatgccccaattatgccacctctttactaaggattgtcaatccagtccttgctagtgaagacattcattcattcattcaacaaatattgtttttttcaaagaaaaagttcattttattcttactcagagatgaacttcttttataactttatgattacaaaagtaatacatttaaagaataaaacaagtataaagaagagaaaacaaaacaaagcactatcactgaagataatcaccattaacattttggattccatctctgtggcttttctatgcatttgttatccagacacatatacttcctcattagctggctctggagtcctagaaaatatttacctcgctcttcaaatgacttctctctctctctttaaaaaaagaaaaagaaaaaagctttagtactatgaggttacagtgatgaataagacaactatgatttttgccctcatgaaccttttctagtaagatataggcaatcattaagaagctttgatttgagaattattagtccaaaaccttagaagcagcatttgctttcaaccttgcttttcatgtagtctgaaaaaatcaatttttatgtagtcaaatttatagactttttttctgtatattttttggtattcttattatggtttaagagtctttttctctttccaaaatatacagacatcagacatatgtgcctgttttcttctagtaatattatggtttatctaaatcctccatacatctaggaattcattttggtgtagaggtgagactctagtatagaacatagctttttttcatggacataaaatgatacatctatcacaaactaaattctcataagtatgtttgggtttatttctggactttattatgttcaaaatattggtctgtttattgttgcaacacaatatttatattacttttgtacatcttgttggtaaatatcccttttttactcacatgttttttattatcatgggtattttcacattagcattctttgagataaactttagaatcagtttgtttccttaagaaatttttgattgtagatatattaaatttataaattaatttaggagtatttacatctttatactattgccttttttatccaaacaaaatatgctcttaatttattcatcttctcttcattctatcagaattttagagtttcttcttttgatttaattttattcctgacaattatattcctattataaatggatctttctgcattacattttctcagtagctgttgtttgaatatagaaatctattttttatacattacttttgtggtggtctccttattgaagttgcctattattttaaacaagttttagttggtattctttgattttataagtttaaaatatatgtcatatgcaaattatttccacctttctgacattcataactctcttcattttcttgattaagtgggatgctagtgcctttagcagtgtattgtgtaataacatggtaactaaaatacttattttatttctaacattaatgaaaatacagtagttctaattttctaaatcattaaacatgacactggctcttatttgtttttgtttttgttattgattattgagacagatcttgctctgtcacccaggctggagtgcagtgctgtgatctcggctcactgcaacctctacctcccgggttcaagtgattttcatgcctcagcctcccaagtagctgggaccacaggtgcatggcaccacacccagctaatttttgtatttttagtagagacagggtttcaccatgtttgccaggctggtttcaaactcctgggcttaagtgatctgcccatctcagcctcccaaagtgctggaattacaggcgcgagccattgcgcccagccaacactgggtcttatttgatgttagttttctatcataaacataatatatatgtgcatatgaatatatataatcttaaggatgtattcattggaattgatgttgaatgccttttggcattaagaaggtcaaatactattttacctttgatatatgaattctagtattgagtcatctttgtgtttcttgatgataaatttttcttttaatgttgaatttcatttgacagcattttatttaggatttgagtataccattcacaaattatattagtctatggttttctttatgcatttcatctctatcagattttggcattcattttatgctagcttcatgaaaatactttggatacttttattctttctctgtttcacaattgtgaaaatggtagaagagttatattgttaaagttttaaaagcatgatccttgatgtcattggaaccttgcttgtttatgcaggggtagggtgatggttatggtgaaatttttctctgtttattccagggctatttgtcatttcagactttctctttatttttgagttgattttggcaatttgattttttaattgttttagaaaatcattttacccaaagttgtataaaatatttttccaaagtttaaaattaggacttgaaaataatgatcaattgccctcaatcctataatctaaccagtgttaatggtggtgggatgttatttcatcatctctccatgaatatctacagatagaaggatatgtgggtggatggatgggtgatgtggtttggctctgtgtccccacccaaatctcatcttgtagctcccataattcccacgtgttgtgggagggacctggtgggagatgattgaatcatagggggaggtctttcctgtgctgttcttgtgatagtgaatgaatttcatgagacctcatgattttaaaaatgggagtttccctgcacaagctctcttgtcttgtctgacaccatgtgaaatgtgcctttcaccttccaccatgattgtgagacctccctatctatgtggaattgtaagtccaataaacctcttcgttttgtaaattgcccagtcttgggtgtgtctttatctgtagcatgaaaacagactaatacaatcagtaggtagatagatggatagaaattatcattataagaaatgatcttatatgcactattttaataaaatattaaatttaatataaaatattaattttacttgaatttaacagaataaaaataacttgaaggaaaactaaaggaattacagaattttaattctgaaaaaagtaattatttattgttaaaactatcagttctaaaggattcttccaagattaaggaaaggggatttagaaaatgactaaaaagttgaagaagtttttttaaccaaatggtacaggtttaggtagtaaagacgaattctgagatatgagtggtgagataattagtattacatctcttcccacctcccatctccctgccttccaatttttgttgattatattattttttctttgtcagggtttattacttttccattttgatctgtagccaaaatccccttagaatttcagtctaaatcctatatttacatgaattcgctcttcatccatggttgtttttcacctcagtttctgtattctttgttttttttcttgtgattcattcttgattggctgaattttattgttaaggagctactttcaagagggacttaaaggagtcttataccctcaactttttcattttggaattgtctatctgttgcctttatattgggaaagaaattcaccgcatacaagattttgcaacccacttttttctcttgagacattgtaaaatttattacaatggctgcataatatttcatggaatggatcttacttatgtaatattcttgtcaaacatatacaatttgaatttaaccataagataataggaggcaaactaaaactgagggacatcctataaacaactagcctgtactttttgaaaaatctaaaaagacatgataacccaatgcattatgttattctggattagattcaggactggaaaaaattgtctataaatgcttattacctggatgatgggatctatactttaaatctcagcatcatgcaatatacttatggaacaaacttgcacatgcaccctttatttctaaaatcaaagttgaaagaaataatttttgctgaataccgaggcttaaaccaaaacagaacatatttcagtttgtttttcattttttgtattaaaatacttatgaacatcaaaacatgctaaaactattgggtaaaaatttgatgagaaacagtatgtatgcaaaatctcaaagtatctccccacaaattataaaaggagagcttttacagtgaggaaagctggcagacagtactttaaccaaggaatcaacattaacatcagtcataacagaacattattatccttctgatgtaaggcactgagaaggacataatatcacttacataatattttattttgagacaaggtctagctttgttgcctaggctgaagtgcagtggtgcgatcatggctcactgtagcctcaacctcccgggctcagaagaaccacccaccttagcctcctgagaatctgggactacagacacacaccaccatcttggctcatctttgggggagttttttgtagacatggggtttcgctacgttgcccaggctggtctccaactcctgagttcaaacaatccacctgccttggcctcccaaaatgctgggattacaggcatgagctgtggtacccagctaggatcagaaatatttagactatcgctctagtcctctgccttagctattgtatgacttaatctgaactactagctttaaagtccacgagttcaaattcttgggagaaatagttgaattggtcactgtccaaccaatggattggttttccctgattcagatgcctgtagaggttatgtattacaattatggctgcaggagactatctttataaggggaaattctcagaaaacaaatatgtggggttggcaggcatcctaaataatgtgtagtaaggtttttgcaatgttgtctttcagcctaagaacaatgtaggtctcttcatttattcaaatcttttcttaaggcctttcatagagtttttagtgaaacattgtctctaaatatatatttagatatcttatgctttttgttattttggttattttgaataaaatcttttttcctagtatatgtatctgcatgattgaatggttcttatttctttatatacagcaattagttttcatatttaattttaaccaactacctatttatttatttattttaaataaataaattttgagctattttaaatagctcaaaggcttgcaggcaggctgtttatttttaatttttaattttttttttttttttttttagtatttattgatcattcttgggtgtttctcacagagggggatttggcagggtcataggacaatagtggagggaaggtcagcagataaacatgtgaacaagggtctctggttttcctaggcagaggaccctgccgccttccgcagtgtttgtgtccctgggtacttgagattagggagtggtgatgactcttaacgagcgtgctgccttcaagcatctgtttaacaaagcacatcttgcaccgcccttaatccatttaaccctgagttgacacagcacatgtttcagagagcacggggttgggggtaaggttatagattaacagcatcccaaggcagaagaatttttcttagtacagaacaaaatggagtctcctacgtctacttctttctacacagacaccgtaacatctgatttctctttcttttccccacatttccccctttttctgttcgacaaaaccaccatcgtcatcatggcccgttctcaatgagctgttgggtacacctcccagacggggtggcggctgggcagaggggctcctcacttcccagacggggcggctaggcagaggcgccccccatctcccggacggggcacctgccgggcaggggctgccccctacctccctcccggacggggcggctggccgggcaggggctgccccccatctcctggacagggcggctgccgggcagagacgctcctcacttcccggacggggtggctgctgggcggaggggctcctcacttcccagatgaagcggctgccgggcggaggggctcctcacttctcagacggggcggccgggcagagacgctcctcacctcccagacggggtggtggtcgggcagagacactcctcagttcccagacggagtcgcggccaggcagaggcgcgcctcacatcccagacggggcggcggggcagaggcgctccccacatctcagacgacgggcggccaggcagagacgctcctcacttcccagacgggatggcggctgggaagaggcgctcctcacttcccagactgggcggctgggcagaggggctcctcacatcccagacgatgggcggccgggcagagacgatcctcacttcccagacggggaggcagccgggaagaggcgctcctcacttcccagactgggcggcggggcagaggggctcctcacatcccagacgatggttggccaggcagagacgctcctcacttcccagacgggatcgcggccgggaagaggcgctcctcatttcccagactgggcggtggggcagaggggctcctcacatcccagacgatgggcggccaggcagagatgctcctcacttcccagacggggtggcggccgggcagaggctgcaatctcggcactttgggaggccaaggcaggcggctgggaggtggaggttgtagtgagccgagatcacgccactgcactccagcctgggcaacattgagcactgagttagtgagacttcgtctgcaatcccggcacctcgggaggccgaggcgggcagatcactcgcggtcaggagctggagaccagtccggccaacacgggaaaccccgtctccaccaaaaaatacaaaaaccagtcaggcgtggcggcgcgtgcctgcaatctcaggcactcggcaggctgaggcaggagaatcaggcagggagtttgcagtgagccgagatggcggcagcacagtccagcctcggctgggcatcagagggagaccgtggagggggagggggagggagagggagagggagagggagagggagaggatttttaatttttttgtttttgagatggagactcactctgtcaccctggctggagtgcagtggtgtgatctcggctcactgcaacctttgcctcctgggttcaagggattctcctgcctcagcctcctgagtagctgggactacaggcacatgccaccatgtctggctaatttttttgtattcttagtagagacagggtttcactatgttgatcaggctggtcttgaactcctgacctcaaatgattcacctcccttggcctcccaaagtgctgggattacacacgtgagccactatgccaggccagcttatttttaagtttttaatttttatatatttaggagtacaaggacagatttcttacatgcatatatggcatactgataaagtctgggcttttagtgtacccatcacccgaaacccctatttaattttctgaatatttctgtttatcagttgtatagcgtcatgttatctgcaaataaaaacagttttgtcttttttatagtatgcagccctatattttattctataaaaatatcaacatatttattatagtcagtaagaaaccagtacatttattttcattttgtaaacaaggaaaaggacagaactattttgctaccttttggcaggtctaaagaaagtgtgaaacaagatattgaatttcttgttgaacttaactggaaataatttggcctaccaacaaaactgccatccatccttccatccatccacccattgaatcaatgtttactttgtgcctcttccatgctgttgatccttgtggatacaataagaaagacacagtccctgaccttaaagatttgtcagtgtttttagccattggccatactgaaatcttcatgtttctcaagattttcaatttgcctttgcagctcagggagccaatggtactctggagaacccagccctggacacaagtctgttggaggaatttctgggcaatgactttgatttgggggccttgtaagtaatgagagcactgctctctagttgatgtttaaaatattatgaaatgattaaatgagctaagaagtgttccctcctcttctgttttccaaaataacttgggtagagttgacattattatgtctatggatctttgacaaatatcaccactgcagaattttctttgtgagaaattccagtcattcctcacctccacccgcaaattcagtatatttaatagatatggagctattcaggttatctattgatagtaatcagcttaggcagtttgtgtctttcaatgaatttgtccatttcaactaagttgtcaaattcatcagcataaagttcttcgtattcacttatacttttaatgtctgtaggatctatagtgatgattcatttgttgttcttgatgtcagtaacttgtctttttttttttcttggttaatctgacatgaagtttatcagtttttttaatctctcaaagtaccagcttttggttaaagttaaaattcttactttttgttttctatttcattgatttctgctcttattttctggtattaatataggcactctggccttttttatttttaatttacatctactgaagttcaaatttttgtataaatttctgagttttgacaagttcatagtaatataaccactaccattatcataacacacaacactgaaaaatttccctatgccgttcatttgtgatcagactcaccatctacactgtcccctggtaaccactggtctgttttttgttgctatggttttgatttatttcagaatgtgacataaatgaaaccatacagtatataacactttcagtctgcctcctttcatttagcataatgtctttgatcaatatttcattccttctttgttacagagaaagatacctttaagtgattataacagcttgtttagccatttatctgttcaaggacatttgaattatttccagttttggcaattgtaaatcatgcttctataaatatttatgtatgggtttttgtgtgatcaatagtttaaatttctctatgataaatacttaggataagaactgctggatcatgttgtaaatgtaagtttaactgtaaaaatatccacatttttagagtggtggtaccactttgtgttgttagcaatgcatgagatatccaattgcttctcttcattgccaattcttgggtattatgagtttaaaattgtttttattatagccattctaattggtttgtaatgacataccatgtattaatgtgcatttttctaataactaatgatgttgaacatcatttcatgtactagttcaccatttatacattttctttggtgaagtgttaattcaaatcttttgcccatttttaaaaattgagtttgttttctttaagtttagaaaaatttttagatattctggatataaaaagtttgttagatatgttattcatgaatattttctccaagtttgtcgtttatgtttttataatcttaacagtgtttttctcagagcaaaagttttaattttgatgatgtccaatttattgaatttttcttatatgacttacggtttatagctaagaagtatagactttacctaatccaagttcccaaagattttcttttaaaagttttatagttttatatttaggtctatgatccattttgatttttttttgtaaaaggcttgagatacagatttatattagtttctttgtatgtggatgtccaattatcctggaatcatttgttaaataactttctttcattaaattacctttgcacagttgtaaaaaatcaattgacaaaatatatgtgggtctatttctagactcttcattcctttccattgatctacgtgcctatcattttgccaacacaacattatcttgattactgtacatgatctttattactgtacacaggcactttattataagccttaaaataatatagtgtaagtcctctgaatttttcttctgtttcaatattgtcttggttattctagtttctttgacttcccacataaacactagaattagcttgtcaatatttaaacaattcttctgggattttgattaaaattttattaaacctagtgatctatctaaggagacttaacattctaacaaaattgagccttccaatctatgaacatggtatatctatttattgagggcttctttgatttctttcatcagtgttttatagttttcaacataaaaatactgcacatattttcctaaatatttcatgttcttctttgaacatcatggttttttttcaatttttagttccaattattcatcattagtatatggaaatattgattttcatatattgggtttgtaatcttaattaagtcatttattagttctaataactttttaaaatatatatttcttgggatattctatgttgaaggtcatgtcatctgcaaattgagacagttgtatgtctttcttttcaaactgtatatcttttgatactttcttgccttgctgaagtaggtaagacctgggtatagtattgaataaagaaatagtgagactagacatatttgccttgtccatgaccttggaggggaagcatttagtttttatcattaagtgtaatgttagtgatactttttttttaaccatgccctttatttgcttaaggaggttctcttccactgttagtttgctgataatttttatcataaatggatgttgaattttgtcaatttttttctgtatttattgattatatgttttttcttcccatctgttaatataatggattactttgcttagtttttgattattgaactgccttgtattcctggaataaatctcacttaattgtgatatgttatcttttgatacaatgctggattcaatttggtaaaattttgttgagcattttgcatctatgtttataagaatattgatcacagttttgtttttttatattttattttttctgggtttggtatcacagcaactatacccttctaaaattcgttgggaaattccctcacttaaattctctggatgagatagtgtagaattggatttatttcttgcttaaatgtttggtagcattaatcagcaaaataatctgttcctttgctttgttggagggtcttaaatacaaatttaatttatttagtagattcagggctatttatggtatctcattctacttaagtgagttagcttgttttacttttttcccaaggaattgatcaatgttatctaagttgttaaatttatggccatagagttattcatagtattttttattaaccttttaatctctaaagagtctgtagtgatattccctcttttgttcttcatattggtagtttgtttctttttttcttttctccttaatcaatgtggacgtttatcaattttattgattgattcaaataggtagcttttgatgtcattgattttctctattatgtttgttttcaatttcactgacttctactcttatctttattattttgttccttatgcttaatttgggtttagtttgctcttatttttctagttctttagagtggaaagtgagtttgtgatttgaggttaaactttgttttctgatttaagcattcaatgctgtacatttccctctgtatgtggctttagctgcctcactcagtttttgatatactatatatatatatttttttcagttcaaaatactttcaaatttcttttgagaaattttatttgactttctttgactcatgggttgctggaaatgtattatgtaacttccaaacgtttggaaattttccatatatttttctgtgactggtttctagtttaattccattatgaacagagaacatcctttgtatgatttcaaattttgttaaggtttgctttatgacccagaatatgatctatcttggtgaatgttacgtatgcacttggaagaatgctcactgtgctgttgttggatagtattctataaatatcagttaggtcaagttggttgacattcttgttcaggtcttctatatccttgctgattgctttctactaattttatctacgacagtgacagaaatgttgaagtcttcaagtgtgattgtggatgtttctacttctccatcagttctattggattttgtgaaaacataattgtattgaattgaaaagttatgtggttaagtgcaaacacatttagtactgttttgtctttctggtgaacttagtcttttatcagagtgatgttcctttttatctcctttttcttttctcaaaagaagacatttatgcagccaaaaaacacatgaaaaaatgctcatcatcactggccatcagagaaatgcaaatcaaaaccacaatgagataccatctcacaccagttagaatggcaatcattaaaaagtcaggaaacaacaggtgctggagaggatgtggagaaacaggaacacttttacactgttggtaggaacgtaaactagttcatccattgtggaagtcagtgtggcaattcctcaggcatctaggaagtctatttggtccaatattaatctagccactgcagctctctttttttttcttttcttcaacttttattttaagttcagaggtacatatgcaggatgtacagacttgttacatagataaacgtgtgcctaggtggtttgctgcaaggatcatcccatcacctaggtattcagcccagcatccattagctattcttcctgatgctctccatctgcccccaacacctgggccccccaacaggctccagtgtatgttgttcccccttgtgttcatgtgttctcataattcagctcccacttataagtgagaatatgtggtgtttggttttccatttctgcattagtttgctgaggataatgacttccaactccatccatgtccctgcaaaggacatgatctcattcctttttatggctgtatagtattccatggtgtatattaccacactttctttatccattctatcattgatggacatttaggttgattccatgtttttgctattgtgaatagtttcggctctcttttgattagtgtttttgttatatatcttttgccatcctttaattgtaacctatatatatcaaattagtttttttattcagcgtatcattgggtatttttccctatctaattggacaatttctgtctcaacttagacaatttatatttaaattaattattgatatgtttggatttgagtctatctttttcttttaaaaaatgttcatcccctctgcttcttgtacttcttttccccctttcctgccctcttttaaattgtttgaagatttttagtattccatcttaatatattgattgccttttaaactcttcatatagatttattttctttttttattttattattgttatactttaagttttagggcacatgtgcacaatgtgcaggttagttacatatgtatacatgtgccatgctggtgtgctgcacccattaactcgtcatttagcattaggtatatctcctaaagctatccctcccccctcccccctccccccaccccacaacagtccccagagtgtgatgttccccttcctgtgtccatgtgttctcattgttcagttcccacctatgagcgagaatatgcagtgtttggttttttgttcttgcgatagtttactgagaatgatgatttccaatttcatccatgtccctacaaaggacatgaactcatcattttttatggctgcatagtattccatggtgtatatgtgccacattttcttaatccagtctatcattgttggacatttgggttggttccaagtctttgctattgcgaatagtgccgcaataaacatacatgtgcatgtgtctttatagcagcatgatttatagtcctttgggtatatacccagtaatgggatggctgggtcaaatggtatttctagttctagatccctgaggaattgccacactgacttccacaatggatgaactagtttacattcctaccaacagtgtaaaagtgttcctgtttctccacatcctctccagcatctgttgtttcctgactttttaatgattgccattctaactggtgtgagatggtatctcattgtggttttgatttgcacttctctgatggccagtgatgatgagcattttttcatgtgtgttttggctgcataaatgtcttcttctgagaagtgtctgttcgtgtcctttgcccactttttgatggggttgtttgtttttttcttgtaaatttgtttgagttcattgtagattctggatattagccctttgtcagatgaataggttgtgaaaattttctcccattttgtaggttgcctgttcactctgatggtagtttcttttgctgtgcagaagctctttagtttaattagatcccatttgtcaattttggcttttgttgccattgcttttggtgttttagacatgaagtccttgcccatgcctatgtcctgaatggtaatgcctaggttttcttctagggtttttatggttttaggtctaacatgtaagtctttaatccatcttgaattaatttttgtataaggtataaggaagggatccagtttcagctttctacatatggctagccagttttcccagcaccatttattaaatagggaatcctttccccattgcttgtttttgtcaggtttgtcaaagatcagatagttgtagatatgcggcattatttctgagggctctgttctgttccattgatctatatctctgttttggtaccagtaccatgctgttttggttactgtagccttgtagtatagtttgaagtcaggtagcatgatgcctccagctttgttcttttggcttaggattgacttggcaatgcaggctcttttttggttccatatgaactttaaagtagttttttccaattctgtgaagaaagtcattggtagcttgatggggatggcattgaatctataaattaccttgggcagtatggccattttcacaatattgattcttcctacccatgagcatgaaatgttcttccatttgtttgtaacctcttttatttcattgagcagtggtttgtagttctccttgaagaggtccttcacatcccttgtaagttggattcctaggtattttattctctttgaagcaattgtgaatgggagttcactcatgatttggctctccgtttgtctgttgttggtgtataagaatgcttgtgatttttgtacattgattttgtatcctgagactttgctgaagttgcttatcagcttaaggagattttgggctgagacaatggggttttctagatatacaatcatgtcatctgcaaacagggacaatctgacttcctcttttcctaattgaataccctttatttccttctcctgcctgattgccctggccagaacttccaacactacgttgaataggagtggtgagagagggcctccctgtcttgtgccagttttcaaagggaatgcttccagtttttgcccattcagtatgatattggctgtgggtttgtcatagatagctgttattattttgagataggtcccatcaatacctaatttattgagagtttttagcatgaagggttgttgaattttgtcaaaggccttttctgcatctattgagataatcatgtggtttttgtctttggttctgtttatatgctggattacatttattgatttgcatatattgaaccagccttgcatcccagggatgaagcccacttgatcatggtggataagctttttgatgtgctgctggattcggtttgccagtattttattgaggatttttgcatcagtgttcatcaaggatattggtctaaaattctcttttttggttgtgtctctgcccggcgttggtatcaggatgatgctggcctcataaaatgtgttagggagggttccctctttttctattgattggaatagtttcagaaggaatggtaccggttcctccttgtacctctggtagaattcggctgtgaatccatctggtcctggactctttttggttggtaagctattgattattgccgcaatttcagagcctgttattgatctattcagaaatttattttcagtggtaactcgagggacaacaatctacatacctaacctcttgcagtcaatttaaagatattttaccacttcacatgaaaagtagaaaccttatagccataaaagtcccatttctctttcccttttatattgtagctatcatgtgtattgcatctatatatatttaaaactctatgagacaatgctataatctttggtttcaacactcatgtatatgttgaggaacttaagagagaaaaagtaggctattacattgacccaagcatttcccatttttgttggtcttcttcatttgggaagttccacaattctttctggcatcattcttcttccaccttaggaactccctttagaatttcatttagagcagatttgttggtgatagattttcttagttttcttccactgaaaatgtctttatttcaacttcatttttaaaagacatttttgctgaatatgaaatacttggtcattagagttttttcctcccacagcatttaaaaaatgttgacccactgccttctagcctccatggtttctgatgaaaaataaacagctatttgaatcattgttcccttgtatgtaatacatcatttttctccatctgcaagatattttctttatctttggtattcagcagtttgattatatgtttctaggtatgagcctttttttatattgtactgtttgggatttgctcaaattcgaatctgtaaatgtatagttttgaccacatctgggaaatttgtagccattgttttttaacatttatttttctttaccagtgtctttctttttcccttctagaactccaagaatgcaaatgttagacctttgatattttgcacaggtcactgaggctcagttcatttttttttcaatcttttttctctctgttggttatattggataatttctattgatttgactttaagttcactgactctcctctgtcactgtcatctccattctgttattgagcccacctcagcatacctgcaaatacccctaccctcctaagacagagagtgaaaccaggcctgaatcctcaatagtagtggagaaacctgtatgcagatatttctggtacctggctcttattactctctgccaagagaaacttccttggcaacaaactgtgggaagaaggtgagttcaacatttttcaaggaagttacacacacacacacacacacacacacacacacacacacacacacacagagctagtaggttgccaaatgtctgagcccacactctgagctggctgttctgtgctaggcgctgcatgggctgaactcagatcctaattgcccctgtgcctgccctcacattcctctcactacatcccagtaacttgtatgaattgtggacaatggatatatccttttctctgacctggaagcaacctgccaaaagttgtatggtctctctcctcttaagtgtcttctcctaaagcgaatgttccgctgattccacctgggttctgtataatcatctagactactttttataactaacagaaagacctttagctgtttagaaggaaaagtgaacaaaggtcttcatcaaagagctgtcttttacagggatggaaatgtgtgataccattccttgtccatcataatggtcacaaccaacactcctataacaaaagacaggctaacaagagaaaagcataaacaatttacttaattaaagttttatgtgatgcaggagtcttcagaaatgaaacccagagactcagggaaaactatttttatttttatgcttgggttcaatgaggagtgaacagctgtgtagaaatgtaagtggacaaaagggtgtgatctaatggtaatagactgagggaggaaacccagcagggtctgttcagatttttcttggcttctctttgtagcattgcttcttccaaggtatgaggtagggtctctttggaatgagagtccccttggaatgagacagaagggagagagtgacttttctgggttttatggctcgctttatggggaggagttctagtatctatgaaccatcttggggaagaagaattatggtttctgtgatttgctctgagggagaaaagggggtgagagacaggaggacaggggaaggtcagagataccttgcttctgaggtccttccagtgtccttcatttcaaagtactcagcatgccaaggcaccatactttggggtattgtgttctgagctacctgggaggtctgaaatctgccttatattttagtctccatgataataatggtccttcctaccagaccagaaatatctacccataggcttcccccttgctattgagattcaggactggtttgcccaagaggcttcactctctacctttgaggtgggtgatggggcttgcaggtgaagtagaagaggaagttactattgctgagcatttactaagtgttgggcattctttgcacttcatatattcacttatttaattatatatttgatgtaatatatctcgttctcttaactcttccaaataggtatattatctatgttttacagatggggaggataaggtgcagagaggttaagtaactcttcataggtcaatacgtggcaaagctgagataaaaatctgcctggctctagaaacatgccttttcttccacatgaagcttttaggttaattgatattttaaaggaatgtgaatctcagggaaatacatgaaatgtgtctaaaattatctaccaaatggtgtgactcagagtagatccgagccatagttcataaagattgtcagagttcacgttcattaaaggagagccctatgatcagataacctatacttgattaaaaaaatgctcagatgcatgcagttaagtggaactgcaataaaatctcagtgagaacaagcagaaacatggctagtccatgaccgcagggacactgggctagttcaatgatcattagatctgtacaacctgttcaaatactccaagttttaagtatttctaaataccagggtatttatgcaggttagtttcatttcatagtttcatatcacaacagcactgggatgcagggtttttgttttgttttgttttgtttttgcctgggtactagaggtgggattcagacctgggtttactacaaatcatgttacttcccctctaccatattgcctacaatgtgtgtcttctaaagatatcagtgtcaaccctttatctcaaaaacctaagagaccactgggctgcaaaatttctgagagctagctgaaatctcataggcagattttcagatcttaaatatattaaaacattgcattattggccttatgaaaaaggaccaaatgctctataaaaaacttgtcccattagatgctgtgaggaaaaatgttccatggtcagtaaattagcttgtgactcactggcttaaacaaaattacatgagtgtttttactgcaggacttctcagtgcctttaatgtgctaatgtgcaactaggtaagagaaacggaatgaagtgttcctcaaacttatttggccgtgggccccatttgggacgcattattcatgtatgaacatgtataaggcatgtatgcagagctgagggccgtcctgtcaacatgtgaaggtttgtgtaaattgcccttaactctttatttccttatgtggtagagtttgggttagttgtctgcttaggaggagcaggctgaggtcctctctgatttcctaggttagccagacagttacccacttggtacacagttgagctacggtggtgggacatactaggaaatgtccaggtatgcaatgctgctttgagagggggagattggagagacttaggggaagaataaaaccctgaaactgcaatgaaaaagggcaagaagtgttatatgcacgtgtgtgcagggaaggtaagggtctagaaaagagactagtaaatcttcaaggcaggctaaattaatgcagtttggtttgagtcagtgtgcttagtaggggtagataaaatgagctttagcctttgagatctggtataagggtaggagggaactagctgaggacactggtgtttgaataggggacgtcacaggaggggaaacttagagacatgttatatctgtgaaggaatcaacggcaggcttcattttatttcgttctaatgtttgagcttaagcatctaatattatgggtttaacttaggacttggcttattgggtttgggtggcaagatgaattaggagtcaattaccagctgcatgtcttggttctgccatcactatagtggggttgataagctctactgtgatgtttcaaaagggcgtgagagagtacgtggagttctgtgagaagagcttgttaaagactatttgagttcagtgactggtttgacttctgagttcaaactgatataataagagaaagcctgaagaagaagactgggctaaaacattatctgatactccttgattctaaggatatctgtgccagatgaaacgacctataataataagtaattttattagaatggtctgtatttaaaataccctgttatttagaggataaactctggtggtagaccatctgactccagctcgactaactgccagatgataatcatgagtgaattatttaaccccatcaagcctcggtttcttttttttttctttttttttttttttgagacggagtctcgctctgttgcccagtctggagtgcagtggcacaatcttggctcactgcagcctccacctgccaggttcaagcaattctcctgcctcagcctcccgagtagctgggactacaggtttgcgtcgccatgcctggctaatttttttgtatttttttttttagtagagatggggtttcaccatgctggccaggctggtctcaaactcctgaccttgtgatccacccgcctcggcctcccaaagtgctgggattacgggcatgagccaccgcgccagaccaaacctcagtttcattgcctgaggattaagtacaatgatggtaccttttcatatgagagttgtggaggttaaatgagacacacatgcaaagggttagcatggtgcctggctcagagtaggttctcaaaaaagtttctctacatctaaagcagcagcggaggggtgtgaaagggtcagatccttgcagtctgccagcacagagctggaggggaggagtggcatcttctttgccttgttttttgctgccatatcatgaaatggttttcttgggcaaccatactcattgacaacatttctgccaaaaccctttcctgtatcaacttctagatggtggttacaagccctaactgaccttgatcaagtatttattgagtgcctgtcacagtctccccattggagcactatggagtgcacatgtacacacacatgcacagcatgcacacatgtgcacacacacgcgcacacacatgcactcacacacacgtacgcacacgcgcacacacacatgtactcacacgtacacacagatatgcactcacacatgcccacatgtgcgtgcacacatgcactcacacatgcacacacacatgcacacacatacactcacacacagagtaggaagacatattcttaatgtgaaagttcatgcggaaagataaatcatatacatgaaaaattggaggaaatactttaaataacaaccatttttatagttggaggatggggtaaaacagtgaacaaagcagatataatccctgccagtagctccccaagggcagtgtggtgggtacagtctgccctggcagggcacccaggcatttttcttagaattggtgatgcatggtgataataaaaagcagactgactctttgtaggcttagtatttttttcaaattgtctgcagacaatgcatttccttattgcctgcacctggggtgagcaattcccatcccctcatccttggcacaccattactgtcatgccactccggtgggaagaaaaagacaatggcaggtagtctaaagtcactcagtaagatgaagacaaataagagtaaggcaaggaggagaggctaccattttagattgggtggtcaggaaagctctctcctgatatatggatttatatatacggcatattcatggtcatatgtagtttaacacagtctttcgtatttgttatgcaccaactctgtattgggcactgtgctgagccgagctcagtgtgaggtgcaatagagctttagagaaggggcggttggtgttgtatgaaggcaccgagggattcattggagaaaactaggattggatggctcaattgtgagtatcccacctagatattcacatgaagacacactgtgtatgtgtcttgcctaatgcctggtagagtcatgagcacagtaggcactcagtaaagacttagtaagcctggttgcaatatgaaagaaatactggctgcattgagggcagcatatatgtcatggatgtacatatcacctcaactagctggagggcaaagtctattttgtacgccctcttttggttcacatagattcaacccctgggagattgtttctccgttcatcctccaaaagacaaaaaacaagttgtatgtctgagaggaaggagtttagaaggcaaattattttatttttatcagctgctaagaatctcttgatttttcttccttttttttttttttttttttttttttggacagagtctcactctgttgcccaggctggagggcagtgttgagatctcggctcactgcaacctctgcctcctgggttcaagcaagcacgtctggctaattttttttttttttttttttgggtatctttagtgaagacagggttttgccatgttggccaggctggtcttaaactcctgacctcaggtgatccacccgcctcggcctcccgaatctcttgatttttacaactctttcctgctgaagctagagacagggttggccgctcagggtatgacccatagtgtctgttgctctctggtgtttgtctgctttatggaaatccttttggtataatagacaagtttggcgcacaaagactgaaacacagtctgatgtgcatttctgggattcttgacatgacgattgtgagtaaaaggggctaagaagtgaagaaaaaataccaaacaagtgttttactaggagctaatcattgctcttgttttaacaatttggtcagtttgaaggtagctatcattaattctcccttcaaattctctgaaaagaagtgcaaaatttctctaactgtatttaaatgcattgagcatggaagcatataaaatacaatgaaataaaggagtagctgtggtgaattttggaaggggaaggaactctaaagacagcatttaatattttaaaatcttcatcttaaaaccaccaacacatattcctgtcactcaacgcagggacttttggttctcgttaagggactgctggatggagactgcattcctgtttacaatatgccaagccatattttttttagtagattgatcatttaattgtgattttcagtttttattacattattgaattcaatgatgcctgtagtgtcagggtaactaaacaactgcctagagccttaaatgtggaattatgagatcacagagtcagttacaaaatttaatttatagacctagagtgatacatgtgaagaatttaagaagtcaaatgatactgtatatagcatataataggagattaccagcaatccccctgctctacccctgtctttaaattggctcccccagaggcagccactttccaactctttttggatatttctttttttttttttttttttgagatggagtcttgctctgtcgcccaggctggagtgcagtggcacaatcttggctcactgcaagctccgcctcccgggttcacgccattctgcctcagcctcccgagtagctggaactacaggcacctaccaccatgcccggctaatttttgtatttttttttagtagagacaggatttcaccgtgttagccgggatggtcttgatttcttgacctcgtgatccacccaccttggcctcccaaagtgctgggattacaggcgtgggccaccgcgcctggccctctttttggatatttttattgccctatatctaaataatgtttttatattgcttttttgctgtatacacttgaagaacataatataatcttctgggaagatttaattttcttatatcacatcttacattcacttctacactcagcttcccaatatcataaaattgtctaaaattttttagttatgtcaatatccagggcttacattatcatgatgtgtcacatataattttcatttttttttgctttgtttgaatcattgccttgtttttacaatttgtttggctttggttccctcaagttctctaaaaagagctgaaaatttttctcaatgttaaaaataatcaattcttttcctcgtcaataaactcctcaatccatgtatgtctttagtgactttttggttctatcaacttgttctccccattgtgttctatcatcgatgaaagaggaatgttaaaatatttagctatgtgattgtacaattgtctacatcttttagtttcattaatttttgctttgcgtattttgaaactctgttattaagtacataaacaatcatgattcctatgccttcctaaaaaatgactcttttattattagaaatgagcctctttgtctgtggtggtactctttattttgaagtcagttttagctattattcatgaaactgcttcacccttcttgtacacatttttctcttggttaacttttgacttatctgtgtctttatatttcaagtgtttttgcaggcaaaagagagttgctttttaaaaatccattctgatcatttctgccctttttcccccttagggacagggtctcactttgtcacctaggctgaagtgcagtggcatgatcacagctcattgtaacctcaaatttctgggctcaagtgatcctcctgcctcaccctcctgaatagctgggactataggtgtgcacaaccacacctggctaatcttaaataaaaaaaattttttttttttgagatggagtctcgctctgttgcctaggctggagtgcgatggcatgatctcggctcactgcaacctttgcctcctgaggtcatacgattctcctgcctcagcctcgtgagtagctgggattacaggtgtgcgccactgtgcccggctaatttttgtatttttagtagagatggggtttcaccatgttggccaggctggtcttaggctcctgaccttgtgatccacctgcctcggcctcccaaagtgctgggattacgggtgtgagccaccacgcctggcctttacattttgtttttagagacagggtctcactatgttgctgaagctggtcttgaattcctaacctcaagcaatcctcctgcctcagcgtcccaaagcactggaattaggtgagctaccgtgcctggcctaatttctgccttttaatgggagtgtttaatcttttaacatctaatgtaattattagtattgcacaatagacctccttattcatggaggatatgttgcaatacctctactggatgcctgaaactgagggtagtaccaaaccctatatatgctatgcacaaatttctttttctttctttacagtttcatgaatagaagattaattcttacagtagatcaggggtgtccaatctgttggcttccctgggccacattggaagaagaagaattgtctttggccacatgtaaaatacacgaagattaatgatagatgatgagctaaaccaaaaaaaaatcagaaaaaaatctcataacgttttttacaagtttacaaatttgtgttgggctgcatccatcctgggctgcatgcagcccacgggtggcgggttggacaagcttgcagtagattctagcaatctcagcacacgatttttttttctttccttactatgtcaagaattttcaaatgttcacttaaaggaagtactttgtggcttctcttgggcatatacaaattgccaactttacatgtcttgtgtttggaaccattataaagtaaaataaaggttacttgaacacaagcaatgtgatatcgtggcaggaaatccgtctttgtcttaggctactaagacaatgggtgggtagtggatacagtgtggatatactggaaaaaggggatgattcatggtttatgatttcatcatgctactcagaatggagtgcaatttaaaacttacaaattatttatttctggaattttccatttaatatttttggaccaaggttgattgtgggtaactgaaaccttagaaagtgaaaccatggataagggaggactatatctgtagttaagtctgacatttaattatttgtctgtcttttttttttggccccttctgtttcttattcttctgtaactcctttcttggtttattttgtattgtttgaataattttagaatttcattttatctgttgactttagttctacttctttgcattatttaactttttacagtttacttagagttaatgagttaatattgtaccactttacataaaatgtagaaccatcaacaatgtagttccattgatctccaactcccatcccctatgctatagctgtcctaagtattatacctatgtgcattataaacttcacaaaatcataatttttactttaagcactcaaatgtattttattttgttattttattttattattatttttgaaataacttctcagcctgttgctcaggctagggagcagtggcaactcatggctcactcaagcctcattctcctgggctcaagcgatccttcagcctcagcttcctgagtagctgggagcacaggtgcatgccaccacgccctgctaattttaatattttttgtagaaacagggtcttgccatgttgtccaggctagtcttaagctcctggtcttaagcaactcttctccttcggcctcccaaagtgctgggattataggcatgagccactgtgcccaccttcagatgtatttttaaaaattaagataaaaaataatttacattcaataatatatcatttttattctcttcataccttttcatagtttcaaatttccatctagaaccatttccctttagcctgaataactgtctttaacatttcttattgtacatgtctattctcaaattcacttagttttcttttatctcaaaatatctttattttgctttcattcttgaagactattttcattggatatcaaattctggcttaccaattttgtttttctgtagcactttaaagatgtttttgtactgtcttctggcctctggagattttgattagtcagtgattatttgaatcactatgaccctgcacataaggtactgtttttctttagctacttttaagactttctctttatttttggcttacagttactccactctgatgcggtagatgtatttattttgctgagcttcttaaagatataaatgtatgtatctttaaagatataaatgtatatatctaagatatatacatttatatctttaagaagctcagcaaaataaatacatctaccacatcagagtgaagtatatatcttcataaagatatatacatttatatcttttcctaaatttaggaagattttggctgttatatcttaatttttttttctgtttcatcctctctgcaggttcataaatctctttttctctctcttttttaaagttcatttttttcctctctgttgtttagatgggatgatgtctattgatgtatctttgagttctgttttaagcccatctaataatttttttaaatttttatttctggaatttttctaatcttagaatttctatttagtttttttatttgtagttttgatttctttgctgagattttatttattttttttcacaagcatgtgcttgtctgctccatttagcttcttatagtagctgctttaaagatccttgtctgctaatccagtatctggatcatttctgggttagtgttcacagattgttctctccctccaagctaggccacatttttctggttctttgtagagagcagtttttccaacccctgccggtggactgctacgggtccatggcctgataggaacctggctgcaagagcattcccgcctgggctctgcctcctgtcagatcagcagcggcattagagcggcattaggagcgggaaccctgttgtgaactgcacaggcgagggggatctagattgcatgtgccttatgaaaatctaactaacgcctgatgatctgagatggagcagtttcatcccgaaaccatccccctcccccactacgtccatctcttccatgaaatcagtctctagtgccaaaaaggttggggattgctgttgtagagtagtttttgtacctggacattgtgaatggctggattcttttacatccctcagaagagtatacttttgttttagtagtcaatcactttgcttagactcaaattgtaaactttgtctcgggaagtaactcaaatttcagttcagtcctgttgtctttggttgggctgtgcgcagtctgccccatatatgatagatcaggagtcagcaatagatttggcagagttacacacagaatccaggggtcccctgctcttatctttcttttccaagattcctctttcacttttcagcagctgtgtttgccccaaaatttgttttctggttattcaggccaggaaggctgtggatttctatcggaggttagctgtcctgtggctctgacttcaaccagccctcagactaaatgctgtaaacaagaaactcactgtatggcagtaccttctccaagtttcagtgcccaccacaatctccttgcttttgtctagtttccagtgtctttgggtaggtggtgttttttgttttgttttgtttttgtttttaaagtatttccagcatttgtactgtttctctgtgggagggtcagatttggtaggagtttaatcatcatataagaagggggaaaaaaaaacgaaaagagctctttgtgattctttagcattccctatttatctggttttgttctctgtctttaatgttaaagcctttctcaaaatgtctggtcctttattgtttgttcgtgtttaaaaagttctgtgtgcaaaccattgttctcatccaaggatgaatttcttggtagagtgatgaaggaggggatggctatttccttggtaacttgaaaatactacgttttcctcgagtacattccatttttcttgggaacattattccaatttcttacttgtgggaaatctgcttggatacatgcaaaacagagttaaggaaaagactcagaattcagtggttagatttttaatgaattcttctattttttcagcccagtagctcagccacagcattcactgtgcctggtaaccctgtaccacagtttccctgggaccatttctctagagagtaaacctttccaacttctgttggggtgatggaggtagctttacagggtggggaagctaatataagggtccaggtctttctttctttctttctttcttttttttttttttttttgagacggagtctcgctcggtcagctaggctggagtgcagtggcgcgatcttggctcactgcaagctccgcctcccgggttcacgccattctcctgcctcagcctcccgagtagctgggactacaggcggctgccaccacgcctggctcattttttgtatttttagtagagacggagtttcaccgtgttaggtgggatgccctcgatctcctgacctcgtgatccgcccgcctccgcctcccaaagtgctgggattacaggcatgagccaccgcgccaggcctccagttgtttcttgttcaaatgttcaaccaatccttttgttttcagctccacccttagccctgaatgcagaagctcatggtgactcctgcgtcctgggctttttgagttttgtttgattggaaaacttcttgttggatccctctgttccctccaccatttccaggcagtcttggttgtgttttgtccattctactagttcagttatcatctattctatttctgtctgctgccatgttattaaaatttggtctgctggggtctctgctcatattctttattatgtctctttattcctttacatttatttgagtgggatttttggaggagagtagatgtgtgtcctctcttcccttattaataggaagtgaataaattataaagaactaatttgaggagaaaacaacttttctgataaatgataaaagcaagcttttcatcgtattatgttggacttttaaacatactaaacttgaagcttcctcttcaagcaagagaatcaagtagaggttggggtgcttatgtatgatgcagcatcacagagatgctgagctataagcaacttgtaggtcttttgaaacagagattttcacacttctttagtggtagtacacatttttttaaaaataaaattttactggctgggtgccatggctcacgcctgtaatccctacattttgggaggctgagacaggcagatcacctaaggtcaggagttcaagaccagcctggccaacatggtgaaaccctgtctctactaaaaatacaaaaattaaccaggtgtggtggcaggcgcctgtaatcccagctacttgggaggctgagtcaggataatcacttgaacctgggaggtggaggttgcagtgagccaaaatcatgtcactgtactccagcctgggtaacagagcaagactccatctcaaaaaaaaaaaaaaaaaaaaattacttgcacttcaatatataaaacagaaaaaagttattttctcctcagcaatttaaagtgttcttgttatacaacccctgaactccttttaagagctttgggatccctttgcgcccagatggaaaatcattgctgtagggacagcaatttacatttcgttagctcaaacagtatgtacaaccatttttttctggtataggagtattaagaagtaattatttaaaaaattttattgatacataatagatgtatatatatttgggggtaaatgtgataatttaatacatccatgtaatttgtaaagattcaatcagtgccattgggatatctgtcactttaaatatttgtcctttataagaagcaataatattaaactttattgggcactcactatgtttgggacattatgttaatgggctttatatacatgatctcatttaattctcacaacaatgctgtgaggtagatgtaatgattatttccattttgtagatgaggaaatggaggcctggagaggttacgtacttattcatggatacacagctaggaagtggaagagctgggacccaaagcccactcacttaaccaggacacgaccttgggcctggtctgctggggtctcacttcccaaacccctcacccccccatgcccagcacctggaaccatcactgtgggggctgtacactgagggttgtctcccatttgtgacaaaactataatggactagagtgaaacaaaaacgcaatgtatgtctctaatcttcaggcaacgccagctcccagacaccccgccctattctgcatccgactcatgctctcctccgcaggtcaaaggtgagtgcgatccaccttcagcacatctggcactgttgctcttcctcctcgactctgggccgtgagaaaggggcacttcctgcttgtgtctctccccaggtgcatgctacccaaccctgaggcccacagctgggaggactccagctccttttctccaccccacagctgctcctgcgatgccgcccatgcacccgctgcagagcacctctggaatgggcgactcctgccaaatccacggaggctttcacagctgccactcaaacgccagtcatcttgccacccccctggaccaatccgtgtcctcccatctggggataggttgttcttaccctcagcagcctctgtgtcacagccctgggtaaagaaaaagatatttagttatcaaagacctttgcggaaagcctcggagcagcctgcctctggcagggacctagagagaatgcacagtggagtcctgtccaggagatggcagtgttgagacgcgtataggacatcgcgaggtcccagtgttcttggcttagacaatcttttaattaaaaaccctccaaatccaaggtcctcattcaaccaaaagctaaaatgtcagaaatatacagtgaggttctggatgatggaggaaacaccgtaagcttatgcagcctcagctagactacccaaagggattgtgaatgagctctccgagaaatatctgctaattaagcattaactaatgttcttttcttctgtcttctccccttttctttcttttatttcctcttctggatctagagagtgccagaaagagtaaaggctatcaaaaattgtggtaaaactccacatgaaaaaagttgtcgggtgtaaaatgtatacctatattttaagtctgtatcttccctgtctcaatgagtcctctgccattataaacattgtcagcttatctttcaggttggtgaatctcagatccacttgatcaagggaaatagtttcagcctagtagggctcaaggaaccttaactaattggaattagacttaggaaagcagagagcctgggagattaaattttatttaacataacatggaacacaaggaagaatcctaaccttcgttttggtgtcttgattttagagcctcattgcctccaaccaagaagagaaagtgcacgcaggcactggaggactccggggaatgccgagtgtgggcctgccactgcagaccgagtgagcaaacctgggtgggaacaagggcgatgccatcaaagccttgggcattaaagcaaggctttttaccagcctttgagcagccctacaaaagtttccctctcacagaagagcaatgataagctctggtagtttggttcttccctcttgatgtacctttcatgcaggcggggtcacacaggtcctcctaggaagagatgatgttttccgtctcaggtgtgggtgaagtgccaatctttcaatttcagggacgatgtgtctcagaggattcaggctccaggcctgtggaagctgtgcagtatggcagtgccttcaagagcctgctggtgtgcccattgcattgctgcaatccttctcaaccttaatgtgcaagaaatagcatgaggatcttggtaaaatgcagactctgattcagtctctagggtctgaggtctgcatttctaacaagctcccaggtgatggcgatgctactggctcatggaaggcactctgagaagcaagacttaccgtgtttttccactagaacagggaggtggaaagttgaacttttcctcaaactcacttcaaattggcaagttcccagtggatgtttgaaatttgaaatcgttttagaagtctttcatccgagtcatctaatgtccaagcggtcagccttcctggttttttttttttttttttttttttgtcttatataacgtgtaacacatcatgttttgagccaagagacctgattaacaaagtagccttttgaagtccaaagacttgaacttcaaaattttcagagtaaatgctatggcacatactaggggaaaaggataacactctaggccagtttctgtttgtttgtttgtttgtttgcttatttgttttgtaaagatgggtttcactaagttgcccaggctggtcttgaattcctggcttcgagtgattctcccacctcagcctcccaaagtctttggattgcaggcatgagccaccatgtctggcctcaacccagttctattagcaactgtaaacactcaaatgtgggcagtgtgaacaaattcagcgtaccaagtcccatttcttctatcccagtttgtcaccttagcaagaggttgaagacttccttcttgggttcccccatcccaccacttccccagattctagaggtttacactgtccagaaaggagatgtgcgtggcttcacctgagtgggaaaaaacacagtctctcttgctggggctgctgccttttcctttgacagccccatggtaagagctgattctctgagggacctttggtgtcagctccagcgtgggctgtggaggccttctgtggatgatgacttcaccctgtcagtcaagtcccacccatctcctgggagtgcggtctcagaattgcactgggcatctatccctcatatcaactaaacctcaaactgcctcctttctttgtatatgcatccaacatggtcagcagttgttcaccattttttttccaaccttagaaacacaaaatgctaattaaagccccatttgtggataagttagagctttccatccaccttcctatgcaatgctaccctaatttcttcagggatccccacatctagcctgtagctttttttatgattctcagacataaaaggctgagtaaatccctagccagacgggggaaccatctgttcattctactgcagatgcgctagctcactaagggatacaggacaagtcactcaaaccttccaagaattccctcatcaaaccagattgctgctcaaattgtcctggccatcccagagttaagctccatcctgcgatggttttctgctgcctgtcccagaaaggtcattgattcatcaccatcttcagagaacaaccatggaagagtgatggaaattactaggatttccagcagataggaaatcctatatcccttgtttaagtcctattcacaggtcactgaaaagctgactaaagataactgattccagacaacagttccagaatgaaaatgagcaggttcccaaggccaaaaaaagaaaaaagaaagaaagaaaaaaaagacacaaaacaaaacatttagttaatccgaatgccacattcttattacagtttgtatttttagcgaaagttttctagtcaataattcctatttgatgttgcaggggccaacatttctacaaaggtcctggggaaacagcacattgctagaggaaggaggaggttatgccagtcttacaggcagaaggatcaccaatttttgatcagagatggcctgagtcaatcaataaaacttttctagtgacctcctcccaagtagtacactttggccaagggttccaagatcctcatttatagggctgaaaatgtagaattactgggttggcgtgggcaaatgtaaaattttgcttagagaggaagtgctggtaggcaggcttctaccagctggttcctggccctacttggtctgaaccccaaatgaaaaaagggttcatggcctccctggaaggcttcaatcttctcttattttgaacctcaaatacaaaagggttttccagccctagagtcatggccggtggcccacagtaagaggtgcactggctgaattcacactgtagcatcagaaaatgtacctatctcatctctccaggaatctgggattcccagagccttatttttcttgattatgaaacgagaataataattttgactttacccatctctaagactttttaaagtaagttatgcaaacatattttgaaaggcattcaaatgcaagctatcagttttctccaaaaggtctggacttaggcagtttgctgcttttacattctcacttctgttagattttctcaagagatcctcaatctagcatgaagcgaagaggaagatttgaatctcacctcttccacttaacagctgtgacactgggcaagttatttcaggtctttgaaagtcagtttccacatttgttaaatgagattaagaatccttacctcataaccactttagaaatccttttggcagtatctactaaagcatgtcctgcaacccatagattccatccctagaagtataactagcaggaatgtgtacatatgcccaccaaaagacattcataagaatgtccagagcagcattacttgtaacaatcacaaaccaaaaagataccaaatggccatcaacggcaagataaattgtggtatatttatacaatggagtacaatatggcaatgagaatgagcaaagcactgccatttgcaacactaatgaatgaatcccataaacatactgttgggcaaaagaggccggtgaggccagggatggtggctcatgcctgtaatctcagcactttgggaggctgaggtgggtggatcgcttgagcccagaagtatgagaccagcctgggcaacaaagtaagatcctgtctctacaaaaagtaaaaaaaaaaaaaaaaaaaaaaattagccgatgtggtggcacatgcctgtggtcccaactacacaggaggctgaggtgggaggaaagcttcagcccaggaagttgaagctacagtgagctatgattgtgccattgcactccagcctgtgtgacggagcaagaccctgtctaaaaaagaaaaaaaaagaggccagcccagcatacaagagtatatattacatcatagtattccatttccatagtattccatataaactctgctatggtgttagattgtaggatagtggtcagtcttggggaggagagactaattattgacagggggcatgtaggtgtctcctgcagggctcaaagcatcctataccactagatcattttgtaaagtataaaatagtgtacttatgatctgtgtactcttcttgatgtacactgtccttcaaaaaagaaagtttatggaacaaaaggattcttacctgggagataatttaaggagctgatggaatactatgtaatgtgtctgggacagcacctgtggtgcagaaagcactcaaagtaggagacattgttagtagtattaatatgaataagttctagcactaggctcaggtgtgtgccttgggtttcagtgtgggcctgtaattccaggttctgatccctaggcttttcccagcttatagccatctcccagggaagccacaactgtgtcacccctattggagcagctgctgtgatacccttactgttgtgatgacaaagggcaggaaatgctgttgtctttgaggacaatcctccctgcccctgtccaccctccctgtcagtgtctggagaagtggagctggcttttggctgcatgcctgagaacattgaccttgctgccacgcttgagtgggaaagggcatgatttagccagtattcagtcaggaacatgggctagttatttcacattcgatagagctaccatggaggccaacaacaggagtatttcccaaggcttcttaggaaatactgagccacctaagttgaaacaagtacagtgataatgacagtgccactagtaatagctgaaggcaccattgtttaaactcttaccagtggtagacactgtgctctgcgttttacagtcatggcctcattgaaacccttcaacaactctggaaggtaacatgattactcccattttgcagatgaaaaaactgaagctcagagagcttaaatcatttttgtaagattgcttggcccttaagtgtagagttgtgattcaaacccagatctgtcttgattcaaaactccaagctcttgaccctttcttcattgtaggagagaggaagaaaaaaaaggaagaattatgttctctctttctctcaatttggtgtaagcaggataaccatagaagggtttctttccttttttaaaaaaaaaatattttagaccacttagcttttggaggagtgagagcacgaagagctccttgcattgtccacttcctgtatttgtagctgggaaaaaaagtttttcagtgttttgagaaatctttctaaaatgggcattttataaaaacaaaaaatgcatattttgcttaagtgacatttaatagcaataccccaagagaaatactttttttttttacatttggtatgaaaagcaacttgaagcagctctatttatttattttaggaagtcctcaatggaagtataaagaaaggaaaagtttgaagatgaaaaaacaacccagctcctttctcctgcattctccaagctgtgggctaggtggatacattcaataggagctaatgtcctatttgtacattgttactgagagccgcacctggtctcacaaacacccactatttcccattccctcctgatgccaggcatgagtgatggtagaggagttaaaagaaaagggaacagcaaccataccaataccattttacataaaaattatctgaggttgaatccatatggtttaggaggcatactcaaattaagacaagttgcaaggattatgcaaaataggaggttgcacatgtgaaattgctgttatttgaccatttttgacatagaaaagtggcagttttctacagttgatattgcacactaacaagattttctctgttactttatcttggttctagcttctgaaagtgctttcacttccattatgtcattctctctgcttgtgtaatgctgtaatgtgtaaagatggcaggatacatgtttttaatttctattttgcagttgagggaagtaagactccaagtgaataaataactggtctaagttcaaaaagctaattagaccacagaatcttggagccacaaaagacctgccaaaattaaaatatactggttgcaatgaacaaaaacaaaccaaaattcaaaaaaaagcaaaccctcaaactgccttgtgcaaaaaaagcaaaataaaacaacaataacaaaacaggcaaaaaacaaaattaggggaactattggctcctgttaacgcgagggtttagaattgggtcccagaactcagatgacaccatgaggactggtgcccttcatttttaactctgccttctgctgtgctggcatcattcccagatgggcttttccctcatgtccgaaaatggtgccagcagctgttggcgatgtatcttgcaggttcaaacctcatggagaagagtgagcatccctgaagtgctgagatccactctgcttgaattgggataggccacatgtccaccactgatgcaattactgatgcaaggactgaatgctgtactttggttgattgagctgggtcacctatcctcccggctctgggaatgaacttcactgcaaccacacagactgaaagtgaggagaagctatgcaggatgtagggtagatagatatcagggacaaagtttccaacaggtgtttaccccccaccctttgacagcgctgaccccaggctgctcctttcacagatgagaaaatgaggtcagcagcacacctcctacccccagcacatgacacttccctagtcactctgccttacacatggcccactcatcagcttcatgctgctagctgtgagtttaggaaaaacagcctggaaggaaggctctgacgcacctgtttctttgcagtgacaagtaggagtcgcagcagtgaagtccaggaccctgacagtgagggacagaacagaatgcctacagaccagtgctctcctgctctgaagtggcaaccatgccatagtgttccttggcacagcttattaaacagtcattatgaaaaactgtaagtggcttgagtgggctggagagtgaggggagaaagacagtgccaaatctcagtactgagttcaagcactggagctttgatgtcacctctggtcaagtggggcaaatcagtgagaaagtgtctgtcttactcctcattttttacatcctaacaaataaatagttggaatatgggtttctggccttcagaaagccagacttatagttccacctgattataatttaaccactaaatgatggagaaagaaggaatctttctgggatcacatgcccagtttaaactaaaaactggaatataaacattccccaaatcactaacacttaatcctgcagttaacttataatgccataaaatacttttctgggggccacattaaattgtgagccaatgaccaccccccacgtatatgctgtgaatgaatattaccaagttcactgacaatatatcctgcagcaatcgtggtagatggtttctttatgttaaggagtctgaagtcaaatcatacaaaacatcctaaaaaagtggaaaagcttcacccaatttttatgacataagatagtttcaagaaataaatgtgcaatcctatattattactcttaaacatcctttagacttctttatttcttagcatgtaatttacctacttaagccttctagaattttcattgggctataacttaagttaaaattttccaaattcaaattttaaaattttccaaattcaaatactgtaaagcttatcactaggactttcatggtggatgtactagagggaagaaatattttccttaaaagaaaatctagggagttaaacagactttgggagttggtgtgtttaataagctaaaggaagctcattgctcattgtatcattgaaatgtcatgactttgtgtcttttctactgtgtgcaattagaaaaagaaatgaggggtccatgggttttggctttgaggcttggccttccttagattatcttttggggaacattccatgttttgtaagaaatatgagcaccgaggtatgaaactgtcacacgcaggctcaatgctttaattaaaacttaactgcttcccaggctctatgcatcaagttgatcaagttttcaaggtaagtgttatccctcttcttatttgaaaacatttttaagtttgtttgaacagcctatcttggctccaataatctagaaaaatatggagaacacagagtatatggaaacaaaggagaacacagatggtatcaactcaaaagtaatgaggcagatttatgttgagtatttagccataattcacttttcctaagcaaaaaaggaaggcaatatttacccagtttagaattcaggccctcctaatttcactacttatatcaatgagacagaaaaacacccatcttttcttatatagttaggtctaatttgttacaaaaatatcattttcttaagtaacctaaaaacagttcagttagggcattaaaattttatcaatttttttctgaattatgtttcaatgctatcaaagaacttttaaaaagccagtttaattgactttatacttaacttttgatatcagaagcagaatcgccattcttaggtaagcagatttctataatcagagattggtgtttaaggttcagaataatcatcaacagtataactcttactgattgattccgtttctgattattgctgccctaaatttcagcctaacgctcatatcttagctgtactttttttcttcagagtttttgacagtgaagcataaaacatcaccaaaaatgttttattctcaactaagacggttcttattaccctctgtagtaaaatctacataattctacccatctagcctttagatgaacaaattagcagattaattctagaaacttgagtcaataagcagtttccagatggcataagatgtgtagtctttatcaaattcttcattcagtggattttctttttgctgctggtaggcactgtgattgtggagcctttgactgattggcttcttaagggtagtcaatgactcagtaacttgatccattgggaaggtgcaaagaacatgaacactcttctcccaagagacccattaattttttctgtttctggaattagaggaaaatttagaaactcttgtgttattcattataatagcagccatccaaattgagatcccaggatgcatagatctgtacagtagtagagcagtgagtaatgccctcctctgcttgcagagagcttctttcttgagaagaaacccacatttaggaagcttgatgaattagaaatcctgccgcatattttcatcatgcatgggaaaaattcatcaaagaagttttcaacttttatgttctctatttgataatgttatgcatttaatatgttttctttttattaacattttagaattgttttattaagcctattacagtttgagtattccttatctgaaatgtttgagatcagaagtatttctgatttgggaacttttttggattttggaagattgtattatacttaccctaatccaaaaatctgaaatctgaaatgctccagtgagcatttcttttgagcatcatgttggtgttcaaaaattttggatcggctgggcgcagtggctcacgcctgtaatcccagcactctgggaggccaaggccgcagatcacctgaggtcaggagttcaagaccagtctggccaacatggcgaaaccccatctttactaaaaaaatacaaaaattggttgggcatggtagctggagcctgtaatcccagctactcaggaggcagagacagggagaattgcttgaacccgggaggcggaggtcgcagtgagctgagatcacgccactgcactccacctgggcgacagagcgagactctgtctcaaaaaaaaaaagtttaggatcttggagcacttcagatttgggattttcagatttgggatgctcaatttatatacacaaagcattgctattagaaatagcaatgataaaaccaataaagcaaaaatttgattagccaccctgccactatcccatttctttctgcagaagtaaccaccattgtaggttttcagtgctattaccaaattgggagaataaaaaggaaatgaccatactctagtgaaaacaggtttccaatcgattgtataactggctctggttgatttaagagaatttctggtaattctgctaagtctgctttttcatgtgatcatcaataggctgaatattctttcatccaagtgactttttaaatatggtgttgctggtgaaattttgagacttttttttcctaaaggagaaaagagattaattccaccccagatatttcacaagtctaagtaatgtgttgacttctcaacatctagcctacatctttctattgtgttgtggagtcaaattaaaagtctaaaaaacacaaaggggaaaggcaatctgaaaaaaataatgctttcatttggcaagaattgtacttctggccgggtgtggtagctcacacctgtaatcctagcactttggggtgctgaggtggttgggatcacttgaggtcaggagtttgaaacccagcctggccaacatggcgaaaccctgtctctactaaaaatacaaaaattagccgggcgtggtggtgtgcacctgtagtcccagcttactcaggaggttgaggcaggagaattgcttggacccaggaggctggggttgcagtgagccaagttggtgctactgcactccagcttaggggacagagcaagactgtctcaaaaaaagaaagattgtacttctttgtgagaaaataaaaagctgggaaacagccagctgtgttttgaaatgttatttttatttcctcattaaaaattcaagaaatcaattgattaaatatagcaaaaggcacttttcacagtacgttttcttgaaatgtttatacaactaatactgttaatgaaaataaatatatggaaacatttgtaaaactggtttcttggtttctcttttcatagacctgatgtgggctatcgagttgtaacagacaaaggatttaatttttcaccagcagatgaagcttttgtttgccaaaagaagaatcatttccagataaccattcacatccaagtttggggaagtccaaaatttgttgaaaccgagatgggcctaaagccaatagaaatgttttacttgaaagtttttggcactaaggtatgtcttttatttagttcagtttatatcagtcaacatttattttgtttcagttgtctattgctgcatgacaaactatcccaaaatgacttaaaataataacagtcctttattttggtcacaaatctgcaactgggtcagcgtgtgactatgacaactcatctttgttcagaagtcatcaactggggcagcttaactgggccattttcaagaagcactcagatgcctgttgagtttgggctggccatcagctggagctcaaatggggctctaactgacagggcttagctcttctccatgtgaactgctctatgggatagcttgtgtttcttcacaccatggtggctggcttctaaggataaacattgcaagacaagttaagtgaaaggtgtcaatttctttctttctttctttctttctttctttctttctttctttctttctttctttctttctctttctttctttctttcctccttcctttctttttctttctttctttctttctttctttctttctttctttctttctttctttctttcgttcgttcgttcgttctttctttctttttttctttgagacatggtcttgctctgtcacccaggctggagcacagcagcatgattatgcctcattgcagccttgacctcccaggctcaagtgggagcctcccaaatagctgggaccacaggtgtgtgccaccatgctggctgtgtttgtagagatggggtctcactatgttgcctgggctgggcttcaattcctgggctcaagtgagcctcctgcctcagtctcccaaagtgctgggataacaggcatgagctaccatatccagccaagatgtcgatttcgtaagcctgggctcagaaaatggcacggcatcattcaaatgatagttttatagttttcagtgaatactcttgcaattcttttactaaatgtattcttaattattttatttttattgatgttgatgcattttcatatgaagtagattcattattttcatcaaattatcaaagagatctgtgacctaaaaaaagccaaggagccactaatttagtcaacgccctcctgtacagtttaacagaggggagactgagggccaataaggttacacaattcatccaaggtagtaaatgatagagctcggttcagaatggaggtaatatgacttctgagtgatcaaaaagtatttcttaaattgtaacttcatatccagttcctaagagggagaagcattcattatctgcctattttgttgtttttgttgttgttttgttttctttaagacagggtttcgctctgtcgcctagactggagtgcagtggctttatcacagctcactacagcctcaacttcctgggctcaagcaatcctcctgcttctgcctcccaaagtgttggaattacaggcatgagccattgtgcctggcctacatattttattctgatagctaacctgggcttaggcactaaggcttggctgctgcacacataactgttcttgcaccaaactgagctcttaaaaacaaaacaaaacaaaaaccaaaatacatataaacatcaaacaaacaagcaacaaaaagacattctttgtatgattatgaatgtaatataagttcattgtgaaaattttggaacataatagaaatgtatgaaaaagagatgaaattcatttgtatttgggatccaccatttggtagcctattttttctcttttcttctgttattaaaattaatctcatattgctagtaatatattgtggacatcacattatatgatattagtaaggaccccataaaaatattgttcacaaagataatatagttttccattgtatggatgcatcatattaattcccttattattagaagttttgtttattttccattttttattgttaataaaacttcagtgaacatccacccacctttgcataaggatacattccagaaggggaatttacacatgaaagatacatattattaaaactcttgatgtaggccaccagttgctttctagaaagatttgttacaatgtgaatacccaccagttgtatattacagggctgatctcacaagtcttttccaatattcacagaacaagaagagtttgtagcagatgctgaataaatgttaattcttatgatttgtttattatattgtatatcattgtttcttcatagtagaatgaatgtaagctccccaaggacaggaaattttgttaattgtgttcagttcttatctctaatgcctaaagcagttcctcgtacatagtgggtgctccgtaagtacttctagaatgaatgaataaataaggagctgccttactcctgatgtttcagccatcttccagccctctctgtattcactgcctacctgaaatactctgttgtcttgtgttctcattgtttaatttcacaggtatttatttctttcctcatcaacagaataccacgttaaggtagggactattgtcttatgtgtcttttcagtgacttgttcctcctgcccagtgcctaggatgatgccttgaaaagctttttaagtacttgaacattctttgctgattaacattttaattaattaattaattagtttactttttgttgtttcatacaggtggaagctaccaatcaaataattgctattgaacagtcccaagcagataggagcaaaaagattttcaatcctgttaagtaagaatttattttctgaattcctttgtgaatgttttgtgaataaacacctactttgttttttatatatatataattttatttattatctaatatattttgcttatttaaaatgaaacctaccatagaatccaaattaataatgttaattttttttttttttttttttttttgagaaagaattttgctcttgttgcccaggttggagtgcagtggcgtgctctgggctcactgcaacctccaactcttgggttcaagggattctcctgcctcagcctccagagtagctgggattacaggcatgagccaccatgcctggctaattttttgtatctttagtagagatggggtttcatcgtgttggccaggctggtcttgaattcctgaactcaggtgatctgcctggctcagcctcccaaggtgctgggattacaggcgtgagccacagtgccctgccattaatgtagtattaatgttaatattatgaatatatgtttatcaacaaagcagagttgtactatgcattgaaactgttgcaaaaattctttataaaacgatccatttttaaagccactgttattttcatattgtttattgctaaaaactttgctaacaaccttactaacaactttagttccttgaaataaattatggctagatctttcttttaatttttcatttaaatcagcatgatgttgattgaattagttttgagattgtatatccatgctgtacttagaagtcatttttccttattctttaaagccatgttgatagcttgctgaatggattccaatatagaaagcatatatagctggtagtatgcaaagcaatatggcagtccaagctagagtcctctctgtaggatgacttagaatgaatgggatttgctttctgactggtttggcagggatgcagtggagacatctcagggttttgaccctgaatcaatcccctttgggctgagaagaagatgatttcatggcctggacagtccagaagccacttgtacaaacaccgcactaaatgtgcgtggtgcatctggttctcccttgtctgggcagggtgtttgtggtcttcctttggaggaagctgcctcccactgctaggctaagagaggcaaatatgtgaaggggatgcaaaggcattcatgcttcagtcaggaggtgagtgctatcacaacagtggcggcagcacaaatgaaaggttttctttccccattgtggaggtaaaaggacccatgctgggtatatggagcatatggcccttgtgagttgaaaactccaggcttcagcttttactgactgagcatttcttacccttcaagatattccatggccttcctggcagctattcctgaccatgctgtggatagcagttaataatcggggactagaataaactgttctctcagtgtggtgagaactgggaaccaagcatagatgagagtctgaaagtggattagatatgatcagagatttggtgttctcttatagtctcttggttttttttttttgctgtttgttttagaattgacctactggctgaccaggtcaccaaagtaacactgggacgattacacttcagcgaaaccacagcaaataatatgagaaaaaagggaaaaccaaatccagaccagaggtactgatgtcactgtgtgcatggcagtgtggctgggtactttatctggccaggaagtgccctcctggggcccctctgatcttcctggtgctaccagccagaacacagggcctctaagccactttcctcccttctctgactctcagtttattaacatttctcctttacctgtggacatctttcttctcccaaccccatgccctgcaatgcccactttcctgccctgccctgtctctgcctggctcgattgcctccatgtttttctagagtgaccacatgtttatgtctcattgccatccacagattgagggctggctgcatttctcaaccagtgtgctgatctctagtcttgaagttctgctatgacctttttgattaaaaaagaaaataacttgttttcatgatttagacctgtggttttcaaagtgtggttccgggactagcagagatggaaactcattaaaaatgcgagttctcgggccttactgaagaatcaaaaactctgaatcaaaaactctggggatggggcttagcaatttgtattttaacaaaccctccaggtgacactgatacatactcaagtttgagaactgctgcttttagaacataggttttggagttggatagaattgaatttgactatttgatactggcatttactaggcgggtgaccttgggcatataacttaacctctctgagactcattttcctgtcctacaaaatagagacaataacaatattctactccaatgaagttgttttggtgctctaagtagactaatgtaggtaaactgcttagcccggtatatgacacactgagctcttgacagtaactaataataataatgataacggttactactcttactgatttactttagatgcagagggaaactcttgttctctaagagaataggaatgttacagaggaagctggtgaagttttttcatgcagttcttgggcaaaagcttctttgatgaggatagttttaattttgacttttaagaagtggtctagtcttaaaactgtctcatcagtggtacgtatgaagaggaattgaaataacagtgatgaaaattgccttggaagcaattgaaggggaggtctcagtctttggctaaagtcaagcccagaggttgttgaaggcacaggatatatggccaagagcaggctgaactgggaaggatccagtgtggtggggcagaccctaggagtcagtctccattaaggcccaggccatgtggcttctggggctctgaacaaagggacctttaaggtggcttcctgttgtatttgtgagccatgctgtgctgagggctcaggactgcagcgtagagaggcctgtgctgaatcagcacagataggctgactccagacccctcctgggatgtctccgcagggtggcctgctttcctgctcttttggggcatgtaaaacagctcacagataccaccaactgggcaaagagctgacccataacaatagcaagtgaatcaactactctcttgtttcactggggggacaacttagaacagaagggaaaaggcagtctttaaataagcaaactcttctcgataagttcactattgatcaactgttgggtggtatttgtttgtacaaattgtgtctccattcctgatgcattggcattggtctgctgtctctgaattagatacttcatgttggtggttggactgtatgctgctaaccaagaccagttctatctgttgtctgcccacatctctgaaaggatcattgtaagggtaagctcagttctctgacttttctggatctcacatgctttcctcctatgtaggcagaatttgaattttcaatggtgtgcttgaatatgctatttcgatgataatgatagtaatggcagaaactattattttagttttcacacagtggttcacaaccaagggcaattttgttctccaagggtcacttggcaatgtctggagacatttttggttgtcacagctggcatctagtgggtagagaccaggcattctgctcagtaccttacaatgcacaggacaacctccacaacaaaacattatacctcccaaaatgtcagtggtgttgaggttgagagactctggtttttactctatgttctaggcactgagctaaacaatttatatatgacatcattttacattgttatactttcacattacattatttatacccagagcaactgaggcttaagagactaagtaactaatccatgatctcatgaattgtaaatgatggagcctggatctctctgaccctaaagcccacagggtggggaaagtggtaggaaagcattccaggccaaatgtgattggtagcaccagggcatctgggctactgtctagcacatgggaatggctggttcagcacattttgctgaatgaatgattggtcacagctgtgcagcggagtcttggcaggcacaaaacataaagctgttggtggctgcagctgcagctgtgtgagttcaggctggccaccactgaaaataccagaggcatgaagtaacaggtagccacaggcctggaagccctgggaggggctgtgttgttatggatctttgaagtgatacagggaggccatgcaaactccaatagagaacaatgttcactgtgggcctgcccatgtatgtggctgttaacctgaggccctgaggaagaaaagaagatctgcccatttggggaaatggcatctctccttgcccgtgttgaactgttctgaaacaaagggacctctgtaattccttttgtcaattaaaattaataagcctcctattagtggaaatcctttaactatgtctcaacgttgtaatggagatgaagtgatgatagaaatgaggtaaaacacgtatgtgttcagcaatcccagggttagggaaggacatgcacaccccaggctgcatttttgtgggttctgacataacatgcagcaaatgaggatcatctggggcagaggcaggtggggccctctccttgcgtcataagccaatacagaggtgcctgtccatccctctgcaggggccagggccatctttgacatcttatttgatgtaatctggaattgccttgctgtactgacaaatctgatttaaagtaaagtctggaaacccaggttgcatattgtttctcttaggaaggaatagagacagataatgccattcttttcagagttagcatagctaagatatcatgacagtactctccggagctgtataacttatgcttcagacagatagtctgctagtcacctgcatacttggaataatttacctagtgacaaggtttctccatttgctgctgacagctcctgcaaagctatacgcagctgctgtacaagtccacacaacagcaacatgagagggagggagctccactctctagcattctgtttaccaaaaactctctgttaattggcacctcctcaaatccaaagcacaatgataatgagatcataatgatgactttgagaagtcgaaagttccatgattcgtattcggtgtgagtaccaaaaatattaaatttactcagcatagtttgggtgtcatgctattcactaaatttttatttcaaaaaatgattgtattccagatctgatagtcttctcccagacacaattttggttagagagaataccctattctacaagtgtgctgtataacacaaaagttaccctaacagcattgagaagataaggattactaacatcaaccattcatccccccactagaaatatcttattattatttcattcaaactctgaaacacagaagtgaaaatgaatgcagactttttggtttatttaattgtttaagaaatggcattattgtttgaattagtgagttttagaaatgtccacagaatacattttttgccacctgagattctagaggggcctatacaggtgcatacaaatgggttgggcagagggcagaccagccaacattctacaaaagagccagatgtggcctcttaggccatggcctggttctgttagtttaagctccggaatgaagaatgggaagaaaaatttgacaaagacactacaagccctgactacattaaatggagaaatgaaaactgcatttaagcaaatccagacttgttctgtggcctaagaaccacttgtcctaatggcagagattggcattttactatttggtaagggtgattgtatgagggttagacctagatgagttccaggtctccaggaagggtccagaattctgaccaagcttgtcagaattctgcttggagagagaatggtgggcaggacccagtaattattcatctgggttgtcaatcaaaacagctttagaagtatattatggtcctgtagtataaattgaccaatttaatgaaaattaaggcttactccaaagaacagatttatttgcagagtctttgtttctgggagcatttcccagtggagttccttcagtttccccttgttaatgactgggctgttctatctcagccccactttccttctaaaatacttaattaaacctggtttggagtgcagtgttgcaagcaggagggatgattacttttgtctgcctttcaaagacactctagggtttcctcattttgaaaaccaatagattattccagtttcttttccagaagaatagaaatggtcatgtccccaagaattcttcctctactgctctgcaaatcacagtgcgtgacatgggaaaccaaacctagggttagggaagatgatataataatgcatatgtgtacacatgcaaacacacacaaacacagacacacgcattcctcttttggagttcagatgaatgtttgtttactcaaagaaaacagtttatggagtaatgcctgttttggactcaacagatctttctgtcaactacagaagggcaacttacgaccaggagtacatggcataaagaagtagttctcaagcttgtattatgaataagaatccccagagagcttgtaagaacacagatacctgtgtttttgattcagtaggtcagggatgcctgagaatatgcatttctaacaggcttccaggagatgctgatattgctagcctgcagaccatgctttgagtagcaccagcagagagtatttctaggtcctttttctgtaaccctctcaaaaggtgcaaaaatggacttcctaagagctgccttcctcaggtcaagctcttctattagttcattggctgctgctttcgaatcccaaacgatggtaaaacaaattccagcttttcacttctaactcagcatagccttcaaattgctgctgatgctgttttctattccagtaacctgcagggggcgccatttacattgtattttttatgaaaggcgtccccctggaattgtgcaactctgcaggtgcgttgctgaggagagcagatgaagcaattataggttaaatagctgctgctgtgcccaggagagtgtgtcgagaataactttgagacttttcatcctcatttttgcaaactgttcatgcacacatgatttcacttaatcccacaataaccctatgaggtgggtaaaggagacatgattctttattcatcagaggaggacacagtacagagaaagattaagtggctgccccaaggtcacacagctagtttgtgttataacatagactagaatgctcgggtctcttccctaaataagaggatatgacacaaacaataaaaatattttagacattttaattaatttgttttggtgtttgatatccatcagccactattgggtcacatgtgaatacaaactcataattccagaaagaggtagtatattgtggcttgctttcacacatgaaggttgtggattccagagaaaggaaataagttcacagatcttatgagaacatttcctgttactgatgaggaattctccctagggctatatatttagaatgttgtgaatctgtggccctttccaaaataatgtgaacatattttagggatttgagttttcatctgatgagagctaagtgagagtattgcaattgttccaaaaaattaaatccacttatatctgctgttccagtatcaagttaccaacatgataataactatcccaaagctcattatgaaaaaattcatcactgtcttattttgtttccttgaagtggctcattatgttcaaaatagagaaaaatacatcaccatcttatatggcatacctttggatttagttgattggttgctataaaaggatttgagtcaaagccaatttgccattcacaaccaaggggctctagggaacttgcagaaaagctctttgttcaagtaaatttacacaaaataatgttcaaagtttttactttatactcttcccccactccccactaccctcccaccccattacattctttcactgctgtttttttttgttttttttaaattttcttgagacagagtattgctctgtcccctaggctggagtgcagtggcatgatctcagctcactgcaacccctgcctcctgagttaaagtgatcctcctgactcagcctcctgagtagctggggctataggaacatgccaccacacatggctaatttttgtatttttagtagagatggggcttcaccatgttggccaggctggtcttgaactcctgacctcaggtgatccacacacctcagcctcccaaagtgctgggattacaggtgtgagccaccacacacctggcctctttcactgcttctgtttatcaagtatcaatggttgagtcttccaagcagctcagggttcagacacttgggattgaattaggaaattgaagacatcaaaaagttctttaaacccaaactaagaaataaactttgtggtttcttttaattatttttaaaattgtaacaaatgcatatgacaaaaacactcaaacaataccaagagagtatatagtgaaaggtgaatctccctcctaccactgtttctccatctcccaggctccatccttgaggaaaccattgttattggtttcctgagtagtcttcagagaaaatctatgcatattcaggtgctgagcctgcaatgtatcatataccaccagaaaggtaaaaagtcaagtattagtactgactttttagataatcaggatcacaactgtttatctaaagttgtgacagcctgcctcaatcataaaaatacatcataattttaaaaacaaattaattttgttgtgaggattttgagggatttagagatgcttactttaaaatatttgggaatatattcagtggctacagggaagcaggaaggaaggcagtgcagtggaacattctttgacaaagaattttatttaagagtaaaatctccagaactttgtctagtccaatggtttcacttggattttctttgaagattgccaggactacttctaagcaatgccgtgaaacaggcaaatcattatttaataatcagaggacttgtagttccagctccagaacttattagctttgtggctttgggcaatttatttatcttttcagagtgtcagtgtcaataaaatgaggacaatagtacgtgtctcatataattgcactgtgaattatcgcacaacaaatgtagctgttattattcttccttcagtatcctctgtgtttagggaatagttgatgtatattaaatatatttgtattatcatttgcttgtcacttgtgtatgaaatcataaatataaaagcattttgaaactataatagggctagctaaatgcaaggtatttttatttatctgactttagtacacctgtaatattttctgatataatgttctgattttaaatcatgatgatgatgactattcctggaaagatagccatttttagttttcttctttatcatccacctagtataactgatcacattcttaattccagatagatgcaatagagattggatgtttcaaatcagggtatacagagctcctgctagcggggaggcagagtggttagggaagcctccctggctctcctgggccccggaattacttggatatgtcagaatgtcccactcaatacaggattctcttatgaaagacttagataatattcagtttgcctttgctctgaacactaatgtgatcatctattcctgctactgttactttaattgtaatatatttatgtatttttccaggcctctaaccctgggcagtttgaaaatgacagtgatgcattgtggcagcgaggacaagttccagaatctattgtctgtcacggtcgagtaggaatcaacacagatgcgccggacgaagccctggttgtctgtggcaacatgaaagtgatggggaccatcatgcatccctctgacagccgggcaaagcagaatatccaggaggtgagcacagattcaggccctgggcccctcctctgacaccccagtcaggtttgctgggtgctcctggcctctgacacaccttgaaccgcacatctttacatgtcacccactggtgtgagatgaacacactgcttaaaaatgatgactgagctgctgggcatctctgctgaaattgtaaagcagttcctccctgagagaatggatttacctgacaggagcagtgggcaaagacagcatgtcattggcctcacaggcagcaagtctcagttattttccacaggccattgcccttccttccatactttgtcagcttccagagcttgccttttcctttctgtctccccactcatcttccaagcactgtctcagtccagttcctgatcatatttctcttggatgtctccagcctcttccttctagagtccctggcaccaactctactggccattatcttccccaggcatcgtctttctctaggaactcttgagaagctcctcctcctcatcccttacttggtcagttcatcgccaagagttccgggtgaagacctttttcctccgtggagaggcagttacctagaggaaaccagaagtcaggcctagatgtcaggagatggcttctccgctttgggctctccccagttacgtgaccctggataaaaagcttaatctccttgaactcagtgtcttcagctataagatgaaaatggtgcctgcctgcctgcctgacacccttggctcttttttattttttaaccagttgaactgaatcatcttggaaagctacaactgctatgtagaccataaggatgaggattaagcttccaatccatcagccagctactaacacctcattccaacttttctgccatttaattatttcccatgcattgcttctaccacttccccatcatctcactcatactacttctcttgacagcatttgtgaagctgtgttttaaaagttccttttctctcctttccttatccctttttagctaatagaagtcctaatctgttcactattagcccctcttccagactgcattcctttctcagtgcaaatctgcactggttttcctaaaccagccaaggaatgtcctcctttgcttagaggattccaaagaatggttgtaattgtagacttttatactgattgtgaagctgcggttcatattagaagagctgtgacctactagccagatgggaatgcagagctagagagttcttacatacatttccagatgtcagtcctagatattgtgactttgaactttagagagagatcatctgtctgcatttcaggtcacaccaactcaaatttatccttgcaattggctatacaattcactaccaagtcttactaaaatgtaaattgaatataacaagtgagaaaagtcctgtacaacccttcctgctaccaccaggcataacacagaacttcatttacaaaaagtcttcaaatattgcttgttggtttgaagaaaatatattgtcttaaaataacaagcttctggagaacttctcacatcccttctaaaaagccttctccatctaaatgaaatgtcacttcaatccaggctctaaatgtgaaatttctgtatccccttcctgctcatggcagcatgatagaataaagaaaatcctggtccgtggttagaagtctaagagtttagtcctgactctggcaaccaccagcccaggaactttggccgagaggcgatctgtgactctgttttgttgtctgtgaacaggaaatgctcatattcattttacccaggttaagagatttttctaaactcatatatgtaaggtattttttagccagacaagtctaagcaaagagaaattattttctatttatacaaaataaaaattacatgtaatttatttattaaatgatttcatattaatagatttgttttgataaatctgtgcacatttttgagatatatatttgtagaaatcttgtctgtcccagtccactgtttattacagagatgagggagatgatggtaatgttgatgatgctgatgacagatgtgtgaatttcatcttcacctcttcctgacttagtttttgcaacttttaaaaagagagcctttctttcatatactctggggatctgacccttggtcaatttgatggcatgcataggactggaagcaatttcttattctttaagagtgcattctaaccacagctggcttctgaatggatgagctgctacaaaatgtagtggtcaaatatgttacctaatactacaattggggaaaatggatatgggctgctgctttgccctatgtgtttcctcacgcaggaaacacagatttctttgtggatattaagaacatgattatctacaaagtcctggtgggggagatctctgatgctcacagggacacagatccaagacatggagaagatgacgcagatatgaccgaaacctctgcaactgaggtcctgggcagaggagcagcttaacttgcccagccattggcatcgtgtctactgatgcgactgcagactgtggaaggacatgcagctctgacggtggaaactgagcaaaactaggggggaaggacacgctgaacactaaaggcacatgaagaacctcaatgtcaatgcccaaaaacatgaggaagttgagagttgaatacatcagtcaaattctgtggtgaaggctgaaaaaaggtagcaagatattcaaaaattcaagccagaaaagggaatcgttaagatgaaatgctcaaaggctgttttgattttctcctaaccacaatacccgtgtgctagtggaagacaaaagtagacatgaaaaaagctcaagaaagtcaaacatgcaaagtctccctctgggccaggagccaaacgcagaagttcctttgctcagggtgagcaggtgtcatttaagctgctcctagtccagactgtggctgggctgtgggccatcaccagatgacagatagccttccctgaacagactgagtcccatggactggaaggtgttgtctgtgatgcaattcttgagctaatgatatattatagaaaccttgggtgtgaggcagcatgatgctgatggctatttgcatccatggtcaaaactttccaaaacttctgtgggcaaggtcaaagcagacacccaaattcagttttcagtttcttactcaacaggcattgaagagcaaggcacagcagtaagtgctggcctgggtagggttcctgggaggattcaaagaaggcacaccctttgcctcaagtgttttccctaggccaagtgtacacatagggatcatgcaatacaggctactgtttatatttagctttgggaagactataagtccagaaattagaaaagcattttgtttgaggaacattgtcatataaaatgtttaggtctccaagtaaccctcaaaatttttcttggctgaaaatctgtctagaggatgatagtagtaccagagaacctaatgctatgtctagcagtatgtcttggggaatcaaggatccagtttagaaaccagggaccatttccctctctgtagcctggacagcctacatgagggtactttctcctctgcttttcatctgcaacaaaggaaccaacactgcctctgcttccttctttagctggggccctgcaggtggggcaggaacaaaggggaaaataggaattgggcataggactcccaggggcctatggctgaggaaccgggtagggcctaggcagtgcaaggccagtccaggctggctcctgattgaccctctctcttcaattctcttcatgtcagggattgtcttgccattttaataccttcgttcttttattccttcttttttccatcaaaaattttaggtgcctattacatgtcagacactttgctcggtactgtgcaggtcctgagataaataagactcaagaatgaaacttttactaaaatttaagctccaaaagagaaacactcattgaatctccagtgcttaggagatcatctggcacatagtagctactcaatagatatttgttgactgagtgaaggcgctcacagtgatagatatatgcacagggctatatgagattgtgactgttccttccaagtatgacctgcaaggccctccctgctctggccttaaccattctagtccagtaatgccaaattctgcctttgttctgcagatgtcattcagggcatttgctgtctcgggccttggttcatggtgttctctgtggctagcattcctgtcttagtctcatccttccccctcccttcctatcttacatctttccctaacgctttaagttatcaatgtatttaacaattattagctgagcacctacaacatgcaaggaattgtacttgaaactggtgatatgttgatgaaccatgaccttaaacatgtcctcactctcacggggtgtatgtgatataggagaagacaaagaatgaagttgacacaattagttgtcttgtaattgtgactcatgctatgaaggagaactggtgctatgagcacataaagcagaggaactttgcctagacttggaggtcaagagatccttctctgagaaacaatgcttacattggtgaaggggaaggcaggggaatgggaaggaagagcttttgagtctgggaaaacagcatgaacaaaggctggaaagtgaaaggagcagagtttgtctgaggaactggagtaagccaagatctcagctgggcttcatcatcgctaggaagccttcctttacgtgtccctgagaatattttcaacacctcctcagagctgtaatgattctctgtgcataattccatcattgtactatgtttctcacattgtaatataatcatatatgattacgtatgtatctatcagctgggtcttcctgtctagaccacaaacttttaaaaggcaattttttaaaacttttattttaagttcaggggtacaagtgcaggtttgttacataggtaaacttgtgtcatgggggtctgttgtacagattgtttcatcacccaggtattaagcctagtacccatcagctgtttttcctgatcctctccctcctcccaccctccaccctccaccttcaaaaggccccagtgtatgttgctcccttctatgtgtccaggtgttctcatcatttagccctcagttataagtgagaacatgcagtatttggtgttctgttcctgtgttggtttgctaaggataatgggctccagctcaaggcaattatgttttaagtcccaacacttagtagtgcatgatatgttaaaggtgattggtaaatgttagtcaaataaaacaaagaatgaatgatggcagtaagctcagaattatactctggaataacttcctgaaataaagctaatccgtttagccaattaagcaccaagctaccatctttcacaaccagtccaactagtgaagggctgagaatcctaaacgatggtggaggggctctactgccacctcagggagtctgtcaagggaggagctgagggccatgacagtggttttcttaaaacaacaataacaaaatatgtttttggttcctctatcacatggatgaatgcccaggcagtttacttttaattgcctcgatagctactcaataaatatttgtatttatttgtaattctattatgttccaaaagaaaatttagggtacccacaaagggctaccaacttttttgtcagataaagatattaaaaaaaaaattctgctattactatcatttacaaaatctctcaatttaaagaggaatcctttggatcaaacccatttagctttagggaaagttcactgtactctcttgattgttatcattttgctgggaccccgtagtgacagttgggacagcctttaatgatgtgagagcagtgattgcacgtagaggatgccctgctggccggggtgatgtgggggaggcatgtccaggggaaggagggtggctgggtcctgaagggccagcagttgggtaatcctggcttggaatccacttgaagaaattatctccagcaaaatgtccaaaagcaattcagtgatgtctctgggtcactctgggcattaatttgaatagcaaatatctatgcgagtaaaatctgctcttctttaattaaattaggttgacacgaatgaacagctgaaaagaatagcccaaatgagaattgttgaatatgactacaaacctgaatttgcatctgcaatgggaataaacactgcccatcaaacaggtacacacacaaattccccttttaattttgtattgccaactattaaaattttaattacctctttattttgaggttatgtgctatggcatttgacaacgctatgttgatctaacttgttctctgtgaaactcatagtcactagaacaggaaaggttaaaaaatttctgtgtcatttttactcaacacccccactcctccaccccaaggtactggtggtgtaggttgaatatatagtttctttgcacaggagtccttttgctcatgggctgagggttcagggacagatgatggctcaacctatgtgaggaacggcattgggcagtcgggaggtggagggagaaggtggcagggtaagtggatctagataagagaaggggtaagcaaagtgatgtttatactccaatccaggaagcctaaagaaggaaggaataaaggaatattttaggggcaaaggcttcctataggaaaagaaaggaaatcaagccaacgccccatctttacttctatggacagggattttaaggcacttacctcccccctgttggcccagagtctcaaaaaaaaaaaaaaaaaaggaaaagaaaaaacagaaaacactcccacttttaatcctatagtggttcttggctcaaaattccttctttgctgcaaatgtattgtagatcaaagcaaaagcttagagaggattttctccagaaagatctttctttgaagattaaacctgtggagtgttttgtatacaggaatgattgcccaggaggtgcaagaaatcctgcccagagcagtaagagaggttggtgatgtcacctgcggaaacggagagaccttggagaacttcctcatggtggataaggtaatcactgaaaagatatcagctgctataagctatcagtctagggataaacccccttctgtgatagcacaatgggctgaaacatccaaccaggaagtgggacattaaaataattcttcactgagttgtggagtgagtaggtatcaactctcttataattgatattcaaattgatcataagcaccaaaaagaagttccatatgataaaaaggaaaatgcatatgcaatagtaagaattcgagttcagcagatcttaactggcactaggaaagtccacttagcatgaatgcactttaaacaagggccaaacatcatgataaatactgacaaaaaagttttaattagacttcatcttttaaaatggtaataaacttatgaaaaatgcattatattttaggtaatgcaacttaaattataattacacaatgtgtttcttcttagaatgattaaagattaagtgaagtgttgaattttttgagcatagtttttttgataaaaccgtgtttgacttttacagtataatcataaagtgagtcatttttatgaagatattcatgggcctgatcatttttttcccaagggcctctcttaattctttgatattcaaatcattctcttttgaaggaatgccatcatgcctgtagattagctcgtcttcatttggtaatgggtctaaatctgccagttccttgcttgtcgatgctgtgtgtatgatttgaggagttccctaataccatatctattgattctatgaaatcctgcatttttgcaaggtttgcaaatgcactctgatgctgatttgttttatactgcattattatatttgatgctgagaggaaagaccaattgatataagggttttgtagtcatggggagagatgcttgagtggagactaatttataatttgtcagttaatggaggtaatgctccctgaacttcaaagtgcacatgcatcactgggaatcttattaaagtgtggattctgattctgcaagaatggagtgaggccagagatcctgcaattccaaccagcctcctggtaatgccaatcttaccaaccttgctggtcagaagccacacttggagcagcaaagcagaggatgccttttcatgttaggcaccaccaccatcttccacctaccagccactgtaccacaaactcttagatgacatggtctgggaggcctgctcagcccagggctgcaagagcacagtggcagaagttgacttactgcctcctgcttcccaagaacatatcttcgatagaagcaattcttcagtctctctcccagacctgggctatcatttcacttgagaggtatatcatgaaacatttatttatatatttatttcccaggttttttattgtggtaaaatacacaaaacataacatgtattatcttaactatttttaagcatacaagtcattgatgtttgatacgttcatcatgttatacaaccatcaccaccatccatctccagaactctttttcatattgtaaaacaaaaactctgtacctgtaaaacaataactccccattatccactttccctagcccctggcaaccacaattctattgtctgtttctatgattctgactacatataagcagaatcatagagcatttctttctttttttgtggctggcttatttcacttagcttaatgtcctcgaggttcatctatgttgcagtgtgtatcaaaatttcctttctttttaagactgaataattttcacctttattcacattttgcatatccattcctatgttgatgaactcttgggttgcttccatgttttaggtattgtgaataatactgctatgattgtcagtattcaaatgtctcttcaatattctgttttcaatttagggggaatatttactcagaagtggaactgctggatcacatggcaattctatttttaattttttgaggaaccaccatactatttcccatgtgacgatatcattttacattcccaccaacagttcccaaagattccagtttgtccacgtcctcaccgatgcttgtaattttttttttcttttttcaaacagaagccatccaaatgggtgtgaggtgatatctcattctagttttgatttacatttccttaatgattagtgatgttgcacatcttttcatgtgcttattgttcatgtatatatcttctttggaaaaatgtcaattcaagtcctttgcccatttttgacttgggttgtttactgttgttaggtttcaggaattctctatatattctggatattaatcccttatgagatatataatttgcaaatattttctcccattctgtgggttgtcttttcactttcttaatagtgtctttatgtacaaaagttttaaattttaatgatatccagtttatctattttcccttttgttgcctatgccaatggtgttctatccaggaaatcattgccaaatccaatattgtaaagattgtgccctttgttttctttgaagagttttataattttaggttttacattcctgtttttgatccatttttagttaatatttgtgttaggtaagagtccagcttcatccttttgtatatggatacccagttttcctggcacaatttgttgaaaagactgtccttttcccattgaatggtcttggcatccttgtctaaaatcatttaaccatatatgtgagagtttatttctgtgctgtttattatattccatttgtctgtatgtctgtctttatgccagtaccacactgttttgattactctaactctgtagtaagttttgaaatcaggaagtgtgagtcatacggctttgttcttgtttggggggatttccttgtctattttcagggtctcttaagatcccacgtgaattttagaatagatctttctatttctgcaaaagacaacgttgggattttgatagggatttcattgaatttgtagatcactttgggtagtgttgacattgtaacaatattaagtcttctaatccttgaacatgggatgtatttctgtttatttatgctttctttaatttctttcagcaatggtttatagtttttattgtacaaatcttttaccatgttgcttagttaattcacaagagtcttattcttttcgatgtgattgtaagagggatttttttcctagttttcttttcagattgcttactgttattgtatagaaatgcagctaatttttgtgttgactttgtatcctgctactttgctgagaaatttatttttaataataaaatactgaagttttccaataaattacttaaaaaataaaatagggcctgttttattatttctagggcctatttagaggtcctttttttgaagtaaattattagaaaactttagtattttattattaaaatacaattaaagctttttttcataagctttctgtcatgaaaggaaaggagtataaacacagctattagtcccagggtacagccttgggagtatgtcagcaagctgccaaggtgggggcttatggggttaccctctggaagcagctatataacttctggatgtggccctccactagaacactcgaagtgttcctgagtggcaatgtgtaggtaatgtcttcctgtggcagccaaataattagttctctcccttgtttccagtattttcccattccctagttgagttgattgggaatagttgagacagaatcttctctttctatcagttccaaggtccatcctccttcttccaggagaggctacaacctaagctcattcctaggaaggcaaactcagaggtctggagaggtagggggtagcattcctgttccaggcagccagcctcattcatgtgtcacctgaggagaaaaccatgccaaggcagtactcagtttataaattggtaaaactcacaggagtccaggagggaaatgttgtgattctcttaaaaacaggaccctggagtgatgcaatctatggagatgtcactaaggccacactcacttacagaatctgtaacaccacaagcaagtgaacatctccccactctgatgatggaggagaagcccggcagtgtgctgtgcctcacttctgaggatagactttgtttgctagtttaaccctcaacacggtgggctatccctgcctaccttataaaagcctcacagagcatctcctttttctttctttttaagaatacaggtaaagtggctcctcttgtcccatgttctttgttaattgtaaaacaagcagtatgtacagcgagcctcttgctttcctggacttttacctattcatgtgggcagtgtggctttggttgccacctccagggctgcttgttttaaggaactttgccaggacgtcctgggcttcatgtgctgtaataagtggaggaggtcatatgaaggtacagcctctccattcttcactccatttctgtcccatcacctgatccttttttgtaaagaaattttcattgaagttcgaatgcaaattagaaacacttaggaaaatgttgaaatattgcctccatgattgctatgtcacttctgcaggtacctcacaacctgatgccaaaataggaaaaaagaatgtctggatctttatagactgtctatgcaagcaaccaaagggggtgatcgttgtcaaagttggtacaagcagcttttctttctcccttctcaggacagatgaccttacaaaataaactacttatctggggtaatttgcctcttctcatatattccccacagtgtccctgtgccctagtgaaggcccagtggcaggaggtggagtgagagggattgggagtgacactgaaagcaaggggacctgtaggctgtagacacctggcctaaccctgcattagaccggtggcagcttggccttttctgcttgttcatctatctctttatttggcaattttatttgtttctgtgattctttcagggcaggtgatcacattttttgagcattattattagatgtgcttgctgtaagaaaaacatacccagtaaatataagtactgccttaaagtaattcacaactgaacctgtttaaaggtgaggtgtgtcttgtgaataattattccttggacaattcttgttgtttttttaaatttaagattgcatgctgtacaccaccctactgtggcttagtatgtgggtactttttactcattgattctattttttttaatcataatgtaccaggaattgtctatttgaatgatgcaatgataagtaacccttagttcctgtctccaagtagcttattgtctaagagggggatgataagacaggtacacaagtaataaagctctaagtaataatgtgagaaatactatgggatgcataaataaagcactacatcagctcagaggaaggagagaagaaagctggagacggggcagaggttcacgggtggaaaagaagggggaagacttgagaggcaagcaaaagaagacatgatggaccttggggactgaaagtgtggccaagggaggacagatggcttctcaaaccttcctttttcttgtccatgatatgcagttaaacactcagtactatttttcttcctttggcaatatctttgtatatcagttctcttctttattctctttattctttccatttttctcccacactattataatgatctcctaactgacctgctagccaccaataaaattatcttccttaaaaacaaagcaaaacgaatctctgatcatataatctccctttcccactggccctttactggctacagactgttataacccctccacaatctggatggagtcttctctttctaactcgtttcctaatgctcccataacccctgaatcccatgacgccttcagtgcagccagactaaatgactaaataagtaaggtcatttatatttgaaaaatatttcattttctcaaataagctgggccctttcagaatatgatgtgtttgtgtccttaccttggaagcctttgctactgcccaacactttgcactgaaaactcctacatattccttcaaaagcctggcatttccctgtgctgcctagctttcatctctctccagtagcttccacggctccccttccccagcccctccctctctctgttcctcaaacctgccaagtatgtttctgcctcagagctgttctgttgagtggttctcagccctaaagactcttcagatgatctcatcatttgggccttagagcagtgccgaggccttccttaaccaccccatataaaatagtccctgaatcacttggtttcattttaagagtcagggccactgtaagaatgtgtagtgccattgctctaattttaaaaaggggcctcctctggctgctgcagaccctatccaccccctcggttgggcctgtgctgtaaacaaactgtaaacttgttcagggcagcctggagggtatttgtccctaactgaaatcatcttgtttattcactgactttttttttttttttttttttttttgccaatctctcctattagttgtatgagagcagaaatttatgcgttttaaaactatccaacactttattgtggcttttaccccagaactttaagtactgtaggaattcaacaaatattggtaacatgaattaatgaattctgtgatgccttggttgatcctgtttctgtactgccttaggcctctgcatatacatcttctagactatttatcacattgtattgccattctctttccgttatctttctccttcactagactgtgagactcctgaggtcagagaatctgcctcatcagtgctgtgttgattagtacagtatctgatacattgtggatactgctgacaaaaatttgtgtatattaatgcctgagtttttaaatctccatgaaaggaagagaagtggttttattaacttaaggaaatctgaaggagaagtgattttctgaggaaaagataaggtcaatattggctttgagatgtcaactgaacatttagatgaaaaaaaaaaaaaagtccagaaggtgactgtgagtgtagaacttgggagggcagctagggtagagaggaagctgcagccatggatgaagatgttaattaaggagggaaaggttatgggtataggtcacaggttgcaagcctgtggccaagtctgggttacagacattttttccccatagtgttttaaaacatttcagatttgttccctacatttaaaaattaggagatcttcataaaagtatcagatttatgggtcctttgaaatatcagaagggctgggcacttgggcttggaagtggcccctccaatgaggcttcatgtgccctcgcatcactgctatctattaccttcttggccctatggactttcaagtttgtatggaatgagaaacaaaaagaaccaaagaaccgaaagcaacaccttaaggaacacacccaattagggcctgtagaggaagaaaagaatgtgtgagggctgagaagattggatgaaagtaggaagagaacatggggcaagcacagtgtcaagtgaacgaataggatcaataaggaaatggggaggagagagatgagatgtgtggctctctctggaaccaatacaaggagtggggtgcaggatacacacagacttaattttataaaatactgcctattgttgctcagttctcattcataacagcagtgcttgaggcttactgtttctctgtatcctcaacacctgacattatcagactttctaaattttgcaattctgattgagttaaaggagcatcatattgttttaatttaactttctctgattagtaataaagttgtgcatctctttcttatgttagctattaggtttttccttctgtgaatggtttgattcagtgtttcattgggttaacttgtctttttcgggacaagaatataacttttcacttgactctattattttattttttcctggtactttcaaaaataaaatgaatataccaagtctatagtaacagcttaagagactgacaattattttctatttcaatgccttgttagcttccttcctagtgctaattacacctttgaactgtattatttatttgtggtttacttgctattggtcaatctctcccactagaagatattctctatgagggcagagatcctgtctactttatctaattgtcttatccctgcactcaggtgagtgtctagcatatcatagatgcttaataaagaactactgattgtgttcatcaattgaatattgaggtgcctgtgtcaggtactgagttggccctgaggagtcacaagagaaagtcactgccttcaaaaggagcttgttaatcatcttggtaagacaagaaatcatagaattacaacaaactatggcatttgctagttcaactggaaacttgtctccgtcaaaagactcaagccctttccacagaaaattgcacttaaatgaaagtaacaaaaattaaacgaggattctaaggcaaacaaagggcaacaatattgcacacaattttaaacacttttatgaatcttgtgctctttccatgtaaaccagaagagaaatgagtccaagatttgtcctgtttgcaagagaaatatgcatgctagggaagtctgtcctccagagacctgttgaaaagccacctggaagtctgagcttccacaccatcccagcagcctgcttttctggtttaaggattctgtgtttttaaatccatgtcagggcccagtacgctctccacaaaataaactcctggacaaaaatctaaagctgagtttattcaaagcccaaacaattgccagacacacccattggctaaagacagtttttctcccgttggcaatcatttttacaatgctcgattacaagctgttttattcccatggttttattatacaacctcagtccatgcaacaccagatgcatcatttaccataaggagagattttcaagtctgcaatgctctcttatgaggaaagaaagaaaggcctatttcaacttcttgaagcttgctttgccatcaggctaagttaccctcgctcagtgtcactaaataaaggatgaattgtagcttccaaagagaggagaaatcagctcctctgcctggctgtgccccaatatcttgggtacattatctttagacctgcaatggacccaggagcttccaagctgtgttctgccgagtccagggatttcctgaagtgggtgaggtgagagggaactcaagggctttcatctgtttcctgagccaatctcctcgcaaagaggacaggacctaacctgagtagaagctggtttgttagatatcatcgaatcaccagcccattgccctagatgataaacactagtgtttatctaattcactcacatttccatggacatttcccaatatgaaaaaggaatttggaccttaggtgttttctttgtttctgtttttgttctgttttgttttgttttttgcttctctgagaggtacttcagataaaagaataaactagacactggtactctcttcatttctctagagagcaacactatgacctttcagtgcctcgtgccatgaaccacctgtaagaatatttattcatgtaatcatcaaatgtgtactgagttattagtctgtgctggagtggcaactatggatgaaatataagctctgtccaggtgagcccactctctaggtaaatctgacaccaagtttaaggaaggtgggagcaggggaggacaggtgattcaggtagaggaagcagcatgtgctagatccagaggctagaggaatcctgccatgttcagtgaatggcaaatggttcaatatggtgagagcatggagcgtgaagagggctgtagtgaaagatgagttttagataagggatacccactctgagctcactaacagttctgatttcatgaatgctttcccattgtttccatgtgcaatacacttgccggactgcctctagtgcccatttagaaaacatgctcattctgtccatatgtaccctaactccatagcaagtctcaaacagtgagtaaaagtttcttaggttatttgaagcagttgccaccttttgcttcacaatctcattagaaaattttggtggcaagctggtttaatcatttttacatcacaactgtagagtggtgtttcagctgaggtagtggaccccatttaaaactgttaatagctggacaaagtagagtaattaattgggttcaattacaaaatggttagtcatcaaggatgggcatcaaatggggagacttttcaaaatgcccctcagccctaatgaatccaagcttctttaaaacatttttttttgtagagctggggtctctctatgttgcccaggctggtcttcgaactcctagcctcaagcagtcctcccaccctggcctcccaaagtgctgggattacaagtgtgagctaatgtgtctggcccatgaatccaagattctacatggggtccagacatgtgtatttagaaaaaatttcctcaggcatctgtgatatgggttcttggttcaaatctgctcatacagacctaatcacttgcatagaaaagaacattttcagaaaaactctagattatagttttgaacatatttatactggatttactgtaacaatgggggacagaagtcagaactccaaatatttcagtaagagtcaacccctataatatgtattagaaatttactttttggtaattttctattggatggatccataaagtcagagccagccataattataatcaggaaagtggtagtaaatttcctctccacttttatttcctcttgaataggaaaatatatgaattatctccttacctattggatctacctgtaagatatatggtactggcaaatttcagttggagaaattaaacctggccttttatcattattgacaagtaaccaggcaattgcagccattgcttgtatcctatgaggcagtattgaaagtcctgttgaggaaaacactgcagaaagaactttctgcggtttagaggggactttattataattctccatagtctgctttggcttgagctaaatcataaattaatgtattaagcaatttttttttaaagaaggagatggttaccaagggaaaaaaaagagtatcagtagtgtcagtgaggatggagagaagtgggtggctttgggagatttaggatgccgaactgacagtcctgcgtggtagattgcctgccagtgagcagggtgcagggaggggttagagaggacggctggaaatctgttttgggctgctggtggacatcagctgaccatgtgacccactgtaaataatacagctgtaattatagtataaggctctctacagggtaaacatagtaaataatgatttaacatttatcatgatttagaatcataaaatgctgtttctatcttcataatttctgccttatttttattacaacaaatttagaagtaaaggaaaacctgtaccaggattagaaaatttagaagggcttttgttaggagatttttgtttttgttttgtgatttaaaaaaacacttttaatgaaaaatttcaaatgtataaaaaactagagagaatagtaatgaaaccccatgtatgcctcactcaaattccccagttattcatttcaattcttgtccaatcttattttatttaaatcactcaccagcgaccctcttccaccaactagattatttaaagcaacctccaacatcatactgttttattatatattgtcaatacttttttctgaaagaaaaatgacctcttaaaaccagaaccactataacattatcacacctaaaaatgtacagtaatttcttaatattatcaaatccagttggtgttgaaatttccccaattgtttttacatgtgtatgtataaaacaaagaaacaaatacatgcaatagttttagtagacattgaggattattgcctagatctattgtttcattaggtgttggaaaacagtgatactctatcatttcttcttcatttattctctggaatttattatctggaatactttttaaatgaactttcaaatatgtagatgttatataggacaggcaggacaaagttttattcttttatttacaagatttaaaaaaaatgagttaagcccttaatgtctcccaaaggtaaataataaactatttttaaaaattgaataggattttggatgcttttaaagcacatttgattctttgttctatcatggtaattagccctttaatgttctatctttggccaatgagagcttcttcagttagctcctgagtcattttgacccaaccacagtactctgtgatagcttccttattttctcatattgaaagatgttccaggttcacctcagacatatcttaccccaaatctggaaaagtactcaaaatctgggtcctttcactgggaatggtatttagagactacaatgaggagtcttcatggttagtaggtgggaagtttttttccagtcctttttagttaatgtagctagaaaatgtctttttcttttaagaaataaaatatatcagaaattaatagtaatatttctaacttaaatttagatttgctagggttttactaaatgttttaattttatgtttatatctcttttcttaaatgctaaaaatcttggtttatagcactattaactatgtatttgttttatccaaatatatatgtgtgctatctatgtgtgtataatccatcactattattactaacagtatgattattgaaaagcttaagattcccttgctggttgattttttttttaaatttttattttttgtctttaggctctatctctctgggaatgggcagtcaaattactatgttttgaagtcacttaatgtcaatcttcactgtaaggttaaaccagaaactcaatacccaattaggcttatttgttttattttgccttctgtttctaggggatgtttttaaaaattttgtttattttttatacatatttaaaatacctacatatgggccaggcgcagtggctcatgcctgtaatcccagcactctgggataccaaggagggtggatcacgaggtcaggagatcaagaccatcctggctaacacagtgaaaccccgtctctactaaaaatacaaaaaattagccgggcgtggtggtgggcacctgtagtcccagctactcaggaggctgaggcaagagaatggtgtgaacccgggaggcagagcttgcagtgagccgagatcatgccactgcactccagcctgggtgacacagcaggactccgtctcagaaaaaaaaaaaaaaaaaaaaaaatcgtaaaatacccacatattctaaaggttaatttataaaaacaggatacattcagagaatctgggttctatccatttcacccatcttgtttcttcctttccattatgtgtaacaattttaagttagtttttgtttattcttcattttattaatgtaagaaaatgtagacatgttttgtattcttcttatactacagactttgctccataacagtatatagagatattcttcctttctttttacagttgcatagtatactgctatgcaaatgtaccacagtttattatcaattcccctattaatggacattttgtttgattgtggtctcttttatttcttaattttctccaggagatctgtggaatagactcctagaagtgggtgtactggctcaaaaataaaaatatatgtaattttgctagatattgctaaattctactccagatggttttatcaatttgttatttggatggattttgaaggatgtatggtaagacttcaggaaaaatatagggttttctgatgacatttgaaaagctgatacaagtatgattttttttgttgttggattttttgtgtttttttggtaagttttcttgaagcaaacataggcctcagaaatcaagcttttggtcattttacatcccaaatacaaaggttttctgcttctctaagctgctaactcatagcacttttcaattcacttgtgtccattcttactgagcatttccagtgggcaaaggcatgtgctaaatgctggtgagatatgcaaataaatcaacataattctgcctgccacaaactcatgatccaggtgggagacagacatataacacctgatacaaggcaaatggccaggtgatagaattgaacatgctttgaggacactgtagagtgagggatgctctctgactagtggtctctggggagatactgggtatgatgggatttggactggccttgaggaaaggcatttttatcttaggtaattatgggaatgaggtctcagacactggagagtgcagggtgttcagggggcctcaacagatctgtgtggctgctctgggagtttcagagagttctccagtgtatcatgagatacatctgtctttgaactgcgtacactaagccttgaatctggaatgttcagcttttgattctttctgagtgattgctctacagtgttcgaaaccctcaaagcttcagtttggatgataagaatctcaaaggcacatagccctgagtttgaccctcaaccacaaaacagtctctattgcccttgaactcagccttggaccagcctctctgcaattcagaaagtgctgtgggattttgaacttgcaaacagagagaaagataggaggagaggtcatggggttggaatgtgagttgataagagctttccaggctttttgttatggctgagaaatgggcatatgtgttcatatgacaactgaagtgtgtgggtggggaagaggatggcctggactctctgggtttggttggtctcccctttctttttctgatgtgtcagtgacattctgtgaacaggaagaaatatgtgctttaaaaaaattgcttttttttagttaggctacaatataagcagtatacaatagttcattggattttgaagcagatattgacacctcaataattatcttctcatttatagatgaagaaatggaagcacagagaggttattgcattttgtctggagtctcacttctagcaggtgacagaactcagagaaaagcccaggtctttgttccttcttccctcacatgagaaatttgatgcgtattttattagggagaactagagtcattttctatgaattttggttatgaacagacaattcaacattcagaagactgttctgactttcttttttcttcttcttctttttttttttttttttttgagatggagttttactcttgtttcccaggttggagtgcaatggcacaatctcagctcactgcaacctccgcctcctggggttcaagtgattctcctgcctcagaattttaaatatggaataatggccattgaaaataaatctttcaattccagatttgccaatgtccttcagctccatttttgagttacaaggtcatattttcattttattggaaattgaacagaagcagtttactacacagccagcagtttagcaagactgtgttcagtttcaaacctctccagatttatcttgaatgaacttgaagatgtgtgtgtctgtaaccattttcaacagtataatccagctgtctttgaatgggctgtagacagctttgtagtgatctcaaattgttaatttatgcactctgtttgatttttcccttttaggaccagatctttatggaaaatgtaggtgcagtgaagcaactgtgcaaactaactaacaaccttgaggaaagaatagaagagttagaaatatggaacagaaagctggcccggctaaagcggctcagtagttggaagtcatcagccagtgaagcaagcacaatcaggtacgtgcagccaggattgccatagaaatttggggaaaggagagagtgagctctttccagaataagatcaatctaaatggtctttttgatcaaacagcaaccgctactttctgataatgaagtctgcatttttcttttagaatattttggagcacaattgtctgatgtgataactttcttagtttttttctgttgctggttttttttttttttttttttttttttttgagcctgagttttgctgttgttgtccaggctggagtacaatggcacaatcttggctcactgcagcctccttctcccagattcaagggattctcctgcctcaacctcccgagtagctgggattacaggtgcccgccaccatgcccggctaatttttgtatttttagtagagacagggtttgaccatgttggccaggctggtcttgaactcctgacctcaggtgttccacccacctcggcctcccaaagtgctgggattataggcgtgagccaccacgcccggccctgttgctgttttaaaagtggaaaaaaaccatgagacatctgtttagtagcagttgttataggaagtgctaaattttagcataagggtggcttctcctttaatgaggagaagtggtcatttctaaatttagaaaaccatgtttggtcctcagggggaaaactttctgttattttttttttaattgcttaagaaggtaaatgcacatttcctggggtttagttttgagaaaaagagaaatacaatgtttaattcattcagttatacttactaaagttccttttcacaaaaggaactctccattgccatgactttttgttttcaaaatatcactgtattgcaaaagaaagtcatattgctatgttagtgacagcctgggcctttgtcatgtatctcctggagaggtatttgaatagtaaccaattttttctctcttttaaagcaaatctagcagagccgttagtgcatcttctccaagaagggccgttcataaaaaaaacaacaaggtaaatagacacatttacaatgaaaggaaatgatgttttctacttaaaaagtctttagagaaatcagtcaagaatttttttctcatttctttgttcagaaaatccctagtttgcatccttatgtactatatgtgtttaaatattagccctctagtacatattaaatggcttttaaaagcaaagtttagagaaacgagtacagaatatgtcagtctcagaattattatctgcaagtttttgtttatgttgtccccttcaggtgaaagtcagcagcctcggcatacagatggccttgtgctgccagatctatgtacatgccttgaccgccacccccttatctttggctttaggagatcccaaagggactttagttaatcctcaaatccctcttttccctttgatatttggtactaaatatgcaaatggaagaataggtattcacttgctggcaaaggttaaaatgtgatggttttattagtgaataaagaaagcatttattaagtaggatagtatttatagttaaagcgaaggttaatcatttattaacttgaaggacaccctctccatcacgagaaatatcagtaaggaagaagctgcaatacaccctttctagcagcactttgtaagtagctacaaaactcagcttgctccctctgatccagcagtggcccaaaggtggcccttccctggggaagatatccatgaccttaaatgacaccctattaaaagttgacttgatgcttgtgccactgcctcagtttactctctactcctcatgctatactgtgttgaattattctaaaaggattcagaaagagttcaaaattcttctactaaaaacaagtaaagtattatgcagctgacaagctccttagtgtattgacaaacacaaatacccaggtaaaaatatacgtagaagtgctctggggcaagttactcaaccacactgggaaatagggacaattatagtatttacaaagattgttgatgggatttaaattaggattaggggagctaaagctctttgcacagcactcagcacatagtaggttagtcaataaacacaaaacatgaatgtaggaaaggtaccctttggactaaacagttttcagtgggacagagggaatggtatccacatctatggcagccctgataggtgcagtttggtcacctgcaatctctgtagctcccatcttgcaaaataagagattctctttattttgcagttatctcagaatattaactagaatatatggctcatgagagcaggccctgtgtctgccttcctcactctcatgtcactagggactagcacatagtaggcactcaagaaacgtttatcaaatgaatacatgagtggagagcccagtatgaaaatattcccagaagtatgacaacttaaattaaaaaacattaagtggctcagtgtcttgggtatgtgggtggggtgtaagctgtggtgcggtcccagggtcagggactcatatagggcttaaagagcacccgttcaactcagagacctcttgctgtcactgtagagggcatgtgggaggcagaaaggatgagtcaggtctcttctaaggaattgcattgtagccagggaagattggaaaaaaatacaaagaacagttgtacctggatgtcagcaatgctgcagaggctcagagtgccaggaggtttatgagagttgagccttaaaggaggagtaagctttggctagacatcaatgaaattgaaggagaagttacagatggaatggcataaatgaaagtctggtggctagaactggcttccttgaaggattaggtgggagttgtttgtttagggaagatagtggaagatgaagctgaaaataaagaagccgtgaaggcattttgaataataacaatatctaagttgtatagtttcccttctttaaaaacagatagtaaaaaggaggcagcatagcactgtggttaagagcatagattctggagccaatttttgtggggttcaaattcctggctgtgtgattcattagctgtgtgatctcgagtgaaacttagccttccccgtgtctcattttccctatttttaaaatgggattgataaaggtacttgcttcatagggttgtagaggattattgtgaggattaaataaattgatagatgtaaagcacttagaagggtgcatggcacatagaaagtgctgcataataggttgttattaatgtgttcaaactcaatattttagtgaatctcatttcagacttgtccagggagctcaataaaacacaaataaccaaagtgcttgctccctctgtgctgacctgctaacagatctgagctcttcctgtgaggttgacttttccttccatgccacgactcatctcctagttgtcctctgttccttggggactctgtgggtcatggaaatgcttgtgtgtgagtggggagtggtattctggggtagggtgggggtcttgttaatgagcaaattgatgctgtgagcagttagtgggtcttaccagctggtaagaagcctggctgggccctgcctttacttccacacagctcccaatgctggccaagatggtgttcattctggaggaagattgaagtctcctgatgtagctctcattcagtcagtagggttcctcttttttccctctctttctccacctccaagaggtaggtgggtcattcttgctatacgtaggactcaggatgagataggaagctccccagggttcaaataagaattcactgactatttggaggaggagagggaaagggaaagaatgaagacggctgggcatggtggctcatgcttgtaatcttaatactttgggaggccagagtgggtggatcacttgagcccaggagttcaagactggcctggacaacacagtgagaccccatagctacaaaaaattaaaaaattaactgggtttggtggctatagttgtagttactagggaggctgaggtgggaggatcgcttgagcccaggtggtagaggctgcagtgaggcaaaattatgccattgcactccagcattggtgacaaagcaagaccctatctaagaaaaaaaaaaaaaaagaacacggataaatactttttattgtcctacctcttacaggttcccagtccctaccctcccccaaataaaacctattgaatcagaattttacatgtagggcatttagggttttctcaagcaccatagtaattctatgcacaccttaatttgagagccattacactgttcattggatatgcctaataactccaaaaagtaggcaggcattattttattattcctattttactgataaagaaaatgaggatcaataacatttagataacttgaagactcaactctaagtctgactccaggtcttaggccatttctctatattaggtcaaaggattttgaggaaaagcatggagacttaaaataattcagcagctgtgggggtaggttgaaggggaaagcacttaccctgagactaatcctatttaattccagtcaattcaacaaatttcattgagtttcttctctgtgcagtacactattaagacgtcctccgaacagtttctgtgagacctcagaacagtataaaccattgacttcttggtcatcagagcagcttccagctgtacttacagatgactcagttacaatagccctaagggtctgtgtacttggtaaaaatggtatagtgaatcctatgcccctaccctatgttacattgaagaacatttactttagtcagataactagcccaataaattaagccaagaaccaatttaaaattattaccaccttattctacccaataaattaaaccaagaaccaatttaaaactattactaccttattctaataccctaataaccaaaagcatgactctatcccatatccccagaagcgagcagatataatactccttattgcatttataggaaactcatatttaagtagcacctcatttaagtgggcagaaaacttctatctcttcagccagattccccagcagttccacagctgttattctgcagctcttggcctgttccccatatgcaagtttttataccaatatgtatcagtcctaaagttttgtctcattcacgtcctggagactataatttactaattttcatgtctcctatagtgttgtacataatactgctcaataaatattgttgaatgaatatgagaacaaataagacacaggcccagagatatctgtatatacaggtgacaaattgaatactggtgttataattttaaaaagtgtttagtgggatttcattctataaaaacctttttcataatttgtcatgatacccgaaatcattccattggaattcatctcttcatgtcttgaagatcttttgattttcaaaagtatcctactcaaagagatggacatcatctgtggtctgacaacatctcatctcaggtccccgtttctcataaaactgcaaagataagtaagtgcccaatgaatggcaaagatcattgtctgcaggatgtctgggaaaagggagattgctgtagcttggaatttcaaggaaagggaggtacttgagatagactttgaaagaatgttgttttcagagaggcagggaggaggaaagagatgtaaattgaggcaagcactcaaactatcccaagagagcagcaaatacccctgctgggagcagttctccaggctcccttctcacagttagagttgctaatttatcactgctcattactgaacctttttataggtttatttttcaggaaaaagacaggcgtgtcctaattgggttttccagaccttggttataactctgattgctgtgatggcattttggtaagaaaaagttcactgttatgccatgtcaagctcttttgttccttcccatgtttcttttatcacatatgaactggggactggcctgtttactttgaagacaagaagccctttaaactagacactgaactctgatagcatagaaatgagggaaccttttttgaaaactcttattttgaagaaaaaagcacaggctttctgccttaaatgtgacatgattttttttcaattaactgctatgtttagcagcaaactgtgcctttcgtgtgtgtgtgtgtgtgtgtgtgtgtgtgtttgtgtgtgtgtgtgtgtatgtgtgtatgtctttcttagctttgcaaacaaagagttttctcaaactctgttttcttttctgttgaccttggagaaagaagtaaataggaaatcaagtataatccactctcccctggtcactcatatttatggtaactcttctggattcttcagtgaagacttttcaccaaagggacaccaagatataccatgtgatggaattgtagccaaatctactaagcagttaaaccaagcaaatacagtgaggacagcagtatttgctatgcaaactgggcaacttttgacaccatcccgcctctgcagcccgcaaaggcgggaggcagcctttgctagaatgcagggccctttctcaggcctctaggcttctgctgctatgattcccctcccccaccacactgggcctttgaaacctggtcatcttgctgtgttctcttgcccgtcttctctgggcctttgagtgcacctgtttttttcttagtctgactattcatatggtgaaagggtatttatctgtcactcaaaaaatgctttgtttgttagcatgggaaaggactggcttctggggcccgtcttaggggagacaattattctcaggggcaaagcaagctgtggtctcaaggtgcttccagttccttgacctaaagcagcatcctagctacagaagatagtgtagctttatctgtgcccttcttgttccttagtgtttttgcttttgacttgctactgcccactgtagggagataatttgacacgactacctagaattcccattagaaacctttgcacttttcttagtctcccaagtgtgcctgtcttctcctgctgggattcccaactcaggagagtgtgaacctctatcttagtggacatccttagtattctctagagacacagattcccagcccggtggaaaagttataagaagtctaattgtaaggtaaagagactgctttttaaacatgcttattaggtcttattatttccaatactgtttaccactaagactgtagatggtagggattgggtttgttatcttgcctctggcctgtggtatacctgagtagggtcaaaaccagggtttgcccccgaagaatggaacagatgtgtccatttcattatatggtcctagaagttttctgggctatgcgttgaggcagatgctggacacaaatcataaagagtattttagaattggaatggggagatggagagtgggagaggtaggagaacaaagaaggggagactgtgacacaggacttttctcagccttttcgctggactcacagcagtggtgccccatctacttggcccgctgtggtcagctgagtgggagcacatgagagagtgagtgcagggtttggtcggccactccaggtgctgatacaggagcaatctccatgcagggctcatggccagtccaggcatgtcaccccaaggggaatggggcagtgccctggtgagggtgcctgggaccctgaagccccagagggggtgttagggtgctaattagtgtttttagctctgccatctgcagcccaatgaacagcagagtgtcctggctttgtcacatggggcagctgccctccactggtgaaggcaaagggccaatgacacagcctttctgggtacccatgctcggtgagtcccaagctcttgtccagcgtctgagaagaatgaggtcacactgatgattgattgaagagtgatgaaagcagataattttattgagcaaagaaaacagctctcagcaaagaggggagctgaaaaagggacagaaagttcaggtcgtctttcctgaagtcaggttgtctcttccctgaagtcaggtcatctcttccccaaattcaggttatctctgtctctactgactgaggctgatgtttttataggcacaggataggggcacggcaggccataggtagtattggaaaaggcaacatttgattggttgaaaggcattattcagaaagacccacttgggagagagtgggaaaaaaacaggaatagaagttctcactctgggctgtgggtttcaggctggttttggcttgaaggtggggtttcactggggacccaaccctgtttggctaggatttctctgcctcctgcctctattaactggaccacagcaaacagttgccacgatgacactataaactctctctgacagcatctttggggttcatcatcacttttcccaggcagggctgtgcctgctgggcagcaaccagctgctgctgagaacactttgggaatttgttctttataagcacatatggcacagtttttttttgtgtatcctaatgatggtaaatccagcacctttgatgggaagcaaaataatgaggagtcaagtttggagaaccaggtgtgaagtcaaactggcaagaagtcaagtcaggtaactctttcaagcctagcacaaaacagtgctgtaaagccatcagcagactttctgtgtgacttgtgagagggttctgaagatgtcccccaaagaggagaacactaagtatttggatgcatgaggattgttgggaatagcttcccaaggctcggaactcttaaggaaagcttccatttgtttatgtaagttccagtgatgggggagaagacaccctcgttatttttgaagtctcacagtgtggaaacaaatactttcttgcagttcttttccttcctctgacctgttgagcgtattgtgctctgaaaagacaggcagccggaaggaagatgtcagagaagcagccagagggtttggcatccacagctgactagacctgtgccgccttccatctcccaatgcgacagtgccaatgccctccaccggtggcacgcaaactgtgctctgactctttcctgcaaggagcagttgcctccagcaacttacatgcttcctcttgtaatcttccactagtgacaggcacctctgagacagcttgccagggctggggggctgctctatgtggaaaaatccatcagcatggaatacctaggagcctctgagctctttttctctccagggcagaaaagcataactgtgctggtttccatggtgtttctgtcagccgtggccatcccctcccccctgctcccatctgtgtggcctgtgagagtacatctctggccagctggatgtgtgagatatatctggaaacaaatctgccacataatgtttttttttttttttttttttttttttttgacagtgctttgacgatagttgccctctatatacttagcttaaaagatcaagaccgacgtgtcccaaatctccctccaaggtgagagttcagttcaattttctggcctaaaattcctttggagagaaggatttttgcagccctctttcattaatcatttcattctttttctccagcaatatcacaagctcacaggagccggctctgctgcccacagcctcctcctcaggtaaaggcttcacattcctcaccctcaaacccggtttcaagtgaactgttaacagaagaaaccagcctttcaggttaaccttcttgcttcccctcccccctgcccaatgccttgcagcacctaatacatccctggtaaccacaccggcctccttacaagtacctgaaattactttctgtgaaatcctgccgtgtcaggagacttattgctgccccatccggggaatgaaagaagtctcttcaagtcctgtgcaaagacaatctgaggagaaggaattccatcagaggcgatggtcaggtaaatgatgttcaaagagaaacaactagagctttgaacttgaggttgtttttcttgtcacaatttacttagatggtcattaatggttccagataatggttccatgcttctatttggggtggcaaaatctttaaaacacaaatacacaactgccaatcatctgtaatattgagttccttgcccaggaatgaaattttggttgattcaagtacttataattttcaccaagtgaaaggttctcatttgtccattgccaacaaggatagtaatagtagcacaagcgaagtaattacatgcacgtgggtggattttttgggctcatttagagtttaaaaaatgatgtggtatctgggctctctgcctaaactgactagggcaaaatgtaagagactttggaaactctaatttagagttcagggtgagatttaaggcagtgaaaaacacaagactggcattccactttcagaataactttcctcttcctcctagggacacacacacacatacatacataccaatgttattcaagtaacacaattttcatggtaaaaaaaagtatagaaacttaatcaagggctgcaagtgtaatcatatccataagattacatacaagtcttccaaatgtatactaatttattattgtttttagaaattttattctatatatacatattaataaatagtaatattaatgatgatgctaataaggatacatattactatggcttattgattaggatactgtcataacaacaactcttaaataacagtggcttctttatggcaacaatttaattctgagtcactctatatattaaatgtgaatcaaaagacagttcttggtcatcatgtcatttaaagtccagctgatgaagattccatcacaataattatttccacagtctccgtagtagtggtaaaagaacaaggcaaattatgttccgactcttaaagcttccacctatgtataacacatatcacctctgcttatacttcattggccaaagcaagtcacgtcacattggtcatgtctaatttttaaacggatggggaagaacagatctaacatgtatggagaagatgaaccagaatacttataagtggtgctaatgacctacatagaatatggtcagtggttgaaatgttggggtgcaatgtaatttcctttcccttttgacattattgcatatcctagtcttggttaaataacttttacaaattgtcatcatcatcatgattatcatgttgtaatgaggtattactctacgctaggtactgtcataagtagtttacatgagtaaatcatttaatcttcacaagcctacaaacgaggtgcttttattatcccaatttttttttccagtggggaagctgagacacagagagttctttcactacagcaataggagacaattagcttttctcatgaaaactatttttgattgaacttaggagcagatgcatcactatggagtagaactaaaaacttcattttaaagaaaggaattcatttcagtcatcttattctcaatatttttaaatatgaaaaaatctagaactatcacagaaatccccaaggcttttatcccttgtgaaagcacatggaaccttgtggctggtaaacacttttcttactttgggagcccatgctggagacacttgatgttcttttctcaaagcggtcctcagaagagaccatctcacctatgagagatgtactaataacagatcctgaataggaagaggtcgtagactggtccactcttcattttcaagggtttcttgacctctgaacaagttcattcctgaagtaaccagctgttcacatcaagggaatatagtcatgtgccacataatgatgtttcagtcaacaatggaccatatatacactagtggccccataagataataattgagctgaaaaattattattgcctggtgatgtcttgatgatcctgaccttgtacaggccaggctaatgtgtatatttgcactttagtttttaatgaaaaggtttaaaagtaaaaaaaaattttaaataaaaaaagcttataaaataaagatataggaataggaacagctccggtctacagctcccagcctgagcgatgcagaagacgggtgatttctgcatttccctctgaggtaccgggttcatctcactagggagtgccagacagtgggcgcaggtcagtgggtgcgcgcaccgtgcgcgagccgaagcagggcgaggcattgcctcacccgggaagcgcagggttcagggagttccctttcctaatcaaagaaaggggtgacggatggcacctggaaaatcgggtcactcccacccgaatactgcgcatttccgacgggcttaaaaaatggcgcaccacgagattatatcccgcacctggctcggagggtcctaccccatggagtctcgctgattgctagcacagcagtctgagatcaaactgcaaggcggcagcgaggctgggggaggggcgcccaccattgcccaggcttgcttaggtaaacaaagcaaccaggaagctcgaactgggtggagcccaccacagctcaaggaggcctgtctgcctgtgtaggctccacctctgggggcagggcacagacaaacaaaaagacagcagtaacctctgcagacttaaatgtccctgtctgacagctttgaagagagcagtggttctcccagcacgcagctggagatctgagaacgggcagactgcctcctcaagtgggtccctgacccctgacccccgagcagcctaactgggaggcaccctccagcaggggcacactgacacctcacacggcagggtactccaacagacctgcagctgagggtcctgtctgttagaaggaaaactaacaaacagaaaggacatccacaccaaaaacccatctgtacatcaccatcatcaaagaccaaaagtagaaaaaaaccacaaagatggggaaaaaacagaacagaaaaactggaaactctaaaaatcagagcgcctctcctcctccaaaggaacacagttcctcaccagcaacggaacaaagctggacggagaatgactttgacgagctgagagaagaaggcttcagacgatcaaattactctgagctacgggaggacattcaaaccaaaggcaaagaagttgaaaactttgaaaaaaatttagaagaatgtatgactagaataaccaatacagagaagtgcttaaaggagctgatggagctgaaaaccaaggttcgagaactacgtgaagaatgcagaagcctcaggagccgatgcgatcaactggaagaaagggtatcagcaatggaagatgaaatggatgaaatgaatgaaatgaagcgagaaggaaagtttagagaaaaaagaataaaaagaaatgagcaaagcctccaagaaatatgggactatgtgaaaagaccaaatctacgtctgactggtgtacctgaaagtgatggggagaatggaaccaagttggaaaacactctgcaggatattacccaggagaatttccccaatctagcaaggcaggccaacgttcagattcaggaactacagagaacaccacaaagatactcctcgagaagagcaactccaagacacataattgtcagattcaccaaagttgaaatgaaggaaaaaatgttaagggcagccagagagaaaggtcgggttaccctcaaagggaagcccatcagactaacagcggatctctcggcagaaacactacaagccagaagagagtgggggccaatattcaacattcttaaagaaaataattttcaacccagaatttcatatccagccaaactaagcttcataagtgaaggagaaataaaatactttacagacaagcaaatgctgagagattttgtcaccaccaggcctgccctaaaagagctcctgaaggaagtgctaaacatggaaaggaacaaccggtaccagccactgcaaaatcatcgaggctaggaagaaactgcatcaactaacgagcaaaataaccagctaacatcataatgacaggatcaaattcatacataacactattaactttaaatgtaaatggactaaatgctccaattaaaagacacagactggcaaattggataaagagtcaagacccatcagtgtgctgtattcaggaaacccatctcatgtgcagagacacacataggctcaaaataaaaggatggaggaagatctaccaagcaaatggaaaacaaaaaaaggcaggggttgcaatcctagtctctgataaaacagactttaaaccaacaaagatcaaaagagacaaagaaggccattacataatggtaaagggatcaattcaacaagaagagctaactatcctaaatatatatgcacccaatacaggagcacccagattcataaagcaagtcctgagtgacctacaaagagacttagactcccacatattaataatgggagactttaacaccccactgtcaacattagacagatcaatgagacagaaagtcaacaaggatacccaggaattgaactcagctctgcaccaagcggacctcatagacatctacagaactctcccaccccaaatcaacagaatatacatttttttcagcaccacaccacacctattccaaaattgaccacatagttggaagtaaagctctcctcagcaaatgtaaaagaacacaaattataacaaactatctctcagaccacagtgcaatcaaactagaactcaggattaagaatctcactcaaaaccgctcaactacatggaaactgaacaacctgctcctgaatgactactgggtacataacgaaatgaaggcagaaataaagatgttctttgaaaccaacgagaacaaagacacaacataccagaatctctgggacgcattcaaagcagtgtgtagagggaaatttatagcactaaatgcccacaagagaaagcaggaaagatccaaaattgacatcctaacatcacaattaaaagaactagaaaagcaagagcaaacacattcaaaagctagcagaaggcaagaaataactgaaatcagagcagaactgaaggaaatagagacacaaaaaacccttcaaaaaattaatgaatccaggagctggttttttgaaaggatcaacaaaattgatagaccgctagcaagactaataaagaaaaaaagacagaagaatcaaatagatgcaataaaaaatgataaaggggatatcaccaccgatcccacagaaatacaaactaccatcagagaatactacaaacacctctacgcaaataaactagaaaatctagaagaaatggataaattcctggacacatacactctcccaagactaaaccaggaagaagctgaatctctgaatagaccaataacaggatctgaaattgtggcaataatcaatagcttaccaaccaaaaagagtccaggaccagatggattcacagccgaattctaccagaggtacaaggaggaactggtaccattccttctgaaactattccaatcaatagaaaaagagggaatcctccctaactcattttatgaggccagcatcattctgataccaaagctgggcagagacacaaccaaaaaagagaattttagaccaatatccttgatgaacactgatgcaaaaatcctcaataaaatactgacaaaccgaatccagcagcacatcaaaaagcttatccaccatgatcaagtgggcttcatccctgggatgcaaggctggttcaatatatgcaaatcaataaatgtaatccagcatataaacagagccaaagacaaaaaccacatgattatctcaatagatgcagaaaaggcctttgacaaaattcaacaacttttcatgctaaaaactctcaataaattaggtattgatgggacatatttcaaaataataagagctatctatgacaaacccacagccaatatcatactgaatgggcaaaaactggaagcattccctttgaaaactggcacaagacagggatgccctctctcaccagtcctattcaacatagtgttggaagttctggccagggcaattaggcaggagaaggaaataaagggtattcaaataggaaaagaggaagtcaaattgtccctgtttgcagatgacatgattgtatatctagaaaaccccattgtctcagcccaaaatctccttaagctgataagcaacttcagcaaagtctcaggctacaaaatcaatgtgcaaaaatcacaagtattcctatacaccaacaacagacaaacagccaaatcatgagtgaactcccattcacaattgcttcaaagagaataaaatacctaggaatccaacttacaagggatgtgaaggacctcttcaagaagaactacaaaccgctgctcaaggaaataaaagaggatacaaacaaatggaagaacattccatgctcatggataggaagaatcaatatcatgaaaatggccatactgcccagggtaatttacagattcaatgccatccccatcaagctaccaatgcctttcttcacagaattggaaaaaactactttaaagttcatatggaacgaaaaaacagcccgcatcgccaagttaatcctaagccaaaagaacaaagctggaggcatcacactacctgacttcaaactatactacaaggctacagtaaccaaaacagcatggtactggtaccaaaacagagatatagatcaatggaacagaacagagccctcagaaataacgccgcatatctacaactatctgatctttgacaaacctgacaaaaacaagcaatggggaaaggattccctatttaataaatggtgctgggaaaactggctagccatatgtagaaagctgaaactggatcccttccttacaccttatacaaaaatcaattcaagatggattaaagacttacatgttagacctaaaaccataaaaaccctagaagaaaacctaggcattgccattcaggacataggcatgggcaaggacttcatgtctaaaacaccaaaagcaatggcaacaaaagccaaaattgacaaatgggatctaattaaactaaagagcttctgcacagcaaaagaaactaccatcagagtgaacaggcaacctacaaaatgggagaaaatttttgcaacctactcatctgacaaagggctaatatccagaatctacaatgaactcaaacacatttacaagaaaaaaacaaacagccccatcaaaaagtggatgaaggacatgaacagacacttctcaaaagaagacatttatgcagccaaaaaacacatgaaaaaatgctcatcatcactggccatcagagaaatgcaaatcaaaaccacaatgagataccatctcacaccagttagaatggcaatcattaaaaagtcaggaagcaacaggtgctggagaggatgtggagaaataggaacacttttacactgttggtgggactgtaaactagttcaacccttgtggaagtcagtgaggcgattcctcagggatctagaactagaaataccatttgacccagccatcccattactgggtatatacccaaaggactataaatcatgctgctataaagacacatgcacacgtatgtttattgcggcattattcacaatagcaaagacttggaaccaacccaaatgtccaacaatgatagactggattaagaaaatgtggcacatatacaccatggaatactatgcagccataaaaaatgatgagttcatgtcctttgtagggacatggatgaaattggaaatcatcattctcagtaaactatcgcaagaacaaaaaaccaaacaccacatattctcactcataggtgggaattgaacaatgagaacacatggacacaggaaggggaacatcacactctgaggactgttgtggggttgggggaggggggagggatagcattgggagatatacctaaggctagatgacgagttagtgggtgcagcacaccagcatggcacatgtatacgtatgttactaacctgcacaatgtgcacatgtaccctaaaacttaaagtataataataaaagaaaaaaaaagaaaagacaaatatttaaagtaatggatatcccttgggctaggggagggatagcattaggagaaatacctaatgtagatgacgggttgatgggtgcagcaaaccaccaaggcgtgtgtatacctatgtaacacacctgcacgttctgcacatgtatcctacaacttgaagtataattttaaaaaagtgatggatatcccaagttacactaatatgacctttatacattatatgactgtattaaattaccatgatgtacattcactactcattaatacaaatttttttaacgaaaataaaatagatatttaaaatgtgaaaaaaaattaaaataaagatataaagaaagaaaatatctttgtacagctgtacaatgtgtttgtgttttaagctaagtgttattacaagagtcaaaaagttttttaaaatttagaagtttataaagtaaaaaagttatagcaagctaaggttaattagaagaaagaaaattttaaaaataaatttagtatagcctaaatatatggtgtttataaagtttacagtagtgtcccaggccttcagattcactcaccgctcactcactgattgactcagagcaacttccagccctgtaagctccattcatggtaaattccctacacaggtggactagtttttgtcttttatactttattttttactgtaccctttctacatttagaaatatttagatacacaaatacttaccattgtgttacaattgccaacagtatttacagtaacatgctgtacaggtttgcagccaagaagcaatatagcctaggtgtgtagtaggctatacaatctaggtttgtgaagtacactttgtgatgtttgtacaacagtgaaattgcctaatgacatatttcacagcatcatgtagttaagcaatgcatgactgtattgggaagaatagcccttattaaaccagatcaaggctcgttgctctctgtgacaatacagaattttcatgttaaaaaaattataggctgggcgcggtggctcacgcctgtaatcccagcactttgggaggccgaggcgggcggatcacgaggtcaggagatcgagaccatcctggctaaaacggtgaaaccccgtctctactaaaaatacaaaaaattagccgggcgtagtggcgggcgcctgtagtcccagctacttgggaggctgaggcaggagaatggcgtgaacccgggaggcggagcttgcagtgagccgagatcccgccactgccctccagcctgggcgacagagcgagactccgtctcaaaaaaaaaaaaaaaaaaaaaaaaaaaattatagaaacttaatcaagggctacaagtgtaatcatgtccataagattatatacaattcttccaaatgtatactaatttattattgtttttagaaatgttcccctaaaagcagtagcctagaaacaagatgagtgtctgctcatcttgtttctatagctatgtaaacttctaaagaaagaagtgattcccaaggaaagaaaatttgctccatggtgccaggctgtgtccacctagacagaactaactgcttctttgactacaaatgaaatttatgttgtgccttactaggctctgtgatacactgggaaagttgttatctcttccttttgtcaactggagaaaaatggaaagaattcaaatgtttgattcacttttgtcttcagaaaacccaaaaacttttggaaatttagtcacagaatctcagagaacagctacgcaagtggcacctgactttttggccccgagaatccactataagcctacttttacaatgatgtgattgagaaaatacataaagaacaaatgtaactataagttcagttaagcttttaactgaattgtttttattactccaacagtggcgtttgaaaaatagtacaaatctataggagatatgttgcttttcaagtctacagacaacaccacagacccctttatgcaatcacccaaggttccaaggaccccatgtcaggagaactgctgatttataccaaattacccattttgcagctgatgaaatggaggcactggaccttgcttaagattcctcagttgagtttctagaaaagttggaattgaaatctgggtcccccacttccctgtcctggattccttcccatttgctatcctgcctccattgatttggacatgggctgtgcatgtacctgagatcaactctagaaggtgcagaaagtatccactctatggccccttctgcctcctcctggcaagtttgcctctgtccattgcaatgtccctgatgtgggatattttggagtctgagcaaagcctcttctcttctgctgctggtttactcttcccctctgttcaaggtactgtataacaccaggcttctaaatacaaaagaggagaagtctaggaaagtattcttttcagccagatgtttctaaagcattaaagaccaattaaaaattaaggaataaaaataaaaaagaaattcaagagtaacaaaaaaaacttagaaaagctctcagtgggatgcagagtaatatctaacagtttactaaacccctaaacacatttatgagcctcctccctgaggagtaagactataataaaataagtgaagggaaatcaacatttttatgacatgctgagctcatgtcattattcttcttttgggccaaagttgatcatatctgtgtaaagtgtctttcagaaaggttatctctccctctccccctcacttaataaaaagtttgggtaaggctaatcaggaagtggaaagtgagtattttggaatattgagcttctactctaaggaaccatctgaatgtgatgaattagattttaatccatggaaccagtaaagatttaagtagacaggagagttagatattaaaaagtaaagagcctgtggagaaaagcatctatggaattctatagaatatattagagttggtgaagattttttaaaaatctggaattcatgctcattttgttttggagaccatgactctgagaaaagtgaatggccagaagaaaatggtcccccattttaaagaactcagccatcgactggtggggctcattggcttcttcatagtgcatgagtctggttcagtgaagggaagagaaatgtatccaagatgctgtactggactcagccagtacaagtacaacacagtcttacaagtagtgcaatatacaccttctaccatgacaggagtatgctttttttgggcaccatcctaaatctttactctccagaagtttctaatttagtttgttgggagagctcatctaccaattgtgaaatatatctccaactttataatgaaaactgcaggggatgtactatatgaagcttataatgaatatcactggaaggcgtttgtaaaatgagatcaaccctagaaggtgctgaaagtatgactttatgacttcctgtatgactactggaagatttatgggtttcttataaccagcctttcagagtcaaatagtcttgtttcagagaagtgtcaaatggaaggtgttttatgggagatttaaatcttatttcttgcgtttgaaaaatcatttttataattctgatctgcaagattatctttcctcattcccacctatttattgctgttttttaaaaaaaaccttaccccaccaggtactcaattgtattcatagggttctatgtctccaggacctgaaaacacagttctgtggaagaagacaaatctgtagttctgttgccagaatttataacgagctctttttctgcaaattcagcaggcaagtaggacaaaaggtaggagaagaaaacacacaggatagagaagtcctggtttccacttctctttatgcctcatttgcgttgtaaatttacaaccttctgtggaagcagtcttaagcaaaactaatagtagagacgtgtttgaaaattattactggaatagctagaatccaagaaatctggaggactttttggcagcatatgtgtttacttgtaaaggaaaataaatattcaattttctagaaactcctcatatatcaggacccatttcttcttaatggaaagcaccatgttgggttcagaaacttgccctgccttccagttctgtcttgcttccttttgctaatagaataaggagtctagcttcccatgttctttctcagcatccctctgcacccttcccctgggaactttccctgtgaatgtgtaagaggaaagttttttggaggttaaattggtcttccctcttcttttccttactctttccctggctctcttccttccatcctttcacccatattcattgagcaccactgtgagcccagcattaccctatctgggatacaacagtgaacaggatgtagtcttcaaggagctcacagttaggtgaatgggtaagtaaactagtcattccacctagtgaaaggagttgtaaccaggatagggatgtttaggagtgattgtccccaagtattgtgtactgttgcttttgctttctatcctgaaacttgaacatagatctaaatctgcaaattaaaaaaaaaaaaaagactgccaaaacttcataaagttattttgttaggtgtacttagcgacccactaaatgattgctttcactatctactttaaaaagatacattaaaaatatagccttaacaacattcatctgaatggttacctttccaaaattgcatttaaaatgccttttgggtgatgacaggagcctagccactccctgggctccctccctgcaagcctgctctggccccacaccagcagcctgattcctcccttcagctggctgcatctcaggccttactttagaccaagcttgtccaacccgcggcccatgggccggccacatgcggcccaggacggctttgaatgtggcccagcacaaatttgtaaactttcttaaaacattatgagatttttttttttgtaattttttttttttttagcccttcagctatcattagtgttagtgtattttatgtgtggcccaagacaattcttcttccagtgtggcctagggaagccagaagactggacacccctgccttagactttaagctcaatttttttcctacatggatcacatttcacattttcccagaatagcaaaattgtggactctggaattagatggtttgaattggaaactctttattcctatccacaagctgagtccttagtgcctcacttagcttatctgtcaagcggggataacctcactcttggacttttgtaaggcactcagaacaatgttcaatgaagagtaggtgttaacaaatagtaggtgtaattatcattgttatccttcagtgcaaaaatatatgtcccacagaatttcctctaacatttcatgttcaagttattaagcaattgggaaagcatgctcaatttttttttttataagttttgcttatctttagagaccacaaactctacttgtatgaagaaggttaacgtttcattattttactgtagggatagttttgctcctatttttcttcatttttacccactctctccactgcccttggacctattctctattttaacaggatatgttaagcagcagagaggtcacagaagtaggcagggttgaaaaatcaatagggaccaatatacatttgatgctaggccgtggtgctacctggactcaactctaaagggattattctatgaaacagtccatctcctatctccatgctttctcctgggatctccaggagtagttctttctccttgctagtgtccaaatgttatattttttcatagcctttgctttcactcagaaaaataaatatgactaatgagtatgtccctactcctttgcaacttcatatgagccaggcttcagttgagcagagaagttgactttagggcctgttatactcactcgagaagtagtatcaggatcaaaagaagatcaacaggaaggcagatgctagctcagtagaagggaaaactggtatttagcattgcccagcagaagaatgggcagtgagtcccttgtcactggaggtgttcaaacagagattccttggttatttatttctttttttacattagcgtgtgtgattctgagatagcaatactaagatggataaaaaagaatccagataatctaaagataataatttcaattaacaatgttcattcacaaactagataggaaataaaactatcattagcttgtcattaatcaaagaaagacagtttccatagattgagcaagacattatgccaggggttacagaggattcaaagaatattagtagacattccctattctggaattgtcaggaaaggcaaaaatacatgaaaagttaagtaataatacagaggtaatatgcccttcagtatggtgacagatatatcactgattgatgactgcattgatggttcagtaataagtgctatggcattggaaaggagggatctgtgagctgcagacctagttggggatagtttcttagtccactttgccgtcgtaacagaataccactgactgggtggcttaaaccacagataattattttctcacagttctggtggctggaagtccaagaccaaggtgtcagcaggtctgatttcttctgaggcttctctccttggtctgcagatgactgtcaacttgctgtgtcttcagatggtctttcctctgtgcacacgtagccctagggtctccctgtgtgtcctaacctgcttttttttttttttttttttgagatggagtttcactcttgttgtccaggctggagtgcaatggcgcaatctcggctcaccacaacctccgcctcccaggttcaagtgattctcctgcctcagcctcccgagtagctgggattagaggcatgcaccaccatgcctggctaattttatattttttagtagagacagggtttcaccatgttggccaggctggtcttgaactcccaacctcaagtgatctgcccgccttggcctcccagagtgctgggattacaggcgtgagccaccatgcctggctcctaatcttctgctcttacacggacacaggtcagattgtattagaacccaccctgacagcctatttttaacttaatcactgctttaaaggccctatcaacaaacagtcacattctgaggtactgggggataaggcttcactatatgcatttgaatttggtagctgggaaggggacccaatttagtccataacagatgacttcttgcagaaggaggagaataaactagatctataagaaacaggatagagattagatgagttgaaggatgggagacagaaagggtgggggaacactcaactcacagagatgaactaggtcacacatggggtttcttctcttctcctgaacaagccttcaagattgacagacttgtttccttttcagaagacaaaagcaaatcagttttggcaagaaatgcactcagcggccctgactgggagagtgactgtaagttgacatttaagtgacactattctttggctttgcggggccaggccaactaacaagttgtaaaagcattgctggagtgaggagcagggacaaaggctgcagcctgcctgccacgcatatccatgggactgtgtgttataatcgatgccaccctaaccactaatgaggcattagaaatggtcactcactgtcagacaagttgtggttgatctccatggatgttcataatttatttgaacttcctgacctcttctattctgactacatttttagtttgtcttctgttttctgaaacagattgcatttcatgttgcacctccattttcaataaattttgatttagtaggacttccatggtccagaaattcttttgaatgttataggggatgtttattggagcctgagtttttattagtttttctaataggtactataaccccccaaaaagccttctccccttccttttcctcctgtttgttttccatttgaatacaaatggaatctcttgacctgggaaactcttacttcccattctgtaatttgaggactgtggctggaatacaatattctttttcctttcagaagagtttatttactttgtctatttcttctcaattcagggattgatacaaccatcagttctattcagattatggaaatccagcaaataatagatcatcagtattgcattcaaagcctccagtgcgggtaggtaagcctccccagcatgccctggttgtttctggaatttacccatggctctgggtttttaagactgcagtggaagctaaagctacatgataaaatcaatgtgtgcttacattgctccttaagtgaaaacatctttattacatggtgggagaaagaatcataaaacagttggtattagcaaatgtcaataagccacggccctagtgattcccgtctcctggtttaatggatgggtccaaagcagaaagcctagggagcagctctgttgctgactctctgagggcacatatcaagggcacagagctgccagttaattttatagacaagaaagacattgttgctcatggctccaaggtacaagtgaggtgacatttgtatattttaataacaagggatatcattttaattgctgaaaaaatataacttagcttttcagataggaggaaaaaatcagatatggcaaaagttatcgggacatccatctccagtgtatgccttatcacctgtatcaaggtaatgatacttctagaagcagagggtgcaagttgcttcaaagagtacagtgtgccagttgtagggattaagaatggagagggctgggcgtggtggctcacgcctgtagtttcagcactttgggaggctgaggcagaaggactgcttgagccgagttaaaggtcaagaccagcctgggcaacatgatgagatcctgtctctccaaacaaacaaacaaacaaaatattagctgggcatgatggcacacacctgtggtcccagctaattggtgggaggatcttttgagcccaggaggtcgaggctgcagtaagctgtgtgtttgcaccactgtactccagcctggatgacaaagtgcaacccggacacacacacacacacacacacacacacacacacggaatgggggagttatttttcttaatttgataactgtttcttaggcacctcctagattaaaggcaaggcctgtaatctgaactagtgtcacaaatcctgtgggttttcagcctcatttcttttccaacctgatataacctgggcttcaagttgatggctgtgagttataaaaataacatgtatggtgctttatgatttatgacctctatgttcattatctcattgaattctcacaaaatccccatgaagttggtataatgtatccctgttttgtagttaaatttcagttaaacttgaaaaagtttgcctaagatcacctataagtggcagatacagctattaattaatgtggtaagatgacatagtgaagagtcagatgattcaagttcaagtcctagaacttctttgacaagatgtttattctccccaaataccaatttttcagctataagatggggatactttcaaaactgagttgggttgctgtgaagcatgcagataatgggagagacatcttaggaaatgcattccatttatctaagcttcccctagtcaaacaaactgctcctgatcccaatgcagatctttctattttaaaaagtacattgattcactgaaataacactgttctcaatttggtgtgcaagttgcactcttatttttttcagctgtattgaggtataattgacaagcaaaaattgtttatattcaagatgtataatgtttcgttttgttgtaatatacctatccagtgcaaaatgcaagatctttccatttcctttacttttgctttttacctttttagcaacttagtttagcattacttaaaaataaaataactgactctttttcccatcgatctgattttaaattgtttttccatgtaattcaagggatggtcaggtaataaggagaacttgttttagagacaatatgtctttttgctggagtttttcgttacaatacgaatcaaaggaatttcccttttatccaagtatctctcttaaaggtgtggggggaatctatgtataagcacttgtcttgcaatcttctccattactaaatggtaattagaattataacaattttagcagattcagattctaaaagtacctgatatttcctcctagtgttgctcaaaagggagtgatttagggtagaaaaaatgtatttattattctaggggcattattagtttggggctttgcctcatttgtcttcagaaatctgtgtctctttaaaggggactaaagtcatttcctgtgtgaaaaagccatttcttggtctaggatttgactttccatcattgtttttttctgtgtgttctaaaaaactataactttttatggtatattttatattaagacctgaaagagatcactctgaatttgacaggtatatcctaaaaacaaaaaaatgataccaggttgaactcagttttccatatttattatttactatataatatttcacagtttttatggtatataatgagtagcaaaaaggccttcgaagactttcctgcatattttgatttgtggttttattttctttccataattagatctggaaattataattacaatattcctgttaataaacacacacccaccaatgtcaagttctctctggaaataaagtaagtgcatggctgtaaaaaacaatttcatttttatcattagttgaatatgaagtctggatttacttcacaatttggtcagtcgttaagaggcagaaagctatcagtttgtgttaactaatgatggtttgagaggtggcctatttgaaggaaaggttttcaaaatgagggctgtgatcatccaggctttcttcagggaatagaagggctctaacctctatacccatgcctacaaagtgggagtgattttggtttgatactcataagctatagacttcccctgactttctcacttggtgagagagaattggaatggcaacaagagtaataacatgccccccgatgggaagatgcacagctcccagtagcaatgttaatgcagacaccactcctattttccaaaagacagaaaaaaaaaaaaaaaggaaccagagtttggaattggacagaccagggtccaaggattctgtcacttactaattctgtgatcttggacaagccacttatcttctttgagctactgtttctttatctgtaatataagtattacatgacaccatagcacatagagctgctgtgagaattattaataatggtgaaattaataactgccatttgctgagcacagactatatgccagactttaatactgggtcataaaatcctcacagcaaccctcccaggttggtttttttttcttagtttatatttttgagattgggacacttgggtttagagtttcaggacacataaaaaaaaaaaaaacacattctgaaaatcacaggtagtaagtgatggagctgggcttcaaattcagtccaccctctcagccatcactgtcttgtcctgcctccccagtgagatgagacatgtaaggacactgccctttcctgacacacagtaagcacacaataaatggtagcttttattaggactacctttcctcctaaatcacaaaactctaacttaacctattcttatcagatattttaaatgattatggcacttaaagactttccactaaaaaattatgcaatgagctactttccatgaagataaatggttttttgtgtctcctgattttagtctctcctttccatccccctccacatttcctttcttcttcccttccttttctatcactctttcccttccctctgtcctcccctctctccctctgcttgcccagctctgttttcctcctccatccttcaccgcacgccttctgcctcttcctccgtcttattcagtcttcatactctttttttcatcaactttgcctctgtgaggaaccaatgtcactcaacccaactgcttgccttggaaaggtttcttttaagcagctaatattttgtgactcagaacctaccatatttcaaggcagagcaaaagctaaatgtactattcttataaactgaaagtgctattatctagcactccttgagtaacctggaataacattttcttattcatctctagcttttagtggaaggaaataaggttatatgctatatcccctgaagtggcagatcaccttgagctgctaaatcaggacttttagtttacaaaccatttttcgtaaaatggatgacttaaaaataacatacatactcaactgagattgtaggttgccccaacttgtgcaaaaggattgttcccaaagacaaatagatctcatcctcttgatgatgattaatggggccaacctccagagaagaagaaccgtactttctggcagactttcaactctgatagctttaaaatctagtgatttctggtaggactcactcccaaactcctacctgtatttatttgcctttttattttaaacaatatctgcctagacccggaatttgcaaaatcaaaaatcctgaaagcttcatataaatgcaaactcagtgccagtggaaagagaaggaatatatccaaaaattataaaaaatacatatggagataagttttgatgtgagacaacataagtcataagattaggttttaaaaactatcatacacagccaggctaacgtctgtaatcccagcactttgggtggccgaggcgttagggttgcttgagcccaggagttggaaccagcctgggcaacatagcgagatcttgtctctataaaaaaatagaaaagaaagaaaaaaagaaaccatcatatactatttcgatagctatctgagattgggtttccttttgtagtaatgagatgtgagctggcctattggcatcggtgagctttgtgtgatacaatgcctattgtgaactttgaatggatttccaagttacgttcccattagatcctcctcttatcaagatgtatcctagtagaagctggtaactgctttttcaggtgctctttcttttctttgtctcttgaagcacaacagagccattgatagtcttccagtgcaaattcacccttggaaatatatgtttccatagtaaaaggggaaccaaagggctggaaagccacagagaaatctcccaggagatgacacaggtaatgttttctgcctcctctcttccccgctgagagagggatacattgagcaaattgccagtgttttccctccctggccaaccctagtcacagggcttggctcagcctcttccttgtgtccttatgaagttgccttctaaggcaacttctgttctgttgctaggactgttctagcaacacccatcaaaagctgtgatcccaatacttctcctacagtcattgaggaaatgctttttcagcctgtactctttcctactgactgtcaaatgcgtgtacgaaatggatcctcttttattcactatttagggatatcagcacatttggagcctccctgtagccccattttctgacagcatgttccatttccgtgtagctgcaccggtaagcttgctttttctttttcttttcagtgagaaagaaattgagcaataaaaaaaaatcactttaaccacagttaatttttacattaatcttcctttttttttttctccttttctgacaggatttagctgactgttcaactgatccttattttgctgggatattcttcaccgattacttcttttacttctatcgacgctgtgcctaatttgttcaagtttggggactttaccaaagaaaaatactcaggaatacatttaacagaaacgaacatcctcttgcaacttcttttttcttctttgtaaaacatttacgtttattgctgaaggactttttcaggctttagcttccaacagttttgagacattaatgaggagaataaaatgtttgctgaaacttgaaataatgtgatgtttgattttgccatgactatgaagaaaacatttcctggagcaaacagttctgttgaatttaaaaatactattatttctggtattaaggaagttgtgagctcaaaataaggagatctagcctctattttgttttaatgtattttaaagcttttgaaaaaaccaaaagggccatgtcgacttcggcccactaaacatagactcttgagaatgtgtgatatggtatgtggaggagatgtggggggtggtatctgatactgagctcacatttaggcaaattgtcctatgtgtgtgtgtattgtataaacacatacactagagtacagaatgtagtttgttaatcaaatggatttaagagaaataattgcaactctgctttgcaatgcttgatggacactaaactgtgtgggtagggtatgcccccttgtaaagatggaaactcctataccccagagcgcactgaaatgaatcaaactagccagtcctaagcctgcttactctgcctcacctgttccttccctcagattaccacaattaagggtcatgtctgcagttcctccttctccctctgcctcctgactgttcccagggcttccccaggtggctccctctgccatgccatgcccccttgtcttggggactgtgagtaacaaactatcatttggatggcaattatctcctcatctgctggtcttatacctcaaattttctattaatacactattttttagaaaatggagacccaagccaccatcactgtagttccaggtaacagggacgctgaatggctggctttgccttatctcattgttggtctctgggtcaattaggataagaaatttgattttttttttagcgtcacagaggtaatcagcagcaataaaacatcctcttccttattttcagctattattaaatatgcgccatatggatggaaattaattgtgagaccccaacaattattaagaaaagatatggttcttgctctcacagaaggcattttaaaataaacatattaacacaaaggttgtttacccagttattaagagctgagattctgaagccagatggtcttagcttagtcttgagttcaaatcatgattttatccgtgtatctttaggcaagttatctaatttccgtaagttgcaatttcttcacttatagaagatagtgaatatttgccacagacaggattaaatgagataatgtatgtaaagcacagatgatgataggttctaaataaaggtgaggtgttattgttatagctccatagaacacgttctaaataaatgtgagctgttattgttatatcttcatagaacagaataattataaagattacagtgggattataaagggattgagtaaatacacatatatcaaggcattttcaacaactataaaaactaaattgtaggccgcgtgcagtgggattacacacctgtaatcccagcatttagggaggccaaggcgggtggatcacctgaggtcaggagttcaagaccagcctggccaagatggtgaaaccccgtctctactaaaaatacaaaaattagccaggcgtggtggtgggtgcctgtaatcccagctacttgggaggctgaggcaggagaattgcttgaacccaggaggcagtgagccgagatcacgccattgcactccagcctgggcaacaagagtgaaactccatcttaaaaaaacaaaacaaaataaaaaaacctaaattgtagacagaaccatatatatgtatatcatataatgtttatattttttcttttaaacttatttgtattgtttttttttagaaacatggtctcactctgttttcctggttggagtatagtggagtgatcatatctcactgcagccttgaactcctaggctcaagaaatccttttacctcagcccaagtagctaagatgacaggtacatgtcaccaatgcccagctaactttttttttttttttaatagagacagggcctcactatgttgtacagtctcatctcaaactcctggtctcaagtgatcccctccttccttggcctcccaaagtgttgagattacaggcctgaaccactgcacttggccacctatatttggaaaattattttcccttttattaatactaatagcataacttttgtagaaaatggaataaagtagttaaattctcgggaggagcatttcaggatccctctagtttcttagattcagattcaaacttggttctcctaagctgtagtgtcagcctgtcctagcatgacttaggtctagatactgtagttgtagcaccatttaaaaatgggatcctaagtggttgatgtgggagagattccattaatttgactcttctcctagtaaaggaatgtttgtcagctgcagaattacaagtgatctttttggcacataaatcccacgttcttatttatgcacttaagcttgggataatatggtgggtttcagatatctaatgtagttcagaaatattgcctataaagggatttccataaaatgagtgccattttctcattaaattccattaaaagactggaagtattttcctacagaaaaacttctataggaaattgtgttgaaagccttcagaaaggaaggatttaagatagtgaatagatctatggcaacctgtgacatgctgggattagttaggtctattgggagaacagactttgctggaagattctctttgtatttgcagtacttttccagctgtgagatattcactgtggaccacactgcttcaggccacaagactttccttttatgccagagaattttctactctctactggaatatcctcaaaatcaagtaaattaaagtgtctgtaacagtctcctcccagaaacttataacccaatgctaatcatgagaaaaacaccagacaaatcccagctgaggggtattctacaaaatatctgatgagcattcttcaagtgtcaatcaaggtcatcaaaaacaaggaaagttgggctgggaacggtggctcacgcttgtaatcccagaacgttaggaggccgaggtgggcggatcacctgaggtcaggagttccagaccagcctgacccacacggagaaaccctgtctctactaaaagtacaaaataagccaggcgtggtggtgcgtgcctgtaatcccagctactcgggaggctgaagcaggagaaacgcttgaacctgggaggtggaggttgcaatgagccgaggtcatgccattgcacttcagcctgggcaacaagagtgaaactcagtctcaaaacaaaaaaacaaaaaaaccaaaaccaaaaacaacaacaacaacaacaacaacaaaaacaacaaaaacaaggaaagtgagaaactgtcaccgccgagaggagcttaaggtgacatgatgattaaatgtaatgtggtgtcctggatgggatcttggaactggaaaaggacattaggtaaaaactaaggaaatctgaaagaagtattaagtaaagcatggacttgagttaataataatttatcaatattgtctcattaattgtgacaaatgtaccacactcatgtgagatgttaacaataggggaaactgggtgtgaggttgatgggaaccctgtgtacaattatctttgcaatttttctgtaaatctaaaactgctctaaaataaaaaggttattttttaaaaactcagaaaaaggttcataagagctgggctgaaaaatcacatcctgctaccaggtgccatttgtaataacgtagggataagttcaagcatgaaaaataggtactatatttaacttcaggtcatcaaagtatcttagttccctgctttgacaattatttaaggtcagattctgtatatcaatctagttagccccaagtattagagagtattctaagataatcatataacataaagaattaacaatactttttcatgagttctaataaagcttctcaaacaagattttgaaagctctgtgaaaatttttttaaacgattgaaccataaaaattcacttacaacaaataactggaatgtatgtgttcaaccctccagcatctaaaaattttgaaaacactttatagtgctcataacccatctctttttctgtttttattttattttattaattaattaattttttgagatggagtctcactctgtcgcccagactggagttcagtggcgtgatctcagctcactgcagcctccacctgctgggttcaagcaattctcctgcctcagcctcctgagtagctgggactacaggcatgcaccaccatgcccagctaactttttgaatgtttagtagagatggggtttcgccatgctggccaggctgatctctgtttttattttaatatatttttcctatataatttttggatttcaatattagtgacagattcttaataatatattatttgaatgatgaaactaaaatcttcaaaagaaaagcaaaaaataaaataaaagcaatctgttaacaaacagtttacaagtattttcactgatgtctcatttgattttcacaacactgtgatgttgggagtgaggggaagttttcatgtttctccattatataattaaggaaactcaggcacagagaggttaagcaaggataagaggtgagccgggttttctggtgctaaatttcacccctttcaactccattacttaatttcccctttgagatttgtttcctctcttcatgactctttggagttgtgagagaccaccaactcagatattgacccactgaaaagtcactaacacaccaatggctccggaaagtgctatttcttcagacttcttaagcagatagattaattagaggccattttgtcaaaatacagactaggtagagaacagagggacctagatgggtggagtctcctatcaccagccactatgttacatcttctattgtgccagagcttaacaactcacttgagaatgctaaatatcaacctccatttgagaaacacttcagtagaatcttcacttggcaaaactaaaagggttttggctttcatttctttaaggacatgtgtcactgatttttgtgagtgattctaaacagccagttgaactcttaggaagcattcaaggattaagcatctagtgaaggccgggcgcggtggctcacgcctgtaatcccagcactttgggagaccgaggcgggcggatcacgaggtcaggagatcgagaccatcctggctaacacggtgaaaccccgtctctactaaaaatacaaaaaattagccgggcgtggtggcgggcgcctgtagtcccagctacgtgggaggctgaggcaggagaatggggtgaaccggggaggcagagcttgcagtgagcagagactgcgccactgcactccaacctgggtgacagagcgagactccgtctcaaaaaaaaaaaaaaaaaatctagtgaacttttgttgagtggttgtttaaagcttgaagaagaagtgcagcttcagagacttccaatttaccaacagtgttgagtatactaccccatcatttttggggctggattctgtgaatgggaaagtctttctcagcccttaagatatataactggagcagaaatgagtgccaaagatcacagtcccaatccttcaacttctttatggcgccatacaaatataaaatgagatcattattttaggaagattcctgataacatgtctttgccagagctgagttctcaagacatttttagctgtaccagactgacccactgtttaaattcaaaaataactgggaagagaactaaactcagagccaggagacttgggcctaataatggctcaataactcgttattggtgttgttgtggataattcacttaacttctatgagtttcactttcccagttgcaaaattggatttgtaatagttttgactactactaagggtttttgtgaacactaaatgagatatttacatgaaacctctttgcaaagtggaagatgctatatgaatacagaagtcattaagaatggtccctggccaggcgcggtggctcacgcctgtaatcccagcactttgggaggccgagacgggctgatcacgaggtcaggagatcgagaccatcctggctaacacggtgaaaccccgtctctactaaaaatacaaaaattagccgggcatggtggcgcgtgcctgtagtcccagctacttgggaggctgaggcaggagaatggcgtgaacccgggaggcggagcttgcagtgagtcgagatcgcgccactgcactccagcctgggcgacagagcgaaactccgtctcaaaaaaaaaaaaaaaaaaaaaaaaaaaaagaatggtccctgggaagacattattttgaatgaataaatcagatgttagaaattcttattttaatgagtttcagtccatgatgcttagggtaagttatttacatttctagctactgtcttcttcacctggaaaacatgttacttagcatatagtagatgatcaattaacatatattaagcaaaaagtgggtaatagaaatattttcctcttatttaccagggactatggcaagatgatacactaaaacagatttgaattcctctccctgttactgtgactttttttattgctactatttaaaacaacaggattattattatatattattattatttggaataataggttattgttctcttgcccaagctcatttaaaacacttctaaatgacttcccatagaaactagaaaaatcgaatggcttatcatttgtctgttagaggattccagaaccatgatagtcaactacagcttattattcattatttatatttatattgctgcatttaattctgttcagcacaactgcataagtatctaaattactttcaggttaattgtagagcatttaatgaatgtttcatatcatatctaaacattgaatgcaatatgtcagcaattaggctgctgtagtatttgccctgatgtgagctgtaagatcgtaggcctgtcatcgtattcagttaccgagaaatctttccttttaagtgtggacacgcttggttttcaggagaagtatcaggaattatctacagtagagaagctactcaaagttatgtaaaaagaaaaaggctcttagtcacttcttggaggtaaaaaacaaaaaccaaacaacctcccccacccgccaccacacagacacacaaaaaaaacttcagcctagatgaacctgcacatattccttctgcctctgagctctgtaatatggtttattcattttcactcactcactcactcactcactcattagctcacttaacaaacatttatggaggactttcggtgtgcagactttatacaaggtgctaggatacaacagaagcgtggcatcattgctgacctttttgaggcatcatggactagccaggcagccacacagtcagccatcacacaataccaaactggagttgtggcattgacattgtgctgggagagaacaggaaaggggtcataaattctgcctttcaggtaagtgagaaagaggaagcaggaaagggaagacaagcaggaagaggcatctgagctatctaggtctaaaaggatgagaagggttttggggtttttgttaaacagaaatagagaaaggtagatgttgcatatgaatcatttttttgtaagaaagagtctgattttaagtgcaccaggaactgcaaagtaattcctaccctctcccatcttaagccagctcttctgttagttttactaacaggagaggcactcttatttctgaaagacaccacttcctttcctcagctccaaaagccagccatctgtcccaggagattcaaggaaactgtgggaaaagcaaaacatgttggatggagcatgggatgactcagtgagctggcgatgagactgtgggtggggaggctgagcctgaggacaatgactgattcatccccaggtactgctgtctctctgtgctaccatagagataaaatttgtgtagtgagcaagggccacaagtcttttggtcactccacccatttataaataaaaagttttccttcctaaagaaagtttacttctatttttaagtctcaggtgttcatggtgggaagagctgggagaatctaagttctccctgcatgcctttccccttcttttggtagcagcaccctgatttttcctttagtgaactctcatgccgtagtgctcagtctctatgaatcaggtgaggctgataccatcccatcgctccagagaagaacacatgactcaggctttggcaaagacaacatttcattcccttggctacagtgattgctttaggggtaagcatatgacccaggttaggccagtcacactcatccttgggtgtctgactgaaaccataagcaaagaggtactctctgtggacgttattaagctggcaagaataagcctggagcttctgagaaccaccttgccatcatggtgggcagcctgccagagaatgaagccaacacaaatgaaaatagaagatatgatatgagaagggcaggtctttaaccagataagaaatttacatttaaattcccatgaaagtcccccatggacttagcagttaggtggactgcacatttccatttctctttagttaggctgaatttggattttgccacattgccaaaagagttctgatgaatactggctcttatgaagactctttcaacactttgcaagcaggatgcccaactggctgattccaaatgctgataccttatttatgaggttgttggttatcattcagggtttggaaggtggctctcctccattccctaatggcttccctccatttacctctcctccattccctaatggccgctaagtcctaagtggatatcaaagacatcttgtatttgtatagtgctttcattttacagttctacaattatttctctctcctattttatttttatttttggcaaggaacaaaaactcaaagtaactaacaaacagtgggtttataatataagaatgtagaagaattgcacaccaaatgtaggacgtgtagctgagcttcatgagaactaagagagtcactagaggctaatctcaccatctctctccttagaagtccacatgacatctgcctgcttctctctacaagcctgcctcattcttctttcttcagaccacctgttctgcttgctcatttgcttgcaaccatcatggccaccctaaaatgtagtcttggaccccaagtctccattaacttccagcttggttctccagggctaaatgactcagtatctcaagttttaaattcctatgaaagagaatctgactggtttaaccttgctcagctatccatgtggggtttaagcagctgtggccagggaaatgtagtcggtaaggctacctctttcaggctagggttggtggtggtggatagattttgtaagtagggaagaaaattataagcattttcagtaaagacagtgtatctcatttggtcctcatatttctgagaggcagaaattattattattcctattttacataagatttaggataagcggcttgtttgaggctatacaactaggaggtgacaactgtaggattttaaactcaagacttttcacttcagatcgcaagtggtttcctcagcactattctgtcaatgcgaaattacatggtctcactttcttgagcatcacaaacatatccagtcttgatttttaaggatttgttttaacagcactaacttatggttttaaatcaaacatagcagtgatccagaaagaaaaggatgaagaagaaaatctgaaccataggtcttggatgaagccctgttatccattaatgaagaagtgagcaagagtgaaaatcctgttgggaaaatttcaaaggaaaaagtagttggttaatggagggcctgtgcttggggcatgtgtgtggctcactgctgctgcaggggtttcagcggtagttaagacagctggagattcaattcctaattgaaaggtttgagcagtaaattctgccaattgaatgatggatctcatcatgaagtattctgtctgggtcttctgtaaatatggatagctgaatctcagatttatagttcatgctgccacaaactcagactttcctactctgttccttacttcccatctttcactagacttagagtagacagaggaaagcaaatgtttgttaataccattacaaagttacataatttttataattttaattcatacgaattgtggaactcgtctctaatgtgacctactctggaggactcatccctttcccccatcccaccactctcaaatcccaccttaaatagttctgatgtccctgagggtccattcttagttgtgatgtgacagttgccattctccttttctcttttgtggctccttggggaattatctttggtcactaccattaccaaacttagtggctcacacatcaacacttaccgaagatgtcacaaaacaggtgctgctgttactgccatcagtgtctgtgccttggcagctttagccaaaccagtgttgagggctctcactgccactggagggctgggtctgtgtcaggcctccacctcaaggtgggctgtgctaagccagttctttgttggcagcctcctcttcctaggattcagcctaaattgacttaatgccgcttgacgtggaagttgggccctactgtgttaaaaatatctcccacccagaagctgcttttgtcctagagccaagctactggcctctacttgcttctcctgggataagcgttttggtttttcatgtacaaagatcctgggaactcacctcattttcagacatgcttgaatcatagttgaatatagattttagaacaaaatataaacaaatacatgtgaatatatgggacactttctgacaggttttccaaagttatcaaatagtgttttatataatcccacctctgaggtagggtaaaactaattcgtattggaaaagcaatggatcccaggacacatatgctctactttagctcctgtgtttctgggcttggaatcctggtgatcagggtcgtcccaggtaatgctatgtcttacacccagagactttgtgctcagcagctagactttcaaggagagagtgctactgtccttttatagactcacttttttttcttttgtgacaagagccaaaccaaccaaccagataaaaaacttaaaataccactattcttgaggagcacacaaacccaactggaatactccgcaggtgagacactctccagctgaaagatttttctctcccctgacacatttctgctcagaacagatctctgacctttgaagttttagaccaatctgtgcgctaataattcattaatgggttttagtttttcattcacatcttagtcacagactttctggaacagattgtttcttaaatcaaatttaggacatctacttaaagtacttttgaaatgcaaagatttttttttgtaaatagtgatttccaagtggaatcattttgtttctattatgacactgacaggttattaaaatctatacgtttagatgttagatgggtaatttttgatcaggggaatggaaagtggagaaaataactggtgaaaagaaggaacaataattgtgtgtgtgtgtgtgtgtctgtgtgtgtctgcgtgtgtgtgtgtgtattgtgtccatgcatgtaaaatgaagttgagctagccaaaagtcaaggagttcttacattctatctatccaatccctagtgtcttaacaggttcataattgtattaaaaggacgttttggcagttaggaagctgagactgttcaagtctgtgtaaagggtatttgtgaagcacctgtgatgtgtctgtcataggaaacagggatgtaatcaaatataaatttataataaggcatcctcttactctgagttgctacttttaactgttgatcccaggcactcttagccggaaagactaaaattcacctcaactccactttggctgctgatgtggtttgggtgtccctgcccaaatctcatgtcgaattataattcccagtgttggaggtggggcctggtgggaggtgattgaatcataggagtggtgcttcatgaatggttcagcaccatccccttggtaccgtactagtgacagagttctcatgagatctggttatttaaaagtgtgtggcaccaccccctcccttcctcctgctctggccatgtaagatgcctgtccccatttgcctgctgccatgattggatgcttcctgaggccttcccagaagcagaggccactatgcttcttgtacagcctgcaaaattgtgagcccattaaacctcttttctttataaatttcccagtgttaagtacttctttacagcaatgcaagaatggactaatatagctgttaattacattcagtctcaaatttaacaatctttcccggggttgagacagttttgtatatgtagatgtgttaatcgttcattctcatgctgctataaggacatacccgagactgggtaatttataaaggaaagaggttcaattgactcacagttgcgcatggctggggaggcctcaggaaacttacaatcatggcagaaggggaagccaagatgtcctttttcacaaggtggcaagagagagaagtgcggagcaaagggggaaaagccctttataaaaactatcagatctcataagaactcacgcactatcccgagaacagcatgagggtaaccacccccatgattcaattagcccccaccagtccctctcaccacccgtggggattatggaaactgcaattcatgatgagacacagccataccatatcagtaggcttgcattttattggttgtcttcccttgaaaacaataagggattttattaggcaatgactttctcaagtggtccattcctgagcaaagggaactgctctccaggaataacccacttggccacatgatgggcatctgctccccaaaacctagggagctcatcaggacccagggaaggaggattatggaaaactctgagaggggcccatttctttcttttcttttcttttcttttttttttttgagacggagtcccactctgttgcccaggctggagtgcagtggtgcgatctcggctcactgcaagctccacctcccgggttcacaccattctcttacctcagcctcccacgtagctgggactacaggtgcccaccaccttgcccagctaattttttgtatttttagtagagacggggtttcaccgtgttagccaggatggtctcgatctcctgacctcgtgatccacccgcctcggcctcccaaagtgctgggggcccatttctttaaatttggccatgatgtatttccttggcagaatatgaaaaaagtccaaaatttcaacacactacatttgtttggttctttagaatagggcttctcaaacgttaatgtgcacacaatcacctggtgatcttgtggaaatgcagactctatttcagtgggtctggggtggggcctgagaacgtgcctttccaacaaagtcctggatgctgttgatgctgctggcatgagacacaccctgaggagcaagactttcaagtttggcaagtgttttcctatgtcatctcactcagtcctcatgacaagcctgtgaggtacctgacacatccccacttccagcagtagaggcaggttccatgaggtaaacagacttgcttcgggttgcacagcaggtacgacttactctcagacatctgaatccgcgtcctgtgatttttctcccacacaactgtgcctcctctgcgtacatcttggcccataacgcttctcaggaagatgctccaaatcagggtttttgttttcagagagcttcttcatcagcacaccactgcattttttcccattccccatatcttgttagatgggttcttttatgttgcttgtcagtatgtttaggtggtgattgtcatccaacattcttgctatccctctccactttatactatccacaagtagatataaaatgtctagtttctcttatttgaattataaatacaagcttttcatcgatgtttgaaggctcaagtattgatggatacacagaggactaatctctgggaagtaatacaggcagtatatatagagtcagagtaagagattaaacatcttattgataatgagcaggtaacaaagtgggaatcattataatagcataagctggaagttgacaaaaacatactgggaaaacacatggattctggagttttgaatcctggttctgcctgaccaaatgtgtgatgtggggctagttacccaacctctctgtgctttgatttccttgtatgttaaaaggagataacatgttttttgtgacaatacatttcattaattcacaacagtcccccacatatattaagtgttcaataagtatcagtgcctatccttattaccaattggatagtccaatctccttatttttattttttgagagaggatctcactctgtcacccaggctagagtgcagtggtgggaccttggctcactgcagccttgacttcccaggctccagcgattctcccatctcagcctccttagtagctgggaccacaggtgtgtgctggctcatttttgtaattttggtagagacggggcttcgctgagttgcccagactggtctcaaactcctgagctccagtgatccacccacctcggccttccaaagtgctgggattgcaggcatgagccactgcacctggccaatctccttatttttaatatggagccagagaagcccaaaaagcttaagtgatttcaacattcattaaccaacagttttggagctttcactatgtagcagatatttactagttggtgagtaggcaaatgttataagttgggaagtagtggagctgataagtgaacacaaaccctctagtttctattctattatggtaagtgtgagtgtatgtctccacactcactgctgctcttgatctgcaattgttctttggtatttccaacagttccaagggcagcattgcctttaactccattgactctagtagccatcaaactttatcttcttttcccatttgtcccaggaggatcctgggagtgtggaacgaaagataaagaaccttaagctgagccctaagtgccctagactggctaaagaggtaggtctggaggtcaggagtgctcttaaaccccagggcttgctgatgctcttcccaggtctgagtttccaaccccacccagagattgttggtttgagaatcagcatagtttacctggctgaacttcgcgttattggcatttctgtcccccagaacagtaaggaatttggttaccctgggccatggctggggcactggttagcagctgcccctcctgctcattttgcggctctatttcaacaagacttgaaaacctttgtcttcagagaactctccggctctaagcttttgtgcttttgtttggagcagcctgttcttgtacttgtagtttcaggtaaggcatctgatgtgtaattaaaggataaacacagagagaaataaaagtattttattacttatatgaagtgaagtaggtgcaaataataaaaagtgcaaatgaatttgagagaggaattgtgcaagcccttaaggggctattacccatctttaaaaaccaagagttgcttaacatgttactactttgtattttcatcttcatttagaacataaatttacggtgactgctggcaagttaaggagtatcttctttaataactaagctttttattacaaatgtttgaatcttactgcaaattattttgatattattacacctcttcctccttcaacaatactatctagaatactcttataatacctcctgtgtgtgaagcctgtgtgtgcagaaaacccaaaaatgttaagaataaacttttagatttactgtagcccatagtaatttgctgccccagatacagtgttttgggattgcatgggataaaggactccaaattgcaagctatgcaagagagaagacattatggttctttgcttttagacaagaaatacatttgtaatattaacttcccaatgtattgatttgtggagttggacaatgttcaacttaaaaaagttgttttatcggagtaacgcatgcacatggtttcagaagttgaataggactagtaatcttattgatgaaactatagtattctcatgcatacccttccactctccattgatagctattttctactatttcagctctttattcttgcaccagctccatagttctaaatatgcatatgctgctattgtttatcaattttagatattgaagtaaataaagattttagctcttctacctcctaccccatcctccaatataattatatgaaaattttctaacaattcatattttgtgttttcattattctgactttataaatattattcatagctgagcttagcagtatgattatatttttttgtaaatacttgttattgttgttattattttctgggctctgtttcctgctgctgttgaaacatttttcatcaggcacaattactacactaggctgatgaccagaatttgccaggccctgtggttagtggatgtctccactacctgtacctcttctggcagcacgttcttctagattgattccctctggcttctacccaaccccattgagcagcagaatgtgaggctccaccagaacccaagattcatacgtagagtttagagatggcaagaaggaagagcaacataattaaaggcaagagccaagcttgagcatgggattgtctagaaagagttttctgagatctttagatgttgtgtgctatagaatcttaccatagggtggatgtgggcaccaagttaagtgatagctttagaatcacagttgaggtttctattttctttgtaaataggccatgaacatttgtgcaacctagaaattgatttcattcagaaatatagtatttgactcacaaaacttggagccactcaccacacatttagccatcaggccccctttggctgtgtcctcctcttgtctttttcttgtcactagttgagaaaaatcaaatgcctgccagcagtttcactctagcctgcattgcagatcctcagaagactcaagctcaaagggaatcaaagcacacacacacacacacacacacacacacacacacacggaagaaccaaccacaaaaggaatcaaagcaagtgcaaacacacacacatattggtcttctctggatttttatttaaccatctctgattctattaagaccttgagtacacacatcagagcatattaaactttgagatggggatgtatgagaagacattgcttgataaatgttatttgccagactttatttttaattcctgtctacgagagtgagaaccactccagaatcctcctttttctgattctttgtggctagagaaatagaagaggtaataaaagatgaaagtattggcagggatggggtgatgggaagcttggagaagaccatccctgttgcgtttttactttcaaactctggatatggaaaaaaacatcatttataatcatcaaagcaagttcactagttcataagccaagaatatgaatagaaaaatgctggtaagtaattttaataaaaaccgaagtccctgtttcagttttcctgttttatgcccctagggatgggaataatactcaaaatatttacaaaattatcaggcttctcatggtcaatgaagggagactcctagactttcttccagtctcgttactgatatttagtccattagagcatggattaggattttcttcttaaaacttttactttaaaggcatgatttacaagtagaaaaaacaaatcctagaagtgtattcaaatcttgaataaatggaaaaagaaatgtttgactaattattggaattaatatatctcaagatagaatttgtgatccataaaccaaatagaaatggtatacagaagatccaaaaatcaaacatttgtgagtgtttagcactgttcttacaagaagatgttaataagctggcattataagcatgaggtccacttagcaggtgtatcgataaacctggagattgatatctcagcatatcaatctgatgcatggatcttgcttttaactctacttgcccctaatctgtattgtcaagaaaacttcatgttgtaatctggttttccatatacagtttctatagggagcaggtatttgatcaactgacatgaacatccgaatcagcttggtagctttggttctcactgtgaatgaactagattttggtttgggtatcacattctagagatgtggacctgcatgagcccagccatcagagaactggcatgttccggtgtactaacaaaatcaaattagctttcaaatttgaggtaatccaactaacttactcccctttctccctgcaggtctgtttctgcatttgcagggccctggataaaaatacaaatgaaaggctcaggcctgtgctttatcctttttctctttccaccgatggctctaaccttcacatcggaggtttgtgagcatgcatgaagacctccagccaccaagtccaagctctgtcctagttcctgcctgcccaaaagccacccattgagtacctcttggctctaggggtccatatgtggcaatggctgcctttgggaggaaagaccctagaaaggaccaagcaggatctggcactcactacaggccatttggcgaggatggtctgagggtgaggggttgaccttaaagtggacaaatctttttggctttacggacttttcaccctgtggagaggagtttagccagagcaaagccaggttggggctcaaggcaagggacctggttgctcagctctaacagtgatactgtccacttgatccccctttccccactgcaaagacatgcccgagtgaccatgttacctcttaggatgacctctctgtctccactttcaaaaactgcaaccgtttctaacagaatgtattttgtcaaattgtggtctaagggggatctgactcaagcctagggaccataaacaaagaagtatcttgtttgaaatcactctccagagaactgagagtaattttggggctctctattaacatttgtataggtttctcagatgccagtccggagtcacagcctcttaattacagggtcaaagacagaaaaggctttacttaactgctaatgaaagtccttaatccgaatgaacctgaactatttagcccaggaaaattcttgcacagtgtcagcaaatgatattcaaataactttaaaataatcgagtcttccagagttttgtgcttggctcacggaaacaagaatttgaaaggaacaaactggaatttacttgcttataaatgtgctttggggcaaaacggttgcaaaagcgaccacattttgtttcaagagatttctctgcacacacactccatccggcctagcttacagaacaaagccacagagctgcattaactgtggagcagaaaaggaatttcatctatacagccagctggtctatcatatatattataaaggggggttggaggggaggaagagaaaaacataaaacataacgacacagagcaatttcatgcaatccttgataggagatgccttaaagttaaatggatgggaaatcaatatttgcagagttctgggtgagataaaaggttggccctttctgataatattgaaatggctgaagaagtgtggccaggggaagaaaagactggcctccttggctgttcattccattttattttatgtcaatcatttattcaaccagtatttacatatctgttatatgtaaggtatcattcaacaagagaccatttctacgaattcttttcctttacctcctttcttatcttttcttctatatccgtcttcagctaatgataactagggaggcagtataacataacagttaaccactcaagctctgtaaccttggggaagttattttacatttctgaatcttgatttcttcatgtgtaaaataggaatagtaatagtgcctactttacattagtggcttggcaaacactaagctcccaataaatgttaaatatgaataatactatgaaaaggattataataatttgttttatagacagagataatttagaagtcacctttgggaaaaataacatccacaagaagtgaatctaggataatgtttgtaccttccaacattttgtatttcttgagcatgaaggaaccaccaacatttattgaccaggtactatgcaaagatataagtaaagatttttgaatatgtgatacttgtcagggaggataaaaaagctttttcctctacttttaggttcagtggctgggacacttgaaaataaactgacaagacacaaattaacagcagaaaaaggtttatttcatatgcatttagggggctcacagaaatgaggcaaaaactccaaagaggcagtcaaacctggaagcttaaatattaatatcattttgtaaaagagggataaattgtggagacgtgacaagaaagaaaggaaaggggtttgtgcttctctaggtagtaaatatggggaaggtaaatgtgtgggggaaggtaaatgtgtaggggaaggtaaatgtgtgggggaagctaatgaaagacaggttgtcttataaggttggttatgcagattcctctcccacgtctcagaacaggtagaagtctagagttgtctggtgattaaaagttgttctgcccttcctggtatgagagagggagaggaggatgacttcatgaaggaaaatttattccccactttaaggcaaatgggggaatatagagaactttttccttcatctactgtttcttaattgccttcagctcaaaataatctttatgccaaagtggcagattctgagatggcatattctgattccttccatattaattaataaccctcacataataccctataaattgggcactatcacaacctccattttatatttggataaactgaggctcagagaggtaagatacttgttatgtttatacaactggtaagtggtggagctgggaatcaaatctaggcctccagagcccagagccagcattctcagccattactgtccctgaaactcctcatggacaagatggtggcagaaatcctgaaacagccaggattacagatgaattctgattctaatttttagattatggagaataccagttggttcaggaattgggtcccagattctgtttggtcatcatctaaaggaactcctcatactgtgccagatgatgggctcttattacaataagaagaaaggcatgttctgaaattcggaattaagcgtctgaagctactctttactgtggttccatagtgaacagttattctttcctcctttgtttattctcaccagagggcagggactgttttcagcacttggcagtgtccttgcacatttatgtggctccctatttgtacaataagtaaatgttggtagattggtgctcctgtctgtagatgaaacaaaatctactacataactggagaaaaacaattagggcctcgaaaaacctcaaggttgaataatttggctttactaaatgagcagtatatataaaataattcgaagaattctgaaactagttacagaattcttccttgcacagttttttttgtaattcatcaaatctaaattctcaagaaactggctctgttgttttgcttgttatttattacaggttcagattagttcattttccttgtaaatagagcactctcagagttcattgacagatccttggtttcccatttaacggctctaaatgtgttttctcttgggagaggggttgttggaaacatttgcggttgatgagccatttgtagattgatgcctggtcaaaaaggttcagttcctaccaacccatatacccatagaggccatagtagctggaggctggggcaaatatgaaggtgaatttagactactgaatataaatattatcatattgaggtacagaaacttacaggcaattgctttattatttccacacaaaactcatctcaggatactgtctaagcaggaagtctgttgcagtggttaagaatgcagtcctggagatgtccacccagccattggactgcagcatccatcttgctgttaagaggagaggatgggcctgaatgaggtaccaacatggccaaaagcagatctgagagagtgagaaaccaggtcctgaagatgcagttggacagccctgatcaagctcagctcaaagccagagctactcccactagattgttcaggcacataagccaaaatatttccattttgccttaaccattttgggtggggttttgccccatcattcacattctagtctccatatatcaaaaatgttttcaatctccaagcctagtttaaatgcacctttctgtgaaggctttgtcattcccacaagctttccttattccctccctgcctgtctccctcccttcctctactcgcatcaactactaagttggctccttaactaagatccttaccaattatgccttgaactgttaagtgcctggggattctggagccagattgctgaggctgccatcctggctacaacacctactagctatgtcatgtcttgcctaatagggtataaggagctcaagacaaagatcttggcttgagctatttttctgttgtgccacttcatcttgttaggccgttgtcccatccctatgaacacagcctgtttttagacctccctttgagttcatgcattgcccttctgccctcctcctccatcagaggactgatatttctttggcctccatcctatactcacactctaggtctttgcctagccttgcaaatatattgggatccttgatttcctgagtcttctccattctgttgaagcctagtcaggattatgacataaatatacaacctaagtaacagaatcatcctttctggacaggttaagtttgctccagtggtttatcttgactgcaaatgattcattttgcagaatgacataaagtaactcctattccctggccactaaaaatcatcccttcgaaacctttactgtcctgccttttctttcctaagaggcagtccaaggggttaactattgacaaaaatccttcatttaaatgaacgaattctgaagtttatggaaaggatattatatccagatgttcatctaagatgttgtccttgagcaaatgggaaaataaaacaatataatttaatagagtcaagatgcataaacagagaagaaggaggattaaaggcttttagacaatggcctgggttatgatttcatttctgccacttaaatatgtgactttcagcaaatcacgtaatttctcaaaatgggaaattgttcccttctgcaaaatgtgactaataataatccattttatctctattacaccgagctgtgatgatgatcaaactggcgggtgtatagttgctttctacgtagataaggtgctgctgttattactattaccaagtgctctagggtgtgaagtctcatttcttagtgggactgttacacaacatgtggtaaagattaaactccaacatcattgagaaatgcaagtttaactctttatgaattggccacatgtattttgtggctgaagtaaggtctgaatttctgaaatctgttcctgttatttccacatttagagctgacaactataattagattagatgacaataatgtaacataactatgtaaatataattatgacaggttaaagaaatagagcacaaaagcaagtagaaaagcaagtgggagtattgaactggagggatctatcagggtggtgggttcaatgttctttaggcttattgttgtattctgggcttgtacctacctcattctaatcagcattggatttccctgctttaacattatatagcttttacccagactccttctcatcatggtgtgagcttaaatttggtgctattgaatttgtcttcctaaagtatccctcaacaagattaatttagctgaggtcttcctatagatagtcactgggttgacattcacaacgatgttgcaaaaacaacctgcataaaactgatggcatcttagcacagatcaaggcagcagcaccaaccttactagtagtcattgattatactctttactaccaatgacacccaaccttggctccctgaacccctctgtgtagggcaagacctcagatgggatggccaggtagtgtcttcgggaggttagaccactgaagtactgagtgcaggcaaagacaccttatccacaggcatggcagggaagcccagagcctctggacttatttttgggcaacaaaaaactcaggaggaactgggacaaactagagattagagatttttctcctggctctgggttccaagaattctcttgctttctggtcttatcttgcaagcagattcaggctctttccaccagccaggcaaaacgggagcttaaataaaataaagttgacttaaaggaaataaggaaatgccaagggaataattctggcacactgaagtttgtgaatggagatgaatatctactactgtaataatgcgtatggcatttgtattctccctgtttaggggaccactcgttttatggaagatatgttattgaagtgtgtgcctgtgtggcatttgttttgttctaaagccaaactgaagttcattatactctgctaagcccctagtgacttacagggttagaagtgttttttaaggcaattgatgacaccacagcaaaagcaaaatcagaatgtgggaaatccttcagcacattctttggaagatgaacaaatacaagcagaaaggaatccaatagggaaagaagaaattcactgaaagataaaaagtaaatgaggtagagaagattgactttgcccacacattatccacttagtcattgaataagaggacaaacacaaatcaataattctagtcaactccttgaattctcattttccccaaataagattccttctctcatttcaaatctacccagattacaactttctttttgctacaagaattgagcccatcctaattacctacctcaattattttattcacgtgacaaatatttattgaatacttcctaggtgccagccattacgtatacaaagaaaataacatatgatcgttgatgcagcagagacaatattaatgtagcaccaaaccgtgtttcctgttctttccaggcacacagctagatggaaacaggctaagagaaggttaagttggccaaggttacatagctagtaaagttgcagagcagaattcacacttatggtagagcaaaattcaaattaggtagtaggctcaaaagcataccattagctgacattccctgtgtaagttctgtgccaacctgaatttcagtaaggacttcactggaaggtaaattttatgagggctagcaacctcccctgcaattatgtagggtaatatggcagagtcagtagagcggaggtagaaatgatgtctgtcatttccagtcttgacctatcaacatctctctcatagtcctctgtgggctctttttttccacatctgccagccaaatgctgatgaactagtagaagattccaaggtcctcagggatgaggaaatcacccaacggaagatcctagaaccctggaatgctgaatgactgtatggagtaaatgactcctaactgactcccattggactataacgtgtgaaaacacacatgcacacacatgcgcccccgtgcgcgcacacacacacacacatctttattgggctaagccactgagattttaggcttatttgttttagcagttagactgccatgactaatatatgtgccattaaaaaaaaaagtctacagtccagtaagggagagaggaatgtaaaaaatatcacacctcataataattattcctctcagagacatcatggtgctatggtatttatgaatgctctttgttaccatattcatagaaccctgaaagggagatgaccgattgtcctacatgtgatgctcagaacaggagtaaaacacaaatagttcaggggccaggtttcacacgtgtaagtgtgagccaatgggagagcagccaaaggcgagacaagagggagctctaggaagtgggcctggctgaaactggcacacccatatcaaagcaaccagattgattcttttaaaaactttattggctaaacaaaaaaatggccagcttgaagtcacagttctcatgtgggagatttcacctagatgtctctaggtgaccccattctagtgctgattgtcaagaagttcttgggtgtataatatgttcttatacatttttccttgaatatcatctaaaggcacactttccagtccaagattctggatcttagtgccttggatcttagtgccttgttcctttgagacctacaagttttgatctctaagagtccaaattattaatctaatacataattagtgacaagatcagctacataatttgtggagtcctttgcaaaatgaaaatacgtgcccccccatccaaaaagcatgaaaaaatgctgttttggtaccaaaatgttaaacttttaaaaataataaaaattgtaggtacatagtagatgtatatttttatggggtacatgagataatttgctacaggcatgtaatgtgtaatagtcaaatcatggaaaatggggtctccatctcctcgagcatttatcctttgtgttagaaacaatccaattatatactcttttagttatttttaaatgtacaattaaattattattaactgtaatcactctgttgcgttatcaaatattaggtcttattctttctaactacaacatattaaaattttaccatgcctgatatgtcctgccctggctggggacaagtaagtcctccaaggcatgcaccttccaaaccagaatgcacttagcacctggctcaagcatgggtgacaggctcgcacttcctgaacagcccactgggtgcactgtggagctgtcaatccagggtgggactgtggccaccactccctaagatgccacagggaacacacacccaacctcagcccttccctctcccttgcccagactctggccagagtcagagtcctgccccctccccacaagacctggttgccatccagggcaccacgggtggagggtaagcagccaataacccaggtggtgatgggcactgaagcggcgggaggtggggccccacataagcagaggctccaggtgcccacctgtgctccattgtcccatcagacttcatctacacacaattcaaagataaaattttaagaatctgaagacagcaatgcgaagcattgaatccaagtggggagcccttctgactggtggccctgtgtcactgtgctgctcacagacccacgaattcggccctgattatgggacacctactacctgctaggcacggggatgccattctgaacaacaaagaccaagtctctaccctcatggagtttatacccttacaaagtccttactgaaatgtagataagcctgagaggggtcatagttcaatgaacaatttaattagagggaagagtttgcagatggtcagcttttgagcttaccacaaagatttgaaatgtggactctgctcttccacttttattagcagtgttgtgacattgcacaatttacttaacataccctaagcctatttcttcatctgtaaagtgggaatgataataacaccaatttctttttttagatagactggattatctaaaaatgatagactggattaagaaaatgtggcacatatacaccatggaatactatgcagccataaaaaatgatgagttcatgtcctttgtagggacatggatgaaattggaaatcatcattctcagtaaactatcgcaagaacaaaaaaccaaacaccgcatattctcactcatgggtgggaattgaacaatgagatcacatggacacgtggaggggaatatcacactctggggactgtggtggggtggggggagtggggagggatagcattgggagatatacctaaggctagatgacgagttagtgggtgcagcgcaccagcatggcacatgtatacatatgtaactaacctgcacaatgtgcacatgtaccctaaaacttaaagtataaaaaaaaataaataaataaagttattggcatggaaatgagaaaaaaaaattttaaattatactttatgttctgggatacacgtgcagaatgtgcaggtttgttacataggtatacaggtaccatggtagtttgctgcacccgtcaacctgtcatctacattaggtatttctcctaatgctatccctccctaagcccccaaccccgacaggccccggtgtgcgatgttcccctccctgtgttcatgaataacaccaatttctataagcaaagagtctgaatgggtgcatgct

SEQ ID NO: 2609 - DNA, 1407 bp, Homo sapiens
atggtgccagcagctgttggcgatgtatcttgcaggttcaaacctcatggagaagaacctgatgtgggctatcgagttgtaacagacaaaggatttaatttttcaccagcagatgaagcttttgtttgccaaaagaagaatcatttccagataaccattcacatccaagtttggggaagtccaaaatttgttgaaaccgagatgggcctaaagccaatagaaatgttttacttgaaagtttttggcactaaggtggaagctaccaatcaaataattgctattgaacagtcccaagcagataggagcaaaaagattttcaatcctgttaaaattgacctactggctgaccaggtcaccaaagtaacactgggacgattacacttcagcgaaaccacagcaaataatatgagaaaaaagggaaaaccaaatccagaccagagatacttcatgttggtggttggactgtatgctgctaaccaagaccagttctatctgttgtctgcccacatctctgaaaggatcattgtaagggcctctaaccctgggcagtttgaaaatgacagtgatgcattgtggcagcgaggacaagttccagaatctattgtctgtcacggtcgagtaggaatcaacacagatgcgccggacgaagccctggttgtctgtggcaacatgaaagtgatggggaccatcatgcatccctctgacagccgggcaaagcagaatatccaggaggttgacacgaatgaacagctgaaaagaatagcccaaatgagaattgttgaatatgactacaaacctgaatttgcatctgcaatgggaataaacactgcccatcaaacaggaatgattgcccaggaggtgcaagaaatcctgcccagagcagtaagagaggttggtgatgtcacctgcggaaacggagagaccttggagaacttcctcatggtggataaggaccagatctttatggaaaatgtaggtgcagtgaagcaactgtgcaaactaactaacaaccttgaggaaagaatagaagagttagaaatatggaacagaaagctggcccggctaaagcggctcagtagttggaagtcatcagccagtgaagcaagcacaatcagcccaatgaacagcagagtgtcctggctttgtcacatggggcagctgccctccactggtgaaggcaaagggccaatgacacagcctttctgggtacccatgctcgcacctaatacatccctggtaaccacaccggcctccttacaagtacctgaaattactttctgtgaaatcctgccgtgtcaggagacttattgctgccccatccggggaatgaaagaagtctcttcaagtcctgtgcaaagacaatctgaggagaaggaattccatcagaggcgatggtcaggtaaatga

SEQ ID NO: 2610 - protein, 462 aa, Homo sapiens
MVPAAVGDVSCRFKPHGEEPDVGYRVVTDKGFNFSPADEAFVCQKKNHFQITIHIQVWGSPKFVETEMGLKPIEMFYLKVFGTKVEATNQIIAIEQSQADRSKKIFNPVKIDLLADQVTKVTLGRLHFSETTANNMRKKGKPNPDQRYFMLVVGAANQDQFYLLSAHERIIVRNPGQFENDSDALWQRGQVPESIVCHGRVGINTDAPDEALVVCGNMKVMGTIMHPSDSRAKQNIQEVDTNEQLKRIAQMRIVEYDYKPEFASAMGINTAHQTGMIAQEVQEILPRAVREVGDVTCGNGETLENFLMVDKDQIFMENVGAVKQLCKLTNNLEERIEELEIWNRKLARLKRLSSWKSSASEASTISPMNSRVSWLCHMGQLPSTGEGKGPMTQPFWVPMLAPNTSLVTTPASLQVPEITFCEILPCQETYCCPIRGMKEVSSSPVQRQSEEKEFHQRRWSGK

SEQ ID NO: 2611 - DNA, 3216 bp, Homo sapiens
atggatgtggtaggcgaaaatgaggccctgcagcagttctttgaagaaaggcttagagttgagcagagagaaagagatgcacaacacataattgctatggtgattgaaataaaagcacatacagctggcagtggggtccgggaatgttgtctgaattctctgggcgtcactgtgtgcaccaagtgtgaaagaataaatcaagaagagggccttatcactgttggggaaagtgatgaagaaagctgttggatggaaataagaaaagatctttatataggactggcaggtgctcagggagccaatggtactctggagaacccagccctggacacaagtctgttggaggaatttctgggcaatgactttgatttgggggccttgcaacgccagctcccagacaccccgccctattctgcatccgactcatgctctcctccgcaggtcaaaggtgagtgcgatccaccttcagcacatctggcactgttgctcttcctcctcgactctgggccctgctcctgcgatgccgcccatgcacccgctgcagagcacctctggaatgggcgactcctgccaaatccacggaggctttcacagctgccactcaaacgccagtcatcttgccacccccctggaccaatccgtgtcctcccatctggggataggttgttcttaccctcagcagcctctgtgtcacagccctggagcctcattgcctccaaccaagaagagaaagtgcacgcaggcactggaggactccggggaatgccgagtgtgggcctgccactgcagaccgaccccatggtaagagctgattctctgagggacctttggtgtcagctccagcgtgggctgtggaggccttctgtggatgatgacttcaccctgtcagtcaagtcccacccatctcctgggaatgggcttttccctcatgtccgaaaatggtgccagcagctgttggcgatgtatcttgcaggttcaaacctcatggagaagaatgagaaaatgaggtcagcagcacacctcctacccccagcacatgacacttccctagtcactctgccttacacatggcccactcatcagcttcatgctgctagcttgacaagtaggagtcgcagcagtgaagtccaggaccctgacagtgagggacagaacagaatgcctacagaccagtgctctcctgctctgaagtggcaaccatgccatagtgttccttggcacagcttattaaacagtcattatgaaaaactacctgatgtgggctatcgagttgtaacagacaaaggatttaatttttcaccagcagatgaagcttttgtttgccaaaagaagaatcatttccagataaccattcacatccaagtttggggaagtccaaaatttgttgaaaccgagatgggcctaaagccaatagaaatgttttacttgaaagtttttggcactaaggtggaagctaccaatcaaataattgctattgaacagtcccaagcagataggagcaaaaagattttcaatcctgttaaaattgacctactggctgaccaggtcaccaaagtaacactgggacgattacacttcagcgaaaccacagcaaataatatgagaaaaaagggaaaaccaaatccagaccagagatacttcatgttggtggttggactgtatgctgctaaccaagaccagttctatctgttgtctgcccacatctctgaaaggatcattgtaagggcctctaaccctgggcagtttgaaaatgacagtgatgcattgtggcagcgaggacaagttccagaatctattgtctgtcacggtcgagtaggaatcaacacagatgcgccggacgaagccctggttgtctgtggcaacatgaaagtgatggggaccatcatgcatccctctgacagccgggcaaagcagaatatccaggaggttgacacgaatgaacagctgaaaagaatagcccaaatgagaattgttgaatatgactacaaacctgaatttgcatctgcaatgggaataaacactgcccatcaaacaggaatgattgcccaggaggtgcaagaaatcctgcccagagcagtaagagaggttggtgatgtcacctgcggaaacggagagaccttggagaacttcctcatggtggataaggaccagatctttatggaaaatgtaggtgcagtgaagcaactgtgcaaactaactaacaaccttgaggaaagaatagaagagttagaaatatggaacagaaagctggcccggctaaagcggctcagtagttggaagtcatcagccagtgaagcaagcacaatcagcaatatcacaagctcacaggagccggctctgctgcccacagcctcctcctcagcacctaatacatccctggtaaccacaccggcctccttacaagtacctgaaattactttctgtgaaatcctgccgtgtcaggagacttattgctgccccatccggggaatgaaagaagtctcttcaagtcctgtgcaaagacaatctgaggagaaggaattccatcagaggcgatggtcagaagacaaaagcaaatcagttttggcaagaaatgcactcagcggccctgactgggagagtgactggattgatacaaccatcagttctattcagattatggaaatccagcaaataatagatcatcagtattgcattcaaagcctccagtgcggaccacctgttctgcttgctcatttgcttgcaaccatcatggccaccctaaaatgtagtcttggaccccaagtctccattaacttccagcttggttctccagggctaaatgactcagtatctcaagttttaaattcctatgaaagagaatctgactggtttaaccttgctcagctatccatgtggggtttaagcagctgtggccagggaaatgtagtcggtctgagtttccaaccccacccagagattgttggtttgagaatcagcatagtttacctggctgaacttcgcgttattggcatttctgtcccccagaacagtaaggaatttggttaccctgggccatggctggggcactggttagcagctgcccctcctgctcattttgcggctctatttcaacaagacttgaaaacctttgtcttcagagaactctccggctctaagcttttgtgcttttgtttggagcagcctgttcttgtacttgtagtttcaggtctgtttctgcatttgcagggccctgga

SEQ ID NO: 2612 - protein, 1062 aa, Homo sapiens
MDVVGENEALQQFFEERLRVEQRERDAQHIIAMVIEIKAHTAGSGVRECCLNSLGVTVCTKCERINQEEGLITVGESDEESCWMEIRKDLYIGLAGAQGANGTLENPALDTSLLEEFLGNDFDLGALQRQLPDTPPYSASDSCSPPQVKGECDPPSAHLALLLFLLDSGPCSCDAAHAPAAEHLWNGRLLPNPRRLSQLPLKRQSSCHPPGPIRVLPSGDRLFLPSAASVSQPWSLINQEEKVHAGTGGLRGMPSVGLPLQTDPMVRADSLRDLWCQLQRGLWRPSVDDDFTLSVKSHPSPGNGLFPHVRKWCQQLLAMYLAGSNLMEKNEKMRSAAHLLPPAHDTSLVTLPYTWPTHQLHAASLTSRSRSSEVQDPDSEGQNRMPTDQCSPALKWQPCHSVPWHSLLNSHYEKLPDVGYRVVTDKGFNFSPADEAFVCQKKNHFQITIHIQVWGSPKFVETEMGLKPIEMFYLKVFGTKVEATNQIIAIEQSQADRSKKIFNPVKIDLLADQVTKVTLGRLHFSETTANNMRKKGKPNPDQRYFMLVVGAANQDQFYLLSAHERIIVRNPGQFENDSDALWQRGQVPESIVCHGRVGINTDAPDEALVVCGNMKVMGTIMHPSDSRAKQNIQEVDTNEQLKRIAQMRIVEYDYKPEFASAMGINTAHQTGMIAQEVQEILPRAVREVGDVTCGNGETLENFLMVDKDQIFMENVGAVKQLCKLTNNLEERIEELEIWNRKLARLKRLSSWKSSASEASTISNITSSQEPALLPTASSSAPNTSLVTTPASLQVPEITFCEILPCQETYCCPIRGMKEVSSSPVQRQSEEKEFHQRRWSEDKSKSVLARNALSGPDWESDWIDTTISSIQIMEIQQIIDHQYCIQSLQCGPPVLLAHLLATIMATLKCSLGPQVSINFQLGSPQDSVSQVLNSYERESDWFNLAQLSMWGLSSCGQGNVVGLSFQPHPEIVGLRISIVYLAELRVIGISVPQNSKEFGYPGPWLGHWLAAAPPAHFAALFQQDLKTFVFRELSGSKLLCFCLEQPVLVLVVSGLFLHLQGPG

SEQ ID NO: 2613 - DNA, 1009 bp, Homo sapiens
gctttgacgatagttgccctctatatacttagcttaaaagatcaagaccgacgtgtcccaaatctccctccaagcaatatcacaagctcacaggagccggctctgctgcccacagcctcctcctcagcacctaatacatccctggtaaccacaccggcctccttacaagtacctgaaattactttctgtgaaatcctgccgtgtcaggagacttattgctgccccatccggggaatgaaagaagtctcttcaagtcctgtgcaaagacaatctgaggagaaggaattccatcagaggcgatggtcagaagacaaaagcaaatcagttttggcaagaaatgcactcagcggccctgactgggagagtgactggattgatacaaccatcagttctattcagattatggaaatccagcaaataatagatcatcagtattgcattcaaagcctccagtgcggatctggaaattataattacaatattcctgttaataaacacacacccaccaatgtcaagttctctctggaaataaacacaacagagccattgatagtcttccagtgcaaattcacccttggaaatatatgtttccatagtaaaaggggaaccaaagggctggaaagccacagagaaatctcccaggagatgacacagggatatcagcacatttggagcctccctgtagccccattttctgacagcatgttccatttccgtgtagctgcaccggatttagctgactgttcaactgatccttattttgctgggatattcttcaccgattacttcttttacttctatcgacgctgtgcctaatttgttcaagtttggggactttaccaaagaaaaatactcaggaatacatttaacagaaacgaacatcctcttgcaacttcttttttcttctttgtaaaacatttacgtttattgctgaaggactttttcaggctttagcttccaacagttttgagacattaatgaggagaataaaatgtttgctgaaacttga

SEQ ID NO: 2614 - protein, 193 aa, Homo sapiens
MKEVSSSPVQRQSEEKEFHQRRWSEDKSKSVLARNALSGPDWESDWIDTTISSIQIMEIQQIIDHQYCIQSLQCGSGNYNYNIPVNKHTPTNVKFSLEINTTEPLIVFQCKFTLGNICFHSKRGTKGLESHREISQEMTQGYQHIWSLPVAPFSDSMFHFRVAAPDLADCSTDPYFAGIFFTDYFFYFYRRCA

SEQ ID NO: 2615 - DNA, 95940 bp, Mus musculus
attaacatctgaagaatgagcctaatctctaaagagcttatggcttctggtaaatactttcattttgttttgccaagcgtggtctttaagcgtgccaagcacatgcctttaatcccagcataggaggcagaggcaggctattcctgtgaatttaaggccagcctggtctatgtagtaagttacaggcagccagagctaaagaaagaaaccctgtctcaaaataattataataacttaaaatatatccttttaatagtaaagttttattaaaagtaagtacaaggaagttcaaatgaactctgatttttacttctatatacttgtgaaaatgctgcagtcttctaaaagttatgtttatttatttatttgtgtggctaggttcagaggacggcttgtgggaactggtcctctccatctcccatggcgtcccctggaccaggttgccaagcttgtaagttgttactccaagtgcctttacccactgagccatctcacccgtaaaaatgctaatttcttaaaacaattgtttttgggggtcctgttcttctagggccttaagtgtatatgtcataaacacacacatcgcctgcatatcgggttttgtttgtaggaaggtaggtgatcttccacaggccctgacagtaaaacagatcatttgccgtagtcgtgtctgtggagaggaaggagttagggaattggaatcattaatggtaaagaggtgctttcagattttacccgcacacccatcttataacaatcaaaacaatgtcatttactacataaacagccattaaactgaaaaataaatgattcactattacctgtgctatctagatttcacactgcagggcttgtagggtaaatgctggcgtggtggtctggaggagagctgaaatcattcttcaagttgtgagcattgactttagtttctcttgggataaagtatcctttgttagctcttttacccatattttgtatccagtcacagtcactgctaacattcagtgggctcttctagtattcctctagatggactctgttagcattactttgttaaactccagcagaaacacaagttaggcgttttcaattatcctttcacagttaaagaaatagaccaccagggctggagagatggctccgtggttaagatcactggctgctcttccagaggacctgggttcaattctcaacacccacatggcagctcacaagtgcaggtaactccagttgcaggggtctggcaccttcacacggacatatgtgaagtcaaaacaccaatgcacataaaataaaaataaaattaaaataaaataaaaataaaaataaaaataaaataaaaaccactatgggctggagaggtggctcagaggttaagagcactggctgctcttccagaagtcctgagtttaattcccagcatccacatagtagctcacaaccatctgtaatgggattcgatgccctcttctggtgtgtcggaagacagcgacagtatactcacatacatacaataaaatgagatctaaaaacttgaaaaaaaaaaaaagaaacaggccaccagctggtaagatggctcagtggtaagggttcctgatgtcaagacggaagatctaagccctatccctgggccctacgtcgtgagtggaagagatactaactctctctcaaattgtcctttggtctcttcatgtgcactgcggggcaaaatgcctacttccagcaacaagctaaataaatgtgattttaaaataaaagaaactggccagagaagtttgccctgcacatactggtcgcacagctagggtcacacagggctaagccgcctctctctggcagtgtaacttgggattctgcagaggagagagagagagaatggaactggtctgtggtttatgattttgactttatttcatagttggcatatacacttttgtctaattgggaggtgactaaaggcatctggggctggttgttggttgaaaattactgttattatgagcatggttattatagtatttagtaattatgcagtgctttatacttcaaagccctgcgctttataatcatttattagccatgtctcaaaacatctctatgatatcgtgtgtattttggaggaggagctgaggcagagagagatgggtgaccattttaaaaacaaagtgaaagatataggttgtgtatgtgtttatgtgtgtgtgtgtgtgtgtatgccggggagcgagggatcagaggacacccctcacaccatgtctgctctaggtatcaaattctggtgatcaggcacacacccttccccagtgagccatcttgctggcccctgggccaacactttaatttaaaaaacaaacaaacaaacaaacatacatacaaacaaacaaaatcaatgaaggtgaaatgtaaccctgcctctttcaaactcatttaaataactcagtcctggcaacaagtcggttaattagtttaacccttttgacggacattatcaggtctaatatgttttcttaatatttaattaaaaataaaatgcaaaaacatgttaaagattgatgccccttccctctgagggttgttttgttttgtttttctcgagacagggtttctctgtatagccctggctgtcctgtaactcactctgtagaccaggctggcctcaaactcagaaatccgcctgcctctgcctcctgagtgctgggattaaaggcgtgtgccaccacgctccgattcaatcttactctctcccatttctccacccggcgactacagacactggttctccaatagcagtctggtgttgcattggtttacatccattgtctgggagaaaaacaaaataaaacaaaagaaaacagactttgctcactatagccatagaactccgtgataactttcagttagcggcaaaaacttcaccacaagcattatatgagaatttcagaaaattttaagatgtctggcggttttcagaatgaagccgacaaacaagtcagtgtgcggtgggcagcagagggaggagctccttgtgggtttactctggatccctctagacagccctggagcagataggcgcattcttccgtaaactgagcatcttttgggtgggaggcaatcacggctatgtcacatggggaagactcaataaatattagtttagtggttaagactaaaggtccagagacagattgtctgtcttcttatcctggttctgttccttgctatctaccttagccagcagcaaggctgctctccactcggaacaaagggaacagcgtgatcagatttcagtcttacacagttggttctaagtatctgatattgtcttctctctctctctctctctctctctctctcggtttttcaagacagggtttctctgtgtagccctggctgtcctggaactcactttgtagaccaggctggcctcgaactcagaaatctgcctgcctctgcctcccaagtgctgggattaaaggcgtgtgctaccatgtctgggtgtcttttctcttttccatacagctgacaactagtatctacaccaccaccccccttaagtcattggtggcagggatctggggatgtagtagctcagttattccagtatttatctaaaatgcataaaggtccatctccggcacctcataaactcaggtttaagtcgtcttttgctacatagtgagttcaaagccagcctgggctacacagtttgttcaaaaaacaacaacaagggcgggcgaggtggctcatcaggtaagagcactgactgctcttccaaaggtcctgagttcaaatcccagcaaccacatggtggctcacaaccatccataatgagacctgacaccctcttctattgtgtctgaagacagctacagtatatttatgtataataataaataaatctttttttaaaaacaacaacaaaacaaaatccattggtcttgattaatttgttgtctgtgcttgcctttttgggatctcaagagctggcatccaggaaaactactttcaaactctcttaaagtactttggaataaatagttatgacaagagtctgtacctctttcttttaaaatatctatattctcttctgtcctggtggcccccagacttagtgtctacagtgaacacttatgagagggagcaactcactaaccttgacgaggaagacagtggtgccttgtgccagatgtgtgccagatgtgtgccagagtagtttaagtttcaagagttggcagaaaaaaaaattttgtttttgtttttgtttttgttttttgttttgttttgttgagacagggtcttgaacccctggctgtcctgcctctccttctcaaattctgaggttacaggtaagcaacagcactccagtgctttaaaaacaacaacaacaacaacaacaacatcatctttactgtggtcctggggagtcaaacccagaggtttgcccatggcaggcgagcagtcttcaggctgagctatatcccgaacctcagttttaaagctttgaattgatacagctggagagatggctctgaggttaagagctgggtggttcttgctgagcacggtggttgggtgtcctcaataccagcacccaggaggcagagacaggcaggtctctttgagtttgaggtcagcccggtctgcacagtcagccacagtccagccgggccagctagggagacatagtgagactctgtcccaaaaagccagcaacagaagagatggccctgtggttaaaaggccctggctgctcttttggaggactgggtttgattcccagcactcacatggcagctcacaactgttgtaactcctgttctgggggtggggctgggatggaagtaggggtggggttgggggtaggggtggggctgggggtgagggggatgccttcttctgccctttgcagtgcatgcagatggtaaacagaaaacactcatccatataaaaacaaccaaccaaccaaccaaccaaaaaacagccacaacaaatccacaaataacaataactaccactactaccagttacctccaagaagaccatgaactgctttcccagggaaccccaagtgtcccagggaccctaagtgttcccaggacctatattgggtggctcataattgaaagagacttaagttccaaggcatcgaaggcctctgaactccttgggaagctgctctcacgaatatacgtagccacacacacagacacacgcctacacgcatcattaaaaataaaataaatcttgtgggtggagaaatggcttagtggttaggagcaaaggatgatcttacaaaggatctgggttcaagtctcaggacacacatggtggctcacaaccacggataagtctagtttcagaagatccagtgtcctcgtctgacttctgtgggcacagagaacaaatccatacacatataaaaaaaattaaaaagaggggaaaaaatcttaaaaaaaaaccttttgagcttattttatttttatatatttatttattggtacaaaacgatgggtcacatacgttccagagccattttcaaacctttctgcacccacctagaataaaacaacttatgtattgtacacagttcgagtagcatcctttgcagtacatttcaagcacgtgtgccaaagaaaggatcaaagttgaggtaaacaatgtgtgaccatctttaggtttaaaacgaaacaaaacaaaactctagttaagcatagtgacacttgtccataatcccaacccttgagaggtggaggcaggaggattaagaattggaagttagcctgaacgacatagtaaaatcctgtctgaaaataactctgcaacatctaaaaagctcttaaggctgagagatttgacagtatcagagtaggcagtgaaaaatgtctcagggaagtctggagcccaagactggtaagctgggtgttaaaggcccaggcctgtgttaaaacaaacgaaacataaacaaagaccgccattatctccaggcctggccaagggtagacgctgaagtgcacagctcttttgtttaacaaactgccttaatggatctgggaagaggtgctttgcagagactgggtcctcgccttgtccgttccaccaggcatggggtctgtgtgattggcacccccttgagcaacactctggctgtcttctttgtgaacagtaccccctgggattgtgcaacctggccattaagtcagtaaagacgacccggagtctggcctgagataaagattaagacctaaatccttctacataataaaataacaggaatttttaagtcttcattggggcggggtggaggggtgggtgggtggaggcaggggggtggaaggggcttaaatggaaagattaaaaaaaaaagcaagctttggattaaatgtgtgtttagggtgaaggtgggctagcatttggtaccaaagtggggggtctgtgaaccttgtgtcacttaaattacaagtttgacagggtagcggggaatgaaacccagggtgttgcgcatgttaagcctactatcattgaggcatacccctgctccttgatttttagtcagggacttactatatatagttcaggctgcctaaacactggggtgacaagtacacatgtggactgcctccttctgctctctatgtagtcaacaacaacaacaacaacatgtaagagcctctatcagcttctatatcctttaggagacactgtcaaatgaagttaaacactttttttttttttttggaaggggagtgggacgctcttctatatgaatcgggaagaaacaacaaaaactccaaagcccaggcttacaaatgtgagcagtgtgtgtctaaacgcacaatactatactttttttaaaaactgtttttcttcaaagagctgaaagcacttttattccctcatttcttctgacattctagtgtgggcagggcagatttatgatagcattatttatagatgggagaaattgaaaataaagattaaatcgcttactcaacgctgcgtggctggggtggtggagccgctggaatctccttctgcaggctccagccacaaagtgggacgcgcaagagctttggaattagagggatctttgagcaatgctgtttctaccccgaacaagaatgtggccttaagtcaattacttcacctaggcctcggctattctcatttgtaaaagtaagaccataaaacctcacagcacatcgaagattaattcagaaaacgcatgtaaagcctccaacacggagcaggtttcaaggaagatttgtttccccacccccacccccacccccacccccacctcagaatcatctggttcagtttcagtaaaaaaaaaaaaaaaaaaaaaatcccccattaaaactcactttccccatttttatctcccgtgaaaagaaaaaagataaataaaaatgttccaaaatgtcgtttagttaggcaggaagcctctctctctctctctctctctctctctctctctctctctctctctttctgactaggcgtgtgtaactcagtgacatttgcttccaatggccttagagacagatttgaatccgcagcactacaaaacaacactcctctcctcccaacaagaacaacaatcccgggttgccgaaggtcctgagttcaaatcccagcaaccacatggtgactcacaactacccgtaatgagatgggacgccttcttctggtgtgtctggagcgagcagggactgagtgagcagagttgaccggaataagtagaggtcctaaaattcaattcccaacaaccacatgaaggctcacaaccatctgtacagctacagtgtactcacatacaataaataaataaatcttaaaaaaaaaagaacaacaatcccatgctgtagatttaccacaattaagaaaagaatatgcaaaagataggctactagaatgctgtagttctttaactggacgtcttatcagatgcgaggtgggggcggggaggttgcggaggaggggctcttaaaactagggttgttctgtctaatctttggagttacagctttacaaggtctgggcggggcctggcaatttgcatctttaatacattcccaggtgatgtggagctgccaggctggccggggacacacctcgagaagccctaccctgggtgagtgaaagggttggggatggagcccagcaatttgtttaacaagccctcccggtgattgcgaggcattttcaagcctgagacctgctggcagcgtggtgaaaagcacctgagaacacagcttcacttttaaatccaggcttcaccacttaccagttacgtgacaggctgtgattgagggttcccctcactaggtctctgggctctgtgtgtgtgtgtgtgtgtgtgtgtgtgtgtgtgtgtgtgtgtgcgcgcgcgcccccgcacgcgcgtgtgctgcccttggcgcgcactcgtgctcgtgtctgggattggggggtggagatggtaaacagctagagacagcctaagttttgtctgtgcagggtcttttttttttttttttcttcttcttcttcagtctactaggaggcatgaaaggctgcttgaacttgagaattctggaagtgtttacaaacacttctgcaattacataaagcacaaggcagtactttatatacagcaatagtgatggcattgtttgcatcttaaatttgtaataaggggttttcttttactctgcctttctcaaagcagattgtcttaacacttgtccctgcagtatttaacagacactatgcatgctaagaaactcttttcttttttgctcttccttttttcctcctcctctccttctttttggacaagagtcttgcttcatagtcctggccacctttgtctggaaactcactgtaaagcttaggctggctagaaactctccggactctccctgcctcagcctttttagactgctggaaacaaaatagcttgtcaggtttgagcccttttcttccatgtggggctttgcttcatactgaaaacctgcctttaatatttgatgtttcttgattttgtgacagagcaaatcttttaagatcgtctcacttctttgcctgacactgactctgtaggctctcatactgtctgtctttggtaagtttcaaaagtgcccaggtcttctctattgctagttactggttaggtataagaattgtgcggacgtactcagtcctgggtactttgaaatgcttactattgcgttatgcattatattatttttaacgtctacaatccagagatgaacacgacacacacacacaccagggtgaaatgtaaagaaacaggatcctggcactaagattgcatagcccatcatctcagcctttgtttaaagtgcaaaggatgacccatatagggaaataatttggctcccgtctttgaataatttgaaaagtcttgtttggggcaaatgagagttctacgcataccacaaattaaagtaaaaccaagagccagcatatgtggtaaagtccgatactttggccgatttccttctctgtaagacacagagaataaaagcaccaatttccaggagtttgaaggttattaaatgagttaacgccaccgaatcgcgtaataaatgccctgtctaccacgccgtaagccttccttcgataaatgtcaactgcattttcacgcgggacagaagcgagaaaggataacaccgccggccggtcggcaagccggtgaatgctccgggctcggcgaaattagattctccgggcccctgtagaattaagtagaagggagcgatcctaacaggcgttaaaataaggggtgccagcggtagctcggggcccgcgggaccacaggggttagcaaggagcccgggggcggggctcgggggcgggtccgctggcgcccggagcagaggccacgcccctcccgggagggctggcagctccagcctgggagcagttccggtgccaaacccctgccctcccccgctcccccggaagtgcttgtctagggttcgggctggagagaggccttgtagacacaggcgccgaggctccgagcagggggtcaggtcgcggggagagtgaggagctccgcggctgccaccccgcgcccctcgcagcgccttcgcgccgacggtgagtagccggggacgccgagcggggcctgcgctgggcgagcgagcctcggacccggctgtccgctgcaggttcagccgtcggggatccggggaaggggttcgtcggccgccgcggagcgcgcgcggcccgcgggccgggaaggggcgcgatgcggggccgcggagtgggcggggcgcagccggagcggggttcccggagccgcggccgcccgcagaggggggactccgtagcggggcccggccgtcggcgctgcgaccccctctctgcatcgggcaagtgggctcggtgcctccgctgtggggtctgtgcactcggacgctggggaccgggacagccagactgcactggacatcagtgtccaactttcgtcgcctcttggatctgtcccctcttcccgtctcagtaattatcctgtgtcccaggggtgtagtcagtccgagggtggggcgctccctgtgtggatgctggcgatctcttgcggggcttgcgtcggggtcgccggaggttcgatttggactcggctcgaaacttaactgggtctggatgcctgcgtagggtcggtcagtgaggcagtaccattcctcgaagggtctttgctcccttgcaaactgaaactgttgggagttacttcttaaaaacaaagatttgaggagattcgtagattcagaggagtttccccgtgttcttgctgacgttaaaaaaaaaaaaaaaaccatgctattctgtaatcagccttccgaattcctgcgctcatccgaagtcacagttgttaagacttcagtcgggaccttgcacaagttgactgcaaaaggctggagaattgtatccttttttttcaccccagtttgtttactttcatacttggaactgtcatttcttgagctaattatatatatgtgtatatatgtgtgtatatacacacacacacacacatatacacacacacatatatatacacacacatatgtatgtatattatatgtatatatatatatatatatatatatatatatatatatataatttccctcagtttctcctcggaggttcttcgtgtagtccagttgtgggaacgcggggtgggggtgttcccacagcgggacagaggtgtttgttgatttaagcatatgaagtgtttaactccaataaactgagactttcctagagaagaaaatcttgtaggcactgttagtaaactgagtttaggtgataaactacggataaaaggtttgtaggaaataatggagctattttccgcttttattgagttttaaattattatcagatagtttatttgttgcaaatgaccttgtggtggtgtcaatatacacaagtcatcttcatgaaaccagtgacattatctgcccttattatgcttacgttaggatttatactgtttctctctctctctctctctctctctctctctctctctctctctctctcgtactttctctttcgactactggaagggaagatatcatgaatgaggggaatgatttgaagtgacgagttgcatatactgtcttatgcaaaagaaaagtttatttcattaaaaaacaaattctctgtgtgtgtaatgccagaggtgaacctagactacccagcaccatgatcatgatgatccttttgagacagggtctcctgagcctggagcttgtacttccggctgggctgcttggccagcaagccccagggaccgtcctgtgtttgccccatgtccccagtccaggtctactggttatcggcacatggcccagcatctagtttataatggaggtgctgtcggtgccagttcaggttctctcactttctcagtcagcaagcactcgacgtgggagcagtctccccagcccctcaaatctctgtcaaggttgttgataataaacaaagggggtgtttttctagcccgtgggaaagtgtgagtgaagataagttgtagtgtttagactcggaatgatgcggtagccccttagtgtttgaagaactcagttgttcagagcccaagattgggatgttgaattaaagtctggaaaatgagtcaagttaggtttgattatgtatttgttctctggttatagtgtgttttgaagggaaaaaagtatgggagttataaaagcaaaaaaagggaattggtaaaaatcaaatactttcgggcattataacttttaactattgctcaagtcaattcaaatgacattgagcattttctatgcgtcagactctttagtgaaccatgtagggaaaacaaagccaaagccattagaacttgggattcatgttttgataattttccaagtgtgttgaaattgtgaagacttgaattgcactgtctaggaatgctaaacctcccctggattgggacttaatgggaggggggggggctgttgagtgcttcacgaagaaccggtgctaggcatgctgcctcaccaagaggaagctgggctgtggaatgtgaacctagtgggatgtaagatacttgtacaaaagtttacagtataagtaagtatctgtctgaatgtggtgtcatgcttgcagtggcaaaggagtggcaaggtgaccctgttcacaacaaaagactctgaaagcaaaaagtgtgtgtaaatccttaaccacatagatgggcttatctgaagtttgcacttgtacaaaagtgaagtgtttgttataacttaggtcacgtgtcacagttgagacgggaacacttacgggtgtgggccaatactgttagttactgggtgctgagttctgttatggttgtgttttctcaacaacatagaagcttctttcttttagacaggggtctccctgtgtaggcatctctcagaatagtcaggataccgccgtgtcacacgtgtccagtcattccccttaagacttatgtggctagcagaactgtctatttgaagccagatctatctgccttgtcagaagctggtagttctacttcatggtgttgcttcccaatgagcttctttttatttaatgtagtttctgagacagggcctcctatctctcaagactttggatctgcagtctcgacctccttcctctgcttgggattacagacatgtcccaccataccctgctcttaaactggcaatcttaagttgactgagagttaaagtcttctgaaacaaagattcgggaggtaggattcctggataaagaaggcctttcagattaagagaacgacagttttggagatgagaagggttcatgatgtggaaaaatgttagtgtcccagatgacctggatggtttattttggaattagagatgaagtttgcaatttaagtcaaggctggattgtggagcttgcttagaggctatatttagaagctcaacattttgaagaaaacaagaagtgtgtaccttgcaatagtttagtgtgcagaatgatttattatggcaagctattaatatacgactgtgcatactgtgagtggtgctggtggagcgagaacgagggcccagcaggccaggaggagagctgtagaggaggcagggtggaaagctacattttctaactgtggctgttgacagttggaccgttaactaggaatgtgagcaaggagttgcataattaggtttcattttttcaaagatacggtagccttaaatccacagctctgccctgacctgcagagaaactgtggttaccaatgtatgctgtcaggccaggcgtgctgagggttttttaagttattattattaaatatacttacacacaggaactatttagaagctttgccaatgtaggttttcagttcgagagagaggtcagcgctattttatatatatagaaaatacaaatagattattcagatagatatgctagttgaatctgtgtgaggagatgaaagtgccaagggagtgtgtagagggaaaagaaaatcacaacagcagctgcagagccaagcctgcatttaaaagcatgtgcttataacgaaagagacagtaagtagactgtagtgtacagtgggtaaggagtttggtaatctgggttgtttccttaaactataaattcagatggtggagaaagaaatctgttcattaaaattcctgtcaaggagctgttgagatgactcagcactaaaggtgctgtcgccatgtctcatgacccaaagttctatccctgccacccccatggtagaacaccagctttgcaaggtgttctctgacctccacatgcaggccactgtgactcaccctcttatcgaagacacacacacacacacacacacacacacacacacacacacacactgtctctcgctgtgtgtaaacaaacaaacaaacaaacaaacaaacatctgtctagttaaaaagaatccaatggggtttggagagatggcgcagaggtaaagagcactgactgctcttccaaaggtcctgaggtcaattctcggcaaccacatggtggctcacaaccatctataatgggatctggtgccctcttctggtgtgtctgaagacagctacagtgcactcatataaattaaataaataaatcttaaaacaacaacaacaaaaacaaaaaatcaccaatgtgctgtggtcatgcatacctttaattttagcactcaggaagcagaggcaggcagatctttgtgaatccctgtctcaaaaacaacaataacagaaaccctaaaaacacaaattaaattcattggaggcaggctgggaatgtagtttaactggtagagtttttacctagcgtgcttgagaccctgggctgtgggttacacccccagcatttcatactagctgtacctataacttcagcacttaagaagtggaggcagaagggtcccaggtcatcctcagccacactgaagttgaagcattgaaggctatgtgaaactggtttccaacacacacacacacacacaccccgtccttgcaggccccccaacaactaacaacagaatcaagaaatagaagctggcaagcctgttgtgccatcattcagtttgcagggagctcaggctcatttggagtcctttgggcatttgtctagtgagtgctgtgtggggatttagaggtgagtgtggtatttcatttatttttgtgtgtatgagtttcatttttatttcaatatttcaacctctgatattcaaagacattatgtgtgcctctcattacaatgactgttaataaagttaatattgcctttcgtaaaatggtacatatgtgtgtgtgtgtgtgtgtgtgtatatacacatttcccctctggttcttttataatacccttcttatgatgtgggagtcaagcccaagatttcaggcatctcagttaggtgatgcaccaccaaactttgtttccagcccaatagaagtacttttcattaacgtgaataattttattcaaatgttctgattaccatagaggaatgaaagaataagatactcatatctatcatatatgtgaagattatgctttatttcacatttttaaaagagttatttatttattacatatgagtacactatagctgtcttaagacgccccagaagaggatgtcagatctcattatggatggttgtgagccaccatatggttgctgggatttgaactcaggacccttggaataacagtcagtgagtgctcttaaccgctgagccatctctccagtcccccaaaatttttaatatgtgggattttatgtcttttgctttttggatagttaaataggaagaaattgtattttcacatataaaagattatagtagtttgagaatgaggctcagggttgtaactgtttaaagacaagtttggttttagtcagagttgctgctgaagcattttgctttcttcttaagaattagcatctttagcttttcaagaatatgcttttcactgcatcacaggcaccaggagatgtccagagagtcctacagcagtgtgtctgggggaagtggcgcagtgtgctttgtctgggatgattgctttagtttctctgagctcggtattaatagggcaaaggtcaggagttccagttagctttagtctgagtgatggccaaggatctacctctcactcccaccagctgtctgggaaaggccttgctcgtcattggtctcagacatggctagatgaaagtgggatgttaggccctggaaaagtgcagcttgatggttgcgagctgactctgggctgtacaaatcagaattaaaattcctgatctatgacttggggagtccccagacttcctctaggcttccactccttgctattggagagttaataactgttaacattgcatgcacttctgctgctttcctcttggggccctcgccaatagatctgtggttctcataagctgacgtgcgtaatagtgtcatgaaggtctgtcacactgttgccacttgttgtgtgagaggagaaatgtagtctgctttttaagaataagtttattgaatttaaaagataattcttttttttttaaagatttatttatttatttacttatttatttatttattattatttattattattattattattatttattattattatatgtaagtacactgtagctgtcttcagacactccagaagagggagtcagatctcgttacggatggttgtgagccaacatgtggttgctgggatttgaactccggaccttcagaagagcagtcgggtgctcttacccactgagccatctcaccagccctgaaagataactctttattttcgaaaattatcgttaattttaggattattttgaaggaataattttgaaagaaacatgtgttagttctttgatgaaatacattgattgtatagttggcttttttgtttttcaggtagctccttatgtagtgcaggctggtcttgaaccctctattagccaagattgtcctgaaacatgtgactccttgcctcgtctctcagttgcttattttacagaagtcagccaccattcctgtcgagagggacagacagatggatggacggattggggagggggaagggtgagtgagttcttgacagagtaagagttggcagtgctctgttggtctctctacccctttgaaaagatgatggttcagtgaaaactgagagtcgtggcttagatagcatttgagaagttggagaagactgctcatcttatatatttatgcacattcaagttagattcagggtcccctagaggagcgcacgatgactcttgaatactgtggcgcataatcctgcccctctcccagttagtacttgcggtgcttgcgtagtgcttgcacaaggagcagtgtagagcatctgcagggttttaaggcgagacgtggtggactgatgggatggggatgctgttgggtgctgctataagtcctcactgtgtatcagccagcaagataagcagctggcctttgacatagtggggtagcagagactggctttccttccttctcaggaaaccctgtgctaataaaatactagtaatcagagtggtccctaggaaagggctgggtgtgaagcactttgcatagtgggccatgaagtcctcttatccttaggatacacagcaggtattaatagatggttatggaagttggttgtctgatggaaagcttagcacgtccttgttcacttagggtaggggaagacacagggctttaacgcacaaacatactctaggctactgagttaagatgctaacattagttttctttgagtgctttagtttgggtaattaaataagttgggtgatttgtagaaatctttgagtttgtaataagatacccagaagaaaatgttgatgttaagcggcccaagtgccttggaggtgttgctgccttagatagtaaagatagtcttgttgtagacttttcctgtatatgattgcttgtggaaaactaaaaaaacaaaacaaaacatatgtaatttatttattttaatattgttgattttttttttctaccaagcattcccagtggcaaatgagttggaaaagtaccctaaaaaaatggaggggaaaatagcccaaaatattccttttataagctgaaaagtcttaatgtctataaagtcttatttttttttaattagcaaggattttacattttgtttcttctatgtgtgtaaacagagtataaagtactttcagctacaacatcttgttgatgatttgctttagagcttagaaagacctgatttttttgttttactctgtgtgtgtgtatgtatatgtgtgtgtgtgtatatatgtgtgtgtatgtgtgtatgtatgtgtgtatgtatatgtggtgtgtgtatgtgtatatgtgtatatgtgtgtatgtgtatatgtatatgtgtgtatgtatatgtggtgtgtgtgtatgtatatgtgtgtgtatgtgtgtatgtacatgtgtgtgtatgtatatgtgtgtgtatgtgtgtatgtacatgtgtgtgtatgtatatgtgtgtatatgtgtgtgtatgtatatgtgtatgtatatgtatatgtgtgtgtatatatgtgtgtatgtatatgtgtgtctatgtatatgtgtgtatgtatatgtgatgtgtgtgtatgtgtgtatgtatatgtgtgtgtctatgtatatgtgtgtatgtatatgtggtgtgtgtgtgtatgtgtgtatgtatatgtggtgtgtgtgtgtgtgtgtgtgtgtgtatgtgtgtgtgtgttaggtactggggatcgagcctagggctgtacatctgcctggcctggaaagcactctcatccctgaatgaactctttccctggtatctcagcatcccacgtgctgggattgtaggtatgtttctctatctagcttgggctcagtttctgtctgaaaaactgaaagagaacattttcccctctcccatctctctatattggtggagctaggattgaatccagagctttgtggcattttgtttgttttcaaactggctcctgctatgtagctcatgatcactttgaattcatgatcctcattttcttcctcttgagttctttgtgactgcgtgcgcatggttgtgcgtgcgtacgtgtgtgtgttcaggtcatataacggaagttgggtctctatgctctcctgtacactgtcccagctgcctaggaaacctgaggcagttcttctgcctaaacctctcaggcggagattatgggcatgagccaccctgtccgactttaatgattttattttaattcttgtggcagttgtaactattttatagttttgaaaattaagactcagagatagagttgataaaggtagcagtggaattcaaacccaaatatgtgcgagattttttttatcggctacagttgcttttgaaattgttgttaatgtttatatatttgtactattaagtgtacacataacatatccatgattgctggctaaaatagattactgaaaaggtagtaattccagtgtaattatatgtataataatatatatttatatgtgaatatagatacaatgtgtatatatgtataatagacataattgtatataattgctgagaacttaaggctcatatggaaggagtttctgctcttttgcataattttagctcttttcataaagagcttttatgtagcaaagaaaatctgcagcaagtaacagcagaagtgaggaagattgtctggtatcagttcagttctttttctggttgttaacaagcccttaggacttggataatcggatggagagttggctcagctgttaagagcacttgttgctcttgcagagacccaggtttgatccctagctcttacatggtgactgacaactgtccgtgtaacttcaggggtctaatagcttcttctgaattccacaggcaccaagcattgcaggcatacatacatgcaagcaaaacacccgtacacataaaaccaagtaaataaaactaaaaggtttggataagcagaggagttggcttattatattgatatcatgttgctatcagggtgtaatgctggttagtatttttcctttgggccagtgaattagtagaagctgggctcttaaccagattcatcctttttctttctcgggatttctgtctcccactgtagcactgatagtttgatccttttgactaagattatagggctgtgccacctctaccttttatcctgagttagtgctagaaggacttgggtaatgaacaagttagaccatgagtccatctactgatgggtgcagtaagtagctcttgaagggcactaggtttcaagagccgtgctagtgattgcatataaaatgaattcatagaaaagaagttttctttttcttccctccttcctcccctctccttccccattttttctttaaatcatttccttttgtttgttttttttttgagacatggtttcttttcatagccttgactgtcctggaattcactatgtaggccaggctggtttacaatacaaagacatcctcttgcctctgtctcccaagtgctgggattaaaggcctgtggcattctgcctggctcttttaattaagtaattaattaatttttaatttaaaatatgtttaaggcagggtctcactgtgtagtccaagctggccttaaacttgggacagtccttctgtcttagtcttccaagtgctgatactctaggtatatactaccatgtgtggctaaggcagatgtgagttatttctgtgatggaacactgtctagtgtactatagctcttgtctgtaggagccatttacatatttgaattaaatatgtataagaaaatcctatatgttcaatctgttttctgctcttcttttaatgaattgtgttaagtataagctttgggagttcaaaactattcagttaaatgtgatctgagagttaatactttgacttaaattgaagccttttattaaagcttgagttaaatagcgttcaggctactgactgccgtttttttctgatgttgttttgtgaatttgattctcatatcctacatatcttaacaaaaaaggttgggggctggcaagatggctcagtggttaagagcacttcttgttcttccagaggtcctgagtttagtttctagcacccatatcaggcagctcacgactgcctgtagccctatgtggcatatactttgtcacctccactctttctctgaacaattaaatacaaattttgaaaaaaaagttggctattaaatttattagtgagccaggcagtggtggcgcatgcctttaatcccggcacttgggaggcagaggcaggcagatttctgagttcgaggccagcctggtctacagagtgagttctaggacagacagggctatacagagaaaccctgtctcgaaaaactcaaacaaacaaacaaaaccaaacaaacttatcagtgggtatttaactttttttaaatattttttattattacgtattttcctcaattacatttagaatgctatcccaaaagtcccccataccctcccccccccccacttccctacctacccattcccattttttggccctggcattcccctgtactggggcatatacagtttgcgtgtccaatgggcctctctttccagtaatggccgactaggccatcttttgatacatatgcagctagagtcaagagctccagggtactggttagttcatattgttgttccacctatagggttgcagaccccttcagctccttgggtactttctctagctcctccattgggggccctgtgctccatccaatagctgactgagagcatctacttatgtgtctgctaggccccggcatagtctcacaagagacagctatatctgggtcctttcagccaacgcttgctagtgtatgcaatggtgttggtatttaacttcttgcttggaagattcataagaagtttcattgggggctgttgttcacctaggttgggagggaggggttaaggaagggtctctggaaaaagtaacatctgttcagagtcctagaagattaggaatagggcagttggggtggaggtatgtcatccaaagagaaaaactcatttggccccagaacttgtaagaacatttagtgttactgcgtctggagaacccctagagggctcgaggtatacacagccaccagacttgttgccgtggaattctaaatgtttcctgcagtgtgatggctaatttctattgtcagctatctagaattattttgattaggttaattacaatgggatgacctgccgtttgtgggtggcatcagttcccagcctaggattctgtctgtccgagaagcagaagtgcgtgaggtccatcctctgctccttgacagtgcttacagtgtgaccagctgtctgcagctctggggctgtgactccccactctcttggactgtgatgccaagctctggcacacgtaaaccctttgtcccttaagttgtttttgccagggtatttcatccctgcagcaggagaagtaactaaggatgggatatcttgtaaatgctagtggtgggcacatgaccagtcatgccttcaggagcgaaccgaagtgttctggaggcagaggagctccactccagctcagggaaaattggtcaggacataggggaacagtagatggaaatgataaagacagagaagattcagaaagtttacaaaatagataaaacgttgctattctgaataaaataattactttgaaggttttttccctttggtcctgggggtaaaatccatggttccccgcccgccccaagcgagacctgtgctgctcatccagacaccacaggcttggagatagttttctttttctttttaactagtgatttcatgttatttttaacccaacttcttttaagatttatttttatataggtgttttgtctgtacatatatatatatatatatatatatatatatatatatatataaatcttatataaataaatctttactccagaagagggtattaaacctcatgggactacatttgcagatcattgtaagccaccatgtgggtgctgggcttgacctctggaagaatagcctgttctcttaaccactgagccatctctccagcctataaccaatgatagttcttcaactatcattataagcaaaagcaatattgaacagtataacttcatatgggatcacataactgtattggaaaagatttggaagtagcgaaaggtttctgagtatacagcatgcaagaatgaattgagacccaagcatgtagtctgctctgatcatgtagcacagtcactcttcaatgtgtgtgccagtgagccaggaaatgccagtgagcgctccctaaaacaccttggcgcagattgcagagtgcttcatggaccaggcgtggggcgtacgctgcccctacaaatgattctactctttttttttttttttttaagatttatttatttattatatgtaagtacactgtagttgtcttcagacactccagaagagggcatcagatctcattactggtggttgtgagccaccatgtggttgccaggatttgaactcatgaccttcagaagagcagtctgcgctcttaactaactgctgaaccatctgtttagcccagaagattctacttttatagaaacataatgagctcattacagaacacaggctttgaccactttcctaccttcattctccagaatgtatcaaattagaacaactttggcttatattgggttagaaagcttaaattaaaaaaaaaatctagagttgctgatataaactttattgaaaaaacaaaagttaagtggggctgaagagatggctgggtggttcagagcacttggtgtccttgaaaaggacccaagttcagtttccagcacacacagtagctaagagtcatttgtaactccacttccaagggatttgatgccctctcctggcctttaagagtaccagacacatacagcaaaacatgcacatacaatgaaaataaataaatcctttaaaaatagttaaatgaattttggtttgggagtaggacagaatttccaacaaattctgaaatggcctaaatgtatttatgccagaaaaactgaaagataaaacagcggcccacacatacacaatagcagcaatgaagtgagcacaccactgccatgctgcacagttggaagcttcctcaaagctctgcgatggacatgactagcgctacagggaatgaacagacaagtcaggcacatagacagaaaagacaggcttgggcgggccgagcactgatgcaggtggaaagccagggaagtcagtgcattccgtgcacatccaaatgggtaggaggtctgaataaggagagtgcttactgtctgggcaagcggttagctaatcctggtgagggtctcttaagcagagcagcctcagttgcagtcatctgggaggaggaagctgtgcctgacaggttttgcacacactgtcagcatctgtagtactctgacttgggagtcttgccattcctgtgggtctcagggctgtgctcagagcagcagtacacattgactcaggacttcatttgctttccactttgatggctataaaattaaaatatcagtcaactctggaaaacattgaagaggctctacattggcagtgtgaatgattcagccaacatttagttatttatgtaaaactaaacaagcatattcatctcattagtatgcagatttacttttgctttaaataaatggtaaaataggtataccaaagaattgttttggagttatatattatcggtaactgtttggttttcatgtctgctttatatatgtaacatatctgagatcacattaaaatttcttgggcaaaaaggggtcatgagcagaatcaatttaagaagccagacttactttagtctgtgcttagttttgcttgctgcattaaaaaaagaaatagtaatttctatgtgaacctctagcctttgtacctgctagataataaatactacaccatcgagctttgccttgtgcctatattaaatatttccgtaaaacagtttatcattcttaatttttgctgttacaggaaaatttaaagaaaatatagttgatataaaagtttcttcatgtttttaactgttactttaggccatattcccaggtatgtttttactttttagatgaatggctatcagtatttggaacattggattaaattgcttttcaaaagtatgctcttattaatgtctgctgtccttgttagatcactagtgtgcctccccttctgactcacctcactgtctcattacagaatgcatttctttctttcctttttttttttttttttttttaaagatttatttattacatataagtacactgtagttgttttttcagacacaccacaagagggcgtcagatctcgttacagatggttgtgagccaccatgtggttgctgggatttgaactctggaccttcggaagagcagtcaggtgctcttaccactgagccatctcaccagccccctttctttcctttttttaaagatttatttattttttatgtatataagtccactgtagctgttttcagagacaccagaagagggcattagatccttttgtagatggttgtgagccaccatgtggttgctgggaattaaactcaggacctctggaagaacagccagtgctcttaacctctgagccatctctccagccccatactgcatttctttatgtaagtttttcatgaaagtaaagttggacataaacttttaaaatatggattttcctttaagtgattggaaaagccttttccaatctgccagtgttcagccattctgatctcgaggtcggattgccaggtccttgcatttagtttacttgtccccgctcctatctcctcaggctgaatcccctggagtagctgggagtgtaggcccctgtcactgtggagtagctgggagtgtaggctggaaatgctggtcaaaggatacactgtgagagtcagttctcctcttgtaccatgggtgccctgtggatgggactcaggctgttagcttggcagcaagtacttttactcattgagccaccttcctgaatgactttgcttgaacttctgattgtcctgcctccacctctcaaggctgcgggtgattacaggtatgtaccaccatgcatagtacacaatacatgtgcataatctctgtgaatacagtgttggggattaagcaccaggctttggacatgctaggcaaacacataccatctgactgatcatcagatcacaacaaaagagagcagaactctgaagtgcaacagggtataagagaacaatgctggagataaacccagggccatgttcacgctaggcgagcactctaccactgagctacatctcccgccttggaacagaatttaaataaatagtagtcattctgtgtaattaagtacatagttttatttagcctccgcagtaacagaaagctttgactgtcacatacaaagatttcatatatgaaatattgagtatctaattgaaaaaacgatttgtgggatgtgggaagccacatgtgccattgcagagtggcactgactactgctggccaccatacataagtttggacaaacaaccaatgtgtacatatgcagtaaagttttttgcaaagacactgcctggcccgggcatgataatgaggctttgagagtataaccaatcagatgtgagacatgcaaatggggcatgataatgaggttctgtaaggtacagagagagagagagagagagagagagagagagagagagtaaccaatcagatgtgagacatgcaaatgaggtatgataatgaggctctgtgagatacagagagagagtagccaatcagatgaagaacatgcaaatgaggcgtagtgcataaccaatccgggtgtgagacacgcctctcctaggcctatataagcagcaccagttctgggctcgggggtctttttgcctctacaatcaagctctcccaataaacgtgtgcagatgttgcagcgtcgttcttcctggccagtcgagcacgcgcaagagtgggaaatcataaacagacttatttttatgatgaagtttttctgtattgctgagattgagctcaaacattttgtctcagcttgtggaatagctgggagtgtaggcccctgtcactgtggagtagctgggagtgtaggcccctgtcactgtggagtagctgggagtgtaggcccctgtcactgtggagtagctgggagtgtaggcccctgtcattgtggagtagctgggggagtgtaggcccctgtcactgtggagtagctgggaatgtaggcccctgtcactgtggagtagctggaagtgtaggcccctgtcattgtggagtagctggaagtgtaggcccctgtcattgtggagtagctgggagtgtaggcccctgtcattgtggagtagctgggggagtgtaggcccctgtcactgtggagtagctgggaatgtaggcccctgtcactgtggagtagctggaagtgtaggcccctgtcattgtggagtagctgggagtgtaggcccctattattgggcttgaccatatttaaacaatttaactgaaatctctgtcctcttactaatttccccacacaaggggaaaggatacactgtgagagtcaaggtcaaggcttttctttgtggatatatccggtgggtaaagttctgggctgccttttagcatagtaatatccatggggcattatttattaagtgacccagtagtattctttcttattacaggagaacatgagtaaaatacaaactctgcctgtagacatttgtttgtttgttttgagatgaatctcctgacttttgactctttgattattggcatgtaccactctcctgaggtctccggagtctctttgactgctggtgtgtacaaccatccctgcttctaggttcttttatgttctcttttctctattatttttaaaaaggttatttttatttgtgtgcatgtctataggaaccagagagggtgttggatcttctggagtgggagtaactgcatggtgagcctcctgctgtgggtgctaggggctgaacttgggtcctcttgaagagcaaccaacagtcgtagcccgagccatctttccagcccacctctcctgttcttttaaagctgtctaaaatacacccaatttcataataactgtaaaaaatgggcaaggacccaacaggatggctcagccagtgaaaggtaactgctgccaagccgtgtgacctaagcctgacccacatgctaggcgagaacctacttctgtgaattgtcttcaaacttctgcgtgatacacacacacacacacacacacacacacacccctcacccctcacacagcacacacacacacacacacacacacacacacacacacacacacacgataattttttctaaagttagccttttgagtatttttgaactttttcataaaacagtctcttttacttaaaattcataagtttaactagctatagtaacaagttgacaggaattggtatggggacaagaaggtggcttgtactgtcaccctgttcatttggtaagaacaggaggtgggaacactgaatagtttacttagaagactataccagtgcagggagtcaggcaagagctgcagacctttagtactgcagaagggtcaggttgacgttttaaaaagacttgtactgaattattattctgacttccatctttacctttgagagagctggggtgtcaggatctcagtaacccccaaagtcaagtagacaatgattagtcaggatctgtgcgtagctctgcgtagataggttcaacttaaggtcttccgtgctgtgggggtgtggctgccatttaggttacctgctttatttagtcattaagtactcttgagtgtctaaagggtggtttgggtagcttcttatatttcacccctatccttgatcccctgttgttttattccttaagtcttgtcttgaagtctgatttgttgttgttttctttaaaaagtaagggtatattgtggggtaaaaatggaacataatttttttgttttgttttgtttttcgagacagggtttctctgtatagccctggctgtcctggaactcactttgtagaccaggctggcctcgaactcagaaatccgcctgcctctgcctcccgagtgctgggattaaaggagtgcaccaccacgcccggctaattatttttaaaaataatggtcaggtggtggcagtgtttgtaccaccaccaggcaggcagatctctgactttgaggccagcttggtctacaaagcaggttccaggctagccagagctacacagagaaaccctgtcttgacctgtccccaacccccattatgttggacatgagtgtatggggacggggactacagcttaaagaccttataaagggagctgggtatggaagcaactaaagtaaaagaagaaacagcattattcccgctgaaattccttatttgtttgggatctgataagttccctttatctgttttcatttttgttcattcaggctttaagagagctgtggatgcagatatgtgcatatctgtcctcagtatgctgctgtcctcagtatgctgctgtcctcatctggcaatcaccagactttttcagtgtttattagagcccaatatgtagttttggtttgcattttacttttctagaacatttaaaaaagcaaatcactcttattttattaatcttaaattgagattcagattttttaacaaaatagattttttatttaaaacttttaaatttgttattttatgtgtatgagtattttgcctacatggatatatgtataatgtgtgcatgcctggtacacagagaaactagacatcagacctcttagaactggagttatagacatgtgtgagctgccatgtgtatattgggaattgaaccctggttctctgtaagaccaagtgtttttaacctgtgagctaactttaaagtccttaaaacttttttttttcagatttattaattttatgcatatgaatgttttgcctgcctgtgtgtgtggacaccatgcttgtgcctgatacctgtgaaggccagaagaggccatcagatcccctggagctggaatcagggaagactgttgagttaccatgtaggtgctgggaatcgatcccaaggcctctggaggggcagcaatcaaaggctctgaatcaccaagacatgactaaagctcccagattttctattggaaaacactgttgttgatatgattattgggggtgcatggtgccatagtgcgtgtgtggaggtcagaggacagttttgtggagttgatgtgtaggcatcacatttaggtcaccaggcgtgcacagctactgcttctactgctaaaccatctctctggagccaggttttaattatttttactgaggactgtaactgccagaggtgttctggtcatgagataactggtgttgctaccttgagttttaattccaataaaaaaataaacttagttattgcattattaagtcaagggtctctaaaggaattaatagaattattggagaggccgagttgttcagtccatgaaactggatgtctgagcaggcaagtctggcacttgatggagtcctaaagaattcctggagagctgctggtctttaagacggtggttgtaatactggtgaagagatgcctcagcaacaggataagtgaatttgccagccagagtgaggacaagcaggcaaaaaccaagtgcttcctcctttcttgttattttatttgggctgccactagaaggtgtggccctggtttagggtgggtcttcctgcctcaaacgatctgatcaagaaagtgccttacaggcatgcccagaaacttgggttttagttgattccagttggcaactgtgattagctctcacaaatttattccttgtcaacttgatacataatcacttttccttatgccatactattttccaaatgaaaacaataaccaggtcataattcttcctaacatgagataactatcttatgtataatcacaaactcatagagatttcagaatagatggcagtgtaccttgagggatgcttagtctttcagtgtctcataagaaatgcagcaaccactgtcaatgatttcacattacatgataaggaaatagggaaaagaaacataaacatgagatacatacatacatacatatacatatatgtgtgtgtatatctgtgtgtatatatatatatgagcatatatatgtatatatacagtgtatatatatatgagtgtgtgtatacacacatacatttacattaacaaaatagagcagaaacataatgtcaattacaatcatttctacaactggtcacatggcctgagctggtacttgtaactaccttccagttccagaaggttaagagtgtcctgtcataaagtcaggaaacatgacagcaggcagacctggcagctggaactggaagctcagagctgagggcacttcaaacatgaagcagagagtggaaaccaggaatgtgacttttgaaacctcaaggcctgcccccattgatgcacttcttcagcaaggtcatacctcctaaactgtacaaaagggtcatctgctaagaacaggagtgcagaagcctgaggctatggggtggggttgggggtcatttcagttagaccaccacagaccttaagtgcatttagtccagtttcacaagtccgcatagtctttcacagtctcaagcttttaagtttaaggtccaatgtccatatttcttttgaggcttgtaggtgatcttgtaactgttactctcttaagtataaaatgaaaagcaaatcagatacttccaatatagggtggcacagaatatacattgccatctgagaaggaatgaatagaaacacggtgaaaaactgctggagcacagccagacaaaacccagtagggcaaacccttcgcaccgcagcttcatgtctgctttggaaggccctgcccctccagctttgctccctgcccctctctgctgcttccacttcctggtgcaactgtccttggcagatatctcatgacactggcatctctgatgtcttggggtccctcatgcaactcaagctttgtttccacaatttgatgcagtcagtggccttgcagggactctttatttctggtttctacggctctctgaaactatggaggaaggttccatgactcctttgttcatgtgacatttagagctctaaagccagtgccacctagatgaccctggcaggttcactgagtttgggacagacacgggccctcctgactcatatttgcagtggctttttagtgctgctttttagcagtatagaattcatcaggcctcttcctaagtttagctggataatgccttgcccaaagggcacctcattcatatatatatatatgatatatatatatgtgtgtgtgtgtgtgtgtgtgtgtgtgtgtatggatgtatatatatatggatgtatcccatatccctttatcccactgcagatcaggcccctccattactgtcctagtgtctttgtaaaacttggctgcagcattgttcctggtgttctttttccttttcagactgtccatgctgcgtttcttcctgccccacttggccttttccattgtaaacctgcctcagagtgataacaaacgaccctgtgacagagtcagtgctaggctgtcttgaaatctctgcctccgaagagatttcattactgcaaatttagcctgaggcaaggtcttgggactggggcagaaagcagccccattctttgtcagagcatcacagaatggcctgtcccaggcgctcatgtgactgccctctggaacttctggagctggccttcatgtctgtgtagctctgggtactgctgcgttccaggctcgtggattagggtggtctgctaagctccactgcagtgcacactttcctggaccaaactctgccacatctaaaaattcttttttctttttttttttttttttgtttttgtttttttaatttaggtgttcttcaagttgggattgaaaaaccatttccttacatatgaactttagtgcttctgtgtgtatgtgtatatattaatcccctcatgtgcttataattaatataattgacagtgttctgatcatattcaatacttgaggtttcttgggctataattagtaaaattaaaaaatagcagttggtaaattgtgaagctttattttctttgtaaatcatgatacacaaacatataattatatggcaccacttgttttaagtatacctttgattcatgagtctttgtggaggggtgccattaatctcacgaagggttggagtcttgatttctcttttctgtatcagctgatgtcttttgttttctaacttatattcaaaacgtctaagaccatgtttcacgtgtactcacgtggaggctggaggtggaggggtcagttctccaccttgtgaattctgggaattgggctcagttcatcaagcatggctgcaagcacccttacctgtgagccattgggagttttgtgatcagtggatggggcagcgaagcctgtggaacagaaaacctggagaaaagtgagttggggctgaaggactgaggcgcagcagagtgaagggcggggctcactgttctggatgatttacattcatgacacaggctggggaggaagtgagaaatgggaaatatggcgttagttctggctagggaattccagcttctggattgccatgggctgaggtcttaaaggaggtgatagagaagcaagggcaaacaagagtgactatgttgtctgactgatagtctgatgggctggagagatggctcagcggttaagagtactggctgcttttccagagttcaatcccagcaaccacatggtagctcacaaccatctgtaatgggatccaatgccctcttctggtgtctctgaagacagctacagtgtactcacatacataaaataaataaataaatttaaaaagaggccgggtggtggtggcgcacgcctttaatcccagcacttgggaggcagagacaggtggatttctgagttcgaggccagcctggtctacaaagtgagttccaggacagccagggctacacagagaaaccctgtctcgaaaaaccaaaaaaaaaaaaaaaaaaaaaaaaaaaatttaaaaagagatagtcttaaaaaaggagagtctgaggataagggaaatggaatggagaagattttaggggtaagagtatataggggtaagtatgtatacacacacacacttatgtacgtacatacatacatactggagtagttcttttgaagttctgaggagaaaaaggacagtaacatctttatgttaaatggacccttgtttattttttgagacatggtctctatgtagccttggcaatctgaaatttgcaatgtagaccaagctggcttagaaatccagatatctgcttacctctgtctctggagcgctaggatcagaggcatgtgcaaccatgcctggccacatcatgtgggcttttaaagagtactctggccagtcttctctgaagtgaaaacacacaattagacagtgctctctgttgtagtctgttagtttaaaggtgtccagtgttggtctcaggaaaggactactaataattctctttctatctagttccgtggtgaagccaaacagagttggccatcagatgtgtctaatttctgtctgtgagcatcagcaagcacttgatgcacacccctgtcttggtttgcatgtgcttattttcctttagtgtagcttaaagctaggaatggaattcctgaggttttgagaggaatagtgttggcaaactgaattttgaaaataaaggcaaattaagataccaatcaaaacaaagagatacaattcctttagaaaaggatcttaaacctgctgacatttgcaaaactagtcttatatttatataacttataaatatcttatatttatataagctttagatagaaattgctcttttctttacattgttggcttagaaataattgctacatttgtgcattttaaaagttgcttgtaacacccttgggcaagcaggagctcagcctgtttagacatttgcctatcaagcctttccactttatactgtcttacagcagtaaggtaactaaagtggttgcagaagtcaagaattcagtaaactgccattaatgtcagttaaattaatttaaagtatcacttaaatcaccctgaacctgttcaagcgaattagaagtttagccaagtattgctaaagtgacaaattattgcccttgtgactttgctgctcctattgcatagctaggatcctgttaattaaacaatgatttttctctcagatttgtctaattttgtttcatctaggtcctgctagtgtgtgttttgtgtggattttgcccaccagttcatgtgcttttttgcctcctgggttaaatctatttgtgtgttttgttttactcttagctcttaacatttaagtatttcttgagggcacaaagtaaattttattaatttgttttggtaatttttatacagtagtggatgtttccattgtgacaagcagatactgaagaatgctatatataaataagtatatataaataagtgtacaaaatccaagtgtgtaagaactctgtgttgaagtcccttgaacttcaatagatgatgcagaaaataaatcagtttcagtgccatgagtgatttacggttttaatttatctttgaggagttcagagttctgtctctgacagaaatcttactttaaagtgtactgattttttttagcttactgctcttaggctttctgtctcaaattttgttttgtgccgggcggtggtggtgcatacctttaattccagcacttgggaggcagaggcaggtggatttctgagttcaaggccagcctggtctacagagtgagttccaggacagccaggggaacacagagaaaccctgtctcgaaaaatttttaaaagtttttttgttttgttttgtttttttcctaacagtctttctgtgaaacacgatgcatcttttatgtcccctcagagaagggttataatatggcgttcacttagctaacatcttagagaattggaatggttgtttgagacagacatcccagcctggccttgaactcgatacggaatagctgaggacgcccttggacttcttctttccacttcttagtatttttgattttgaacaagatcttctccccttgaacactcttttgacattttgaactatatgtatttggaagagagaggaagagaaggagagagagagacagacagacagacagacagacacacaacagaaacacagagagatacagttcttggctatgtcaggcttgtgataagggcagaggtacccttaggatctttgaatcacctaggtaatattttaaaaaatcgaaagatcaaatattttagagccaattcagtcaggagtcattcatacatatcttttaaatttttatttatttatttaaaactgtgtgtctgtgtgcttgcatgcttgcctgtggagatcagtggtatcagatactctggagatggaatttgagttgccagatatgtgtgctgagaattgaactcgagtcttctggaaaaaccatatatgttcttaactgctgagccatctctctggcctctatgcatatttttgacagtcaacaaactaggatcaaacaaagattgagtgtagaattgtaaatgattaacaacgccattatttattgatctcctactgtgagccagtccttttattacatgaaggtatgcataacacctttatgaggtatgtgttattggcttgctttttataaatgccttgctgaagtattaagtggttaggtaacttcaataaggcccaagctaggaaataatggagctactatttgagcagttcgactctagatatcatagaaatgtcacagagatattagctggattggatctagaatatagaagctcttgaaaagtttgcagagtgggcagtggtaatggttgtaagttctgtcctctaccatatgggttctggtgatttagcccaggcttagatcaccaggtgtggctgcaagcacctttacacagttagccatgttgccagccccttggctgactttcgatgggaggttgccagtgggcttgagggtggaaacaacatgagtttattaatttagagaattggatatgtgagtattgtttcctaagttgaaaacatggagtttactttaggatttggttttaacagagacactgggagacatggagagaaaaagtcatctccatattaccagcctgtaaaccactcttttaattaagtatattgtgttaaatgagaagaataggtgtcagaatggcttagtaaaggtggttgctgctaagtctagtgacttaagttcagttccttgagcccacgtggtaggagagcccactacctcaagctcttggatttccacatgtgtatacacgcacacgcacacgcacacgcacacacacagggcatggaggggatggggagaagggcgagagaatatgagaataatgaaaaagctaagggcagatctggtggtgcacacctttaaatcccagcagaagcaactggatttctgagtttgaggcagcctggtctacatagttctaggacagccagggctatacagagagaccttgtcttttaaaaagaagttaccttattttgtaaacatatcaagaagaacagcaacaagatactggtaagtggaaaattgatgaacttaccttaaatagttagtagtattaaaattaaagagaaaatggcaaactaatggtattttagctaggtattattacctgaaagttcttctcagtctaagtcagggagagaggtgagagggagggagggcgggtgggcaggtgcacactcatgctgtatactctgtgtttgggcggatactgagatagatggcattaccctactccggtctcaacctcctgaatattagccttgcatgcgtgtaccaccattcctggtcctcccgagcagctcactgagctgtacttgcccttcttgtgatgatggaaaatcactgagtacctgataatgaaatggagtaagttcgtatgcgctttggtgtattagactgctacctaagggctgcatagacattggatttgtgatactgtggcattctgataagcaagatggctacatttagtagtagacagtttgggcataatgttttggaaattagagttttgtgtaacatttctctgcttttctagtggtgggataatagcatttattatgtagctaagttgggaatgttagttccttaaaataaaatgtgtaagtaataggcattaacctgtttaactctaagataaattgctgaataaacaccaggaccattctccatactagagacaagttttcatccattgtaccagtgaacagtgtacctaataggtcctgatttatactttaaatgtacaggtggttttagttacatctaaataagaattccactttaaaagatttgtcgtagagcatgaaagttctgtaagacatggagctgcgcttctgccagaaactcagcattttgaagacagatagcatcccagttccgaattgagattgggtacaaaaatagcctagggctgagaatagacacagtaaacgcaccggcagagatctgttcatgtggttatgatggaaaggaaatcttcgttgtgcttgtacagaaagatatgctgtaaacattgcacgtcgagcacagcagacaaacccccgtttcacggttatcctatctggttacttcttactatagagcgtgaaggctgcttctgcccttttctccagagtcctccttctctcttccagtcacctgctggtttcagaagtatctctttaagttttccttatttttatattttctttaatgtttttatatgaacacaaaatttcctttagtactttaagaaattataagacagtaaagctgtcttcagatgtcttttgtttcatctcagcactgtttgaactggtgtaagacatacttactctgcatagttttctcttcatggagaagttacttttagtattaacacacctggaaattatttcagaatctaacatgttgtcttgcttgtagtaagagttccagaagccttgatggtcacttctcttgtcttgtgtattcttaaatatattaactataaccttaatgtcatgttacttgtgtgtatgttttcagggctgaccacttggtgttgggtaaccaatgagtgctgatttgtttttactaccaaatataattctcctgataatgaaactttagatatttgtctagcacatagttaggatggtgtaccctgaaaatcagtcatgcatccacaccacgtgactgcttagcggagtgattaagagtgtggatttagaggtctggctacccgtatttgattcctgtttctaccacttaattagctgtgtaacttgggtaagagattctcggagccttaatattttcatctatcagatatagtgtgtacttatgctataaagaggattaaatgaattgtagagtgcttcagtcagttactacatgataagcaccgtggagtgttggttaaataaatgttttgaagtcagtttgtagagcagtgcgtgtccttcccctgggttgttactacagtcacaggaagttgtatgtcggagctctcctagtgcttctcagctgtggagtcagtcctgctcctgctgtcgccccagcccactctgtccctccctctgccttagctgtgctgtggctgctgaggccctccttcatgctctgcctccccattgctgctgctaccacagccgctgccgccaccaccaccactaaagatcactaagtttgaggactttctgcatgtgacttgggaggttaaatgcaggactttgtttttgtatcatgtgccacagccacttcagagggctgacgggtgttcttgtgattcatttcaaactctttacccctcttgcagcagacacaaataatcacagattgaaacatcgccaggtggggaaatgcctcagcttgctcagggcttctgtgcacatatgaggagctgagttgagtttcccagcaccacagaaagaaactcatgtgctgctgtgcacctggaatcctagtcctggagagacgagagacagtgagttcttaggctgctggtggctgagcagctgaaagggaggctcccgaagcaggacgacttgagtttggttcctggaacccatggaggaaagaggcaacctagtcacgagtctgtatccacgagtgacttaggagagtcacctaactgccatacatatgctgtagtgcatacatgtgcatatgcacacacatgtaactacacaaataataagtaagtgcggtggaaagtgataaaggaagatactgcacaccagcctctgtcctcaccatgtgtgtgcacagtgcgtgaactaacatatatttgtacacatgcatacagcacacagtatagccatagcccttggtaggacccttctgtatattcagtaaatggagttaaatcagtagtacgttcttctggacattccagggaggacttggctgtcactcagacatgtttcaggtaagaaagaatgtaggaatctttgaccttgactctggggtatcagaagacagtgagggcaaagatactgtggctcatagatgacaaactaatgaatgcttttcatttatgacaaggaattctgggtacacaagaaacattcatggatatagaccagtaataagaatttattagagcaaggcacattgcatttttggtatcttaatttctgagaatataagcttgatcaataaatatatggcatagaatattcatgagtaattttttatgctgttgagtttgaacatatttatatcttactttacttttaatccctatctatgaagctgtcagcttataatcaaataatttagaagaagctttgaaaaggttgtgggtataaattctttgactgtggctttttgttctgaccttgtcattagcttttcttctagctgtcacttgtcctgctgtccagagggtaggtacactggggtagtcagacagctcagcttactgaaaatagaaatccaggcatgaagtggagtttctttgacttggaatcatggctatgttcagcagttattttaaacgaatgttttgtttagttttggagcagggttttgtgtagcccaggctgtccctgtgcttgtagtatagttgaggctagctttttttgtttttaatagtatgctgatgtttctggtagagattgggatcgagtaacacaagtcagtgcttctgaaggactgtcatcgcgtggggaccaggggtctcacccctcacacaggtttgtggctgtgactgacctttttgtgcacctgtcactgtagaaaggtggttacaatacctgtatgttcttgctctctttcaaataatagagttagttcagtcaactacaataatgtgagcctgtttagttaagcacttttaaaattatggatgaattcattcattcattcattcactcatgcatttactttatatcccaatatcacccccagtacctcctcatgcagatcctttctccatttctccttcccttctctgagagagggagtcccctctgagtatcacccttacccccaacctaccctccagccccttccccaaagattttatttttatgtatttattttttcttctctgggaagttctttttatattatttccctttttatttttgatcttttgcatttatgttctccccagtatttttcactgtgaagaaattcatagtgcaaacgcaagagggagagagctgactggacttttattctcatcgctggggttttgttgagttgggggctgaatttggtctctgtgtctgttttacactctttattatctttccccctctaaatgtgtgtttgtagtttagttctcagttgttttactgttttgtaatgctcatggattatttttatgacctagacttagtagctctaccaggcactttttgaaacagggtcttgctgtgtaggcctggctggcctggttctccctgtacatagaccacacttctttcttcctccttcctcctcctttcttcctcctcctccttcctcctcctttcttcttcctcttccttcctcctccttcctcctcctcctcctccttcctcctcctcctcctttcttcctcctcctccttcctcctccttcctcctcctccttcctcctccttcttccttcttcttcctcttcctcctccttcctcctcttcctccttccccctcctttcttctttcgcctccttcctcctcctcctttcttcttcctcctccttcctcctccttcctcctcttccttcctccttcttcttcttcctcctcctcctttctttttctttctccttcctcctcctcctctttcttcttttttctttcttcttcctctggttctgggaatagaatctggagccttgccaatattaggctagtgctctgtggctgactctcagactcagcccctcaccgtacagttcctgtactgttctatactgctaaacttgaagagtcctttctcctgcctttctgcctcatgttcctatcacatgatgggcattcagtgacggaagcttgggattttcattgcttgctactctctgactgtgtttcttgtcacaataaaaatgatataaaatattaccaatgcctttaaaatgtataataattacctaattaattttgcactgttgttgcacagttgataagtgaagtctgatatagatcaccatcctctgttaatactgctgtaaaaataacctagacacacagcttttatttctatatgaaaagagctttgttgattaaaaaaaattaaataaattctgaggtagtttgtggttttttccttgtgctttaaaatgttttctttttttggaatcagggtcttggtttagactgtagaagtatgctaataagattatatttagttggtgaatttgtgcccacaaaaatgtgacttttaaaagttgcaagttgctatagttcttgcagataagattatttcctgttttctctcttatatttagtatttgtatattttccatgaggaggcccttcagctgtgtcatttgacattcacttttaaataaagctttaactacacaaaatgtcaaatgtttctttgaccagagttacccataatttcccaggtaattgtcccactttaattctgtgcgtggggaagtgaggggaatgggagggccaggcagacaggttttctcctgccactttgtaggatcctgagctcaggtcatcaggcctgcatcaagtgtctttacctttcattttaccagccttccttttatttttgtaatgtaaggtttcaggaagaatttcttttggtcctgtaggaatttctgcatttttgactcactgtagcccttggaactggctatgtagactaggctaacctcaaactcacagagatcctttgcccttccaagtgctggcattgagggtgtgttcccatgctgggcctctctttataggagttttaaaggcatttatgggtatgccaaacaagctcacagccacattagctgtgaaattaagatgggcaagtaagccattgccactgtttcccatcttgtttgcagggctttgatatccctgacccacctcagcactgctcccctctaagtctcctggacgtctaagatggtgtccctacaacagttttcatagtgagaacctgacctttctatggagagtcatttgggaacagatttgccagaaccttccgtaaaagtctttttttgttgtgcttgtttgtttcttttaagattctgctgaggcactggggagatggcagcccagtggttcaagtgcttaccactgaggacaaggacctgactttaggtccccagcttcggtgtagttgagggataggtgtgatggccgtctgtgacaggatccatggaaagctgccccgaagactgcctgtagcagtgatctctgggcttgagaggccctgctccaaggaactaaggtagagaacagttgaggaggccttccagtgtcaccctaggtcttatgtaggaataaacctcctagttcttactctctttgaccatttttctctattgataacttcattatttatgaattatcacaaatcagaaaagttaaacacagtttgagttgagttttgagttttcttgccctggacttggtgggggggtgggtgttgttttggacttttgtttactttaaatctttacataatgtgagattcagttaatttcattttgacttacatggagagcaacttgtgttaatggtgttgcagcttgggatcaggagataggttcctcaaatgctacctgcgtctcaaggcctcagtttcttcagtcttttgtaaccccagtatatgggttttgtattagttagggttttactgctgtgaacagacaccatgaccaaggtaagtcttataaaaacaacatctaattggggctggcttacaggttcagaggttcagtccattatcatcgaggtgggagcatggcagcatccaggcaggcatggtgcaggaggagctgagagttctgtgtcttcatccaaaggctgctactggaagactgacttccaggcaactagggtgaggatcttatgcccacacccacagtgacacacccattccaaccaggtcacacctattccaacaaggccacacctccagatggtgccactccatggtccaaggatatacaaaccatcacaggtgttatgagctctaaggtttgggacaccaaatctctgtcaaaatccaggattcgtacctataatttcagtctattagataggctttcgttatcaatataggtttctaaatgtctgatctttattttaattttaaaagactcatagaaaaagctttgtttgatttttgttgagattagtcctctgcctgcgttttgatccatgcaattaagtaataaacagatttgagcttttagacactgggaaaacattctgaaatacaatagagacctggcgtgaagaccaaaagaggaccggaagaagagtatatatcagccatatctaaagaggtagtgatttactctgcatggcttatagaagggtgaagtgttctgttatagatgttttactgagttatttgttaaaacaagtggataaagctctgtgtgtgtgtgtgattttattctatgatactttttcaactttgccattcatggctcttaagcaagagtggctctttgttggttatagatactcaggttaaaatctcctgctgggaattcacagatcagtgctggacatgctgggataattggtttttctttaaaattagcttcattttatttgtttgtctgtgtcttagttagggtttctattgccaactcttacacaggaaaacatttcattgggattgggttgcagttcagaggttcagtccgttatagtcatggtgggaagtgtagcagtgtgcagacagacatgctgctggagaaggagctgcaagctgtatatctgaacccacaggcagcaggaaaagaactggtgtgagcttctgagacctcagaggccaccccttagtcacgcacccccttcagcaaagccacacctcctaatagtgccacttcctgtaggcctatagggactgcttttttctttgaacccccagcagtttgttgatttgcttgcttacttaacagggtgggggatcagaaggcaactttattctttccttctaccttgtgagtcctggggattgaatttaggttgtcaggcttggcagcaaaagcccttacccaccgagtgttctcactggccctggaataatttttgttagttttttttttttgtatgtttgttttgttttgttttggggtatgtgttcttgataatattccttagaagtggatcattttctaaattagcaaaatagttactcatattttattaaaacaaggtttaagaatcccaggataaaacataggttgaaactggacagtatttttttctgtggttatttgtttatttattttattaattttttaaagatttatttattatatgtaagtacactgtagctgttttcagacacaccagaagagggtaccagatctcattgtggatggttgtgagccaccatgtggttgctaggatttgaactcaggatcttcagaagagcagtcagtgctcttaactgctgagccatctctccagccctatttattttgtttttgtttaaagaaattgaaaattgcatgcatgcatgcctgtgcatgagtgcacatacacacacacacagacgcatgcacacgcgcattttcttcttgctgcttggagctagggaaggtgagaatagatggtctctgtactcactgtgtgcttaatttctggagtaggaaccaaggtaagtaagtgtatcttatagtttaaaggggagaactcagggttcatattggtgcaagggtagcgattcgggtccagggtaagcagccaggaacagttcccagaatcacactgcacaagggttcctgtgaggatgccatagcaaccacagagacaggcagacgtcatagcctgtcccagtgacactgctggacaacgaaatgctgccacctctgccccagacttgaccttgctatagctccactgactttagtatgagaacaagttgttctctctgcttctagtgttcacttggccctcctagtctgcattggatatatgtgcgataaaatgtggggaagtagttactttctgagatcatcagatggggaaaattctcaaagtggtaagtgtttgctcgtttaaaatgatgcagggaattccagagctgactagaagaatgttagacgtccatggtgcctggtgccgtggatgcttattgctcctcactgttcagggtgccaggctcagcatcttatgaaggaaatgacggtctgtgtcattatcacacagcggcagcattaactcatcatcttagaagagaggcagtgagagaaagtgactagaccaagatcacacactgagtcatggcagtgttgagactgtgttcaaagctgtgactccaaagcctgtgtctccagctgtctgtcttattttcttgatgaacaccttctttgtaaccaacatgcttaaaattgatatgcagatctcctgagggctgaagagatggctcagtacttgtgagctcatatactttcagaggaccagagttcaattggcagcacccacaccagtctacccataactacctgtcactttagttctggcatccaagggcacctatactcatgcgtatatacccacacacaggcacgcatgtataccatatcaaaaacaattaaatcagggacagaaagatggctcagtttttaagagcacactgactcctctttcagaggacccaagattgattcccagtatccacatggaggctcataactatcaaaactccagttccaggaaccctgacgcctttttctgtggtgcatatacatacatggaggtaggcaaaacactcatacacttaaaaaaaaatctttaaaaaaacggtaaactcctgtgcttcaaataaattctgtaagcctgtaggctgaatctgctaggtttattgatttattaattaattaataattaataaattaattaatttattaatctgttaggtatatatattatgtatggcatgtatgctcatgctcatgaattttaaagttgaaagttggtggctttgacctactttatgatgaagcttcgcctgtgcagttaagctgtcacagaacttcatatgtaacccgggctggccttgaatttcctgttccttcttcactgttagagtgcctgactgcaggtgtgcactacgaggctgactttcattcactttacattctaatcagtgtttgagtagtctccattctatcttgttttgtggtgcatgtatcaagcccaggtgcatggtagctgagagctttgcccctgagattccccagcctaatttctgcttctttctccttttggaacagttttaaaatgctttggctctgtctaaaatctaatgctttctttttggaaacctgggcttgcaattgagttagttattgagtaagaaaggggcatgaaggagagggaagacagacagaaagaccagtgctaaggaagggaaatactaaaactgcacatacatacaaagaaatacgcgtgcaaggaagggcacacactctgttgtgcaagcggcacttaaagtacctttaaattcttctgttaggttgaaagacaatacaattctttgtgctggtttaggaagccattcattttatttattttattagggttaagtcaatgctttccctaaagtaagcaataagtcttaggatttttgcaatgtcagtaaagactgcatgtttcttcagaggccccacacttactgaattgctttaatacaagtctgtctgctgatttttccgtagtacccaaacagcactctataataatgtgtgcccttgtgatgaaatagcatcatttttgtaaaactgaataatttgactgtccttctttacatagcacttttggagcctcagatgtggtctgggtgttagagaaatgctgatgtaagttggaattaacattaacactgagcacattcacactgagcatattcacactgggggcattcacactgagcgcattcactctgagtgtattcacactgggggcatttacactgagtgtattcacattgggggtattcacactgagcacattcactctggcacattcactctgagcgtattcacactaagcacactgtgctgtcagcctgttgccacacctgctcatttttttaggcagtgcattttaatttgagaactgttagttctttataaaatttttgttttgagtccagttcaagctgtgtgtgtttgtgcgtgcatgtgtgcgtgtataggttattgggacatacatctttgaatttttaagcttatgcttcctgtattaaactaataatcttgaaataatctgtagtccttttgttagacaactaagctgaaaacacacactagtaagcagactactgacacataaggaaggaggtatatggtagggagctccgggactttctgtgactaactttagggaatgtaaggacaaaagtatttcaggtatagcttgtactcttggtttgtgtgtgcccaatgagccataggttgggagcgaggttggtgctcagtgtgatagtgtggggaggtggtggaccataaaaggggtagggctcaacgcaagataattaaagtgtagaaattgctgtctttagaatatggaaccctgggtcgttctctccagatctgtactgagggagcaggaccggctacttcttgtgatcttttctttgttgtgatgtctccctggagctgctcactagagccggttccatgctattaggacttcagtcctccagatgatgagctttaattagggcttagaaaacaacccaccctccaggcgtggtgcgctcactctcccttcagaccagcacctggaggacagaagcaggtggatttatcactgagtttgaggctagcctggtcataagttccatagtgagaccctgtctcatttaattaattaattttaaaatgcaatgaaaaactaatgactgtctgtaggtcacatgtaaaaactgaattcaggcaagcctgttttgaggtcaggttttctatatagcaaaggttttagacattgcatttaattttatgataaacaataaatgtcacagattggtgatgcctatttaggtttgtatacatcttttgcttgtgatgaagatctagaagaaaattagtgaagtttctactttgatactctaaataggtcacagtggaaaatgtaataatgttttctgtttagaaatacattttgtgtagtgcctagaatgtagtcaggttatctgtataaaacaaaagtttgttgttgttgttttaattttatgtatgtgaatactctgtccctgtcttcagacacaccagaagagcacatcccattacagatggttgtgagccaccatgtcgttgttgggaattaaactccgaacctctggaaaaacagtcagtgctcttaaccactgagccatctctatccccaaaacaaaagttttaaactaggacatttcctcatttttttgagcgtacataggaagaaagaccagacacttactgattataaagattgcacacatagcttgcttgcttgcttgcttttttttttttttttttttttggtttttcgagacagggtttctctgtgtagccccggctgtcctggaactcactctgtagaccaggctggcctcgaactcagaaatccgcctgcctttgcctccggagtgctgggattaaaggcatgcgccaccaccacctggtttgtacacatagctttcaagagaccatgtacacttcatatgctatcatttcccttttcttttatttattttatgtatatgtacactgtagctgtcttcagacacaccagaagagggcatctgatctcattacagatgtttgtgagccaccatgtggttgctgggatttgaactcagatcctctggaagagcagccagtgctcttaactgctgagccatctctccagcccccattttcccttctttaacctgaaacaaagtataaaagcaaacactactaatgatgcctgaggtattgacttggaaatcacacagcccattccagtaccgtcattggatttgaaggtttgtgttgaacatgtttttgttgaaaaacatcaaatccagctgggcgtggtggcgcacgcctttaatcccagcactccggaggcaaaggcaggcggatttctgagttcgaggccagcctggtctacagagtgagttccaggacagccggggctacacagagaaaccctgtctcgaaaaaccaaaaaaaaaaaaaaaaaaaaaaaaagccccgatccatatattaaaaaacaaacaaacattaaatcctgttttattttgttttttaacttttaaattatgtctgtcttccctcccatccttagtaatcccaaacactgaattgaagagcagtcttaagtgtagtttttctttacaatactggacaaaagatttttgaatggtagcatttatatttagtcatttgggaattttaagttggtaactccaatgccttatcctctgtgcaaagagctaagctgtattaatgtctaaggcacacttttagtcacagtgataactgttattttctctagataattgagggcattagtgtaataaagctaagttattaaaagtctttcaaaaaaatttttttacatttatttcttgtgtgtgtgagactgtacactcacataggcacgtggggccataggaaggcagctctgaggagccaggtctgtttcctccgtatgggtctgggagagtgcacacaggtgtcaggaagacaagtgtctgcttagccattttgctagccctctctcatctttcagagagttgaatttacaagtctgatttgtagacgactgaggctattctgtttaaagtcttcaaagggttctctccacctccttcccccaagtcagcttttcatgccaaagtcattgtctagctcttgaagtccctgctgattatgtttttgatattttggatttatttttacatcttggattatatgagaatagcttgtgaactttaaatgaaaatggattgttgagatgaaaggtatgtggcagaggtttgggacagctctggagactgtatgtttgctttggtcttgagggtgatggctgagtcacacttggggggggtcctctgtcccctggctaatctctgttaaaaccctgcagcttgccacgtgtgatatacaaaaggcaaagtgggcctcagcccagagggcgtctgtttatctaaagaagaaaaaatgcagttcaaacagccctactgtgttgtgtgtatctaatttagtcatgttacccgttcgtgggctcttttgattctttctagggcccatggtgcctaaagataacaaataaatttgaaatagttgaacttctgagaaaacatgaaactttataaccacaatagaaatacttcaaaacaaaacaaaaaacaaacaggagaaaggctgtgtcatttctattgagagttgtcttaatggtgctcatttgattaaaactcataactgctcttttgtggagctaatagtgcagagtatttaaaaacagaacactaagaaaaacagtgcgatacatacaacttcattaattgtttgaagttgggaacataagaaacttaaaagtatttttttgctatgtttcactttatgtgtataatgccttgagacgtgtgtgtgtgtgtgtgtgtgtgtgcactgcatgcatgcttgctgctctatgacagcagaagagggtgttggagccttggaattgtaattattcatagtcgtgagcctccatgctgagaatcaaaccaggctcctctggaagagcagcaatgctcttacctgctgagccatctctccagccctaagtatcttttaaaaagtggcagtatggaccagtagatgttgagaacaaaactctgaaaactgatgatggtatgtttggaaatcagttcatctaaagtgagtaacttatttttcttaaatattctctaccagatagcaagaaagaagtaagtatttgggtttggggggtgctttcccagacaggcagctatctttggtgagatgacttataaaaaccagagtctaaaggaaaaggagaaataagcggctctcgtggtggtggggttgcttgcacagagaaaacaagtaagaaagctttgaagtgggaacatggcataatgtatttaaggagagcacagaggccattgtggctcaagagcagggacagaggtgggtgagtgggaagcagtcagggaggtggaaagaatcgctgctaaaggtttggtattagtaagagtgtttccttgaagggcttagggaaggatgatatgctctgaccttcttttgaaaacagttaatctcactgattcttgaagcaggcagggaagaggtggggctctgatggagccactgcaataacagagctaggaaggaaacatggcgtggatcatgcgatgagcgtggctatggaagctcatgcagctgtgggttagagctgcctgttcaggctttgtgagactctgggcttggttctccagaacaccacacaatgtctgtctgtctgtctatttgtctgtctatctgtcttttgcactgtctgctttattacctttcatatgaaatttatgggtaagcaacttctaaaggtgaccatgaattttatgtacttagtgttccagctcatggtggttattatagtgtggtgtgtggtgggataataattgctttaaggcttttttaaggggaaagagcaagtaatagatatttatgaaatgaatcatgagtctttatggatactctaaattttatataatcattgagtttttacttctgtgatttttatttgaatcataatgagaaatattacctattagccagtttttttttttaaatacatataattatttcttagtgtggagggcgtaaggttgggtgactgttccaggatgtacatgtggtggtcagagaacaaatgggtttcttctctcttttcctccatattctttctagggattgaacttagaccatcagagctgttgccaaatgtctttactcctaaaacatctttctggtcccaagtttaagagtttttgagataaagaagctataaccatgaaacttgaacagcatgtctacctaaacaaaacatgaacaaacactgactgggagactctcccaggccccacccctgcacagagtactagcagttagcagcagctcagctagggagagcaccctgagaggttatacagttccaagtgctgctgaggtgcataacagtttccttagagactgaaacatttcatcctacagggaaacccccctaagcaggatggtaaacaactcaaaaataaacccagaacatccctgaaactaccaggttcattgggccactttttgctggggtgagcaataaaaacagagtccctatcagagaaacaaagataagctacaaaagaccactgagagcagaccagctgcctgggagaagcagaaaggagctgaactggctggaagagatttggaccaaagtcccttgaaactttccaacctgttgagctgcctgcaagctctgcagtgtgctctaggtccccagtgttgtgagcagctgtctttgagctacttctgctcctgtcagtaactcctcacccctactcctgtaaacaaccccactaagactcatggtccaaaaagttggtctctggtggtatccatccacactttggctggtttagctcccagtctgtagtgaataacatgtgtagtgcctccccaggatatgttttgtcacacagtgatgaaccctaaagccatatctatgcaagtaccactaaatggacacacgcagtgtaacaataatcattaaagaataaaaggacttctgagggtgtgtatgggtttgccacagcattcatgaggtagttcgaagacaacttggggttgtttcattccctaccatttggtcctggggatcaaactcaggctatcaagcttggcagcacacatctatactagctgagtatctcatctacctatcttgtatttttaattatcttaactatgtttctaaagcctggcttgatggtgtgtgctgcatattgcacaggaaggtgaggtccgaggatcttgagtttcagatgaacctaggctaactacaagacaaccaaccactcaagcagttcaaccaaccactcaagcagctggccagacctccctaaccaacccatgatagcacaaaatgcagttttcagcagcacctggtttatcttactccttttctccattatcatctgagaatgatttgggttcattgttgctcattttgctttgtgaaggatgtgggaccatctgagtttcttattcttccaagttttcacatggacacatacaaatagtattttgattgattgattgagacagggcctgactatgtagttgtctatgtatgtagttcactgtggaactctctgtagcctggactggcctcagactcacagagatctgctgcctctgcttcacccctatgcccagccacaaatagcattttgtgatcatcattcagttgtagtctaagaagtagagactgccagagttgttgggtttactcttgagatctgtcagagtagcaccatttcattccctacagaagaccgtgttcctagtgctctctacagtacctcaaagaatatgaatgtttaataaaacgtcctgggacccgacagaaaccacatattcaactcttgttcttctcagagtctttaccaaaggtggagttggtcaagagcataggtggcctaggctttgctctgtctctgtgctcgggagtaggtcttccttgccgtgccttttgtggctcttgtttattggagaaagacggtgccggtgtagttggcattcgtgctgttctgtggaagaaatggtgtttgagacttaaagtacttaagcatgtcatcagttggagttaactaataatcagtttattcattctttgaacaaacaagtgtgggacactctttgacaggaaagccactgattcaggtgtctaaaataaacacaaaaggagcagtgacccctttcttgggttttcattccaggtgagtgggtaggtaaatagcaagtgggcaattgcttcatggagctcaaaatgcgcagtttatggtttcctatgtgcatgtcttttggtccactttgtcagtcacattcaggactgtaaggcccagcaggaacaatggtgttgaggactgaagctgcctggccctgagggacaagacccagctttttctttttaagtctttcataactcagacctgttcatgttttctagtaggagtttgcttatggtcatgataatgtagttaattgttctttacatttacttcattttattatataagttatattctcgattattgtgcctttatttcagaaatggctaccaagaagtaaatgcccagacgtaatggtgatgcaggtgtcatgaagtaagatgcagtatagcatccatccagattagtaagtgaccaaatctctctcttttacctaaacagttatctgtgctgaaaacatttaatacgaatgtgggcattaaaagagtcacttacatctctgttttactggatagtttaggttgattctacaaaatgtctgctatgttttcttaaaagaaccgtgcatgtagtatattgaattacagctttagaaaaatgtacttaaagagttacctctgcccactacagcttttcttactatttttggatatctatttttatcccagtctttgtttttgatagtataatgctatagtttgatcatagtgttatacagacggactatgcttcttatctgggtgtgatcccacatgcccaaagcccaaacgctggaatggctgaggcaggaggattgtgtatctaagttcaaggccattttgggatccagagagactcagtctcaaataaatgacaaaaaaatagcttctaaaattagatttatttcagatacttctttcttgaattaaaaacttacccttcaatatttaattgagggtttcttattggaatgataaaatgttctacaattagatgaacctaatgattatataatataatatcataaaatataatagtctatgaatataaatacttctgttgaaataagttaacttataatatttttataccttaaaaaattatccagccaagtgtggtggcgcacgcctttaatcccagcactccggaggcagaggcaggcggatttctgagttcgaagccagcctggtctacagagtgagttccaggacagccagggctacacagagaaaccctgtttcgaaaaaagaaaaaaaaatcattcagaatatgtcttggagaaacaaatgtcacttgagtttctggtgtcttagaatatgacagtgcgcctcacatcatgtgcctgacaaaaatgatttgatttggtgtttatttatttatttattttttaagatttactttttaaattttatgtgcatgaatgatttgcccccatatctgtatatcacatgcacacctggtttccttggaagccagaggagggtgtccgatcccctagagctcaagttgcaaatggtggggacctaccgtgtgctgggaatgaaacccagggcctctacaagagcagcaagtacacgagccaccgagccaccgctccagctccttcacatggtagtgttatagtagagtggattttatgtttattttattattaagaaattactgtattaggcatgatggtatacacctttaatcccagactcatgtggtagaggccagtggatctatgagttcaaggccaatcaggacaacatagtaagatctctcttaaaaagaagtaaattataactgaatttgattttgaaatttctcattttcaagaaactattttcaaactaattctctcctacctgatttttttttcttttaagggacaaaattatatctgtttttctcagaaaagaattccaaaaggtaagaaatcatttatataatggtaaactaaacgggaatagttgagtgatttcctctgaaagataagtaatatcatttctgttgccttcttttagacgttattaacgtagtgtgccctatgtgtgtgttggtgcttgtatgccatgagacccctgtagagctgggaggacagctcgtgaggccgtttctccttcccccatgtgggtcaggggtggaactgggtaaccaggcttgctcagccctttgagtcatctcaccatctgttttcgtggttatcttttgtttgttttagtttttaaagatggggtttcttactctgtagctttggctagccttgaacttgctatataaatcaggctggccagtagttcagagatccttctctgccctccttccagcatggagatctaaggggtatgccaccatgccctactgttttttaagtttttaaaaacagggtctcatgtagcccaggctatgtcagattcactgtgtagctagctagctttgactttggcctactgcttgaactatagctctgttcctccataataatggtgttgttagggttccagccctactagatattttttttaattccttattggtcacctttccaatggatttttaacaatagtttttttttttaattctttagactttttgaaggaagacatcatcgagtgagtagaaactatctttgtttgtttgttaactgtgtaccaactacttggattcaattgctgggcaactttaaaaagtcactgtggtcatatttcctcaggaacattggaggtgggtagtagtgatcattgtagattaattccacctgccaactaaatgccagttaaaaaaaatgtttctaattccttatggatcacttttccaatggatttttaagaaaatcgtttttaaaatactctctagactttctgaaggaaatctcttaaagggattgttttagatcagtgatcaattcctgctaaatcttccagcatcaggctttaagggacgcatacactctggaccatcctttcccactgttgacactactgcagagttgatcctggggggggggggggggaggggcgggggcggggctgaggctaggagcgcagagcagcagggaaggcaggctgctgcccacagcagggcttcagcctccaccaggagctgcctcagcagtccaggctgttgggagttcttggaagatgtaaatagcatgttcaaatcttccagggtgctgttcaaggcattgagaaagtacttacatagaaatccagaacgttcttttcctagactatagtgcctaaagcaaaatttctgggtttatttgtttgtttgtcttgtattttggtgtttgtttgtttgtttgtttgtttttgaaacagggtttctctttgtagccctggctgtctcggaactcactatgtagaactcaaacccagagatccctcttcctccaccttccaagtgctgggattaatggcttgtgccaccagctccacaaaatttaaaaggcttaatcttattgttcttagtctgtcatctttgccattttcttttgaaaagtgaaatttaaatcttctatattagtaaaatatgtgattcataatgatgatgggtcacagggtctgatagttttcgggctcccatctagagagtggtaagtggttatttttgtgatttttttttttttaaatttgtattttattgatactgggcattgaacctaaggcctcgtatgtggtaggcacactcctcttagtgagctatgcctaagttctagtatttttattttgtgtttgtgtgtatgcatacttgttggtacacgtatgcagatgtacgtgtatatgcagatgcatgtctgtgcatgtgtatgtagagaccagaggatgacctcagctgtcacttttttctctggagacagggtctcttatttgcttggaacttgccaactaggctggactggctggtcagagagcccaggggatcttgtctgactctgtctccataaaactgggagtacaagtgcacaccagcacacccagcttcccatctcggggcctctgcttgcaaggcacgtactttactaactgaaccacctctccagcaccctgatagtttatatttagtgtagaaattagcacatcacacacacacacacagtatcactgctatgtagttaatgttgtaaagggacagtggcaaccttaaaaaatcattatacatcttaaatactctatatagtgtattttgtgttttatttttttgtgtaggttttttgagagcctcaaagaggctgcaggtctgggctggagagatggctcagcggttaagagcactgactgctcttccaaaggtcccgagttcaaatcccagcaaccacatggtggctcacaaccatccgtaatgagatctgatgtcctcttctggtgtgtctgaggacagctacagtgtacttatataataataaataaatcttaaaaaaataaaaagaggctgcaggtctgacacataagttcaggagtactgataccagaacagtctttggtttctgttctgctcatcaccattggtccatttaaagggctatctgctttctccatatatatcggttcattttgtctgtgtgtctgtgtgtagtaaatgagtacatgtgtgtgtgaacaaatgtgtggaggccagaagatgccttccactctgctccttttctccgtctaagccttatttattgattgatatactttgtgtttgtgcatgggtgtgtgcgcatgtattcctccaccaaagaagcataagatctctggagctggagttagaagtggctgtgagttgctgatgtagatactggaaccagatgtggttggaaaaggctgaaggttcctaactgggatggcagttcttactgtgaggtgaggccttggaggccctgtttctgggttaggaactgacacaaggtggaaagggatagggaggtgtctctatttgtgtgtctagaataatagcaaaccacagattgggcaacttaaagagagaagtttatttctcaccatatggatgctgagaattgaagatagtgtacttactggcagggtccttgtctggtgagtgctgcttcctgcagaggaggagtgcagggccaggtgatggaaggtagataaagaaaggccctgtgagcctcttctgtgagagccttgatcccagccacagagaggagctgtgtgacttgggcagcccttcccttctgctcccagccagttccagctcctcagctttggaggggcagggaaggcaggagggtgcatggctgagagagcaaagcacatggaaggcagccttttgaaagtggttggtgggctggtgagatggctcagtgggtaagagcacccgactgctcttccgaaggtccaaagttcaaaatcccagcaaccacatggtggctcacaaccatctgtaatgagatctgactccctcttctggggtgtctgaagacagccacagtgtacttacatataataaaaataaataaaaaaaaagaaagaaaaaaaagaaagtggttagttggttgttttgtaaatgtctataatgatgtatttataaaagttttggtgtgaagagcagaacttttgtgattgataatgcttttcacattccatagattgccaagtgttgccctttaattgtacaactcacaattgaacaagcacatagttcttttggagtatcttctgttcttgagtctttttatacagcatagtactttcactgttctcaccctgtatcctgcatggatagaaccctaatgtttccgtttttacaaatggaggccagcgtatggctgtcctgtcagtcactcgtcattactttgcttcatgaactaggttataggttaagtcttagagaagtttgtttttattattgttgtatttttagttgtgtgtgtgtacacgcacgcacacatgcacacatgctcactactgtgtgcacagatgctgtggtgaacaagtggcagttaaaggacttgagaaagttggttctcttcttcctcagaaccaggcagtccaggcacctgtccccgggtgttaaactatcttgacagccccctaaggaagtgttgtaacctcataatgtggatatttaaaaatcacatgtatacagttaaaaaagagagtgaacaaaatcagtgagtactttttagtagtttttaattttattttatgtgtatgaatgttttgccttcttgaatgtctgtgtactgactgtacctttggtgtccttggaggccagaagtaggcattggatcttccgaaactggagttacagacagttgtgggtcacgatgcggttgctgcgaatcaagccttggacttctggaagagcagtcagtgctcgtaactgctgagccatctctccagccccagatgcttttatttaagtatacttactttgagttccactgaagcagcatttattgaattgataggatttggtttacctttgttatatagaaaaacatttcattaacgtttctaatttatcacaaataccacagactttcagtttagtgttctggtttactttcgttaaatattaggtgtctgtatttgctgggtacgatattttaaatgcctttgggggttatgtaataaacaaattgattgaatgttttcagagtgccacagttttccctgcctgttttatagtatgggaatcatatataatgcgttgtaaaactttcttttattctgaaaggctcagtttgcttcagacccaggtacaggcagagatcaagattggttctaggtagttcatgttatctatgtcagtctagatcataggtctttagatatgcttattacttgattttatttcaacatctggaacagtaagaaattgtccctataggtggtagaataatgaatgcagattggctgatagtccattggttaaattcttgtgaaacttgaagttcagtagctcagtgatgctggaagtctaccccggggtctctctcttgctaggaaagtgctttctttgggctttgtgtctgagagtcagacagaggctgtgatattgaaaagttagcactttgtgattccgatcccttgtggtagatcaaggcgtcaggtgttaaatttaactgaaactgaactttatttttgaaacttgagagttttaatagaagagtatggttgttttaggtaactttttgtttcatattctgctcagagtcttgtatgatctagctggatgtactttcttagttactcagagtaggttgaagctgtacacaaactgctaccgcagaacaaaagtgctgatgcggatgaatcaagccctgtaatgtggactgaaaggcaaacctcttctctccccctcttggaagaacaagcactttccttgccaatgaggactgactttaagtggaccagctgtccatgttgggagcatagggttgctaaggggaccagggctgtttgcagcagaatgcagctgagagggcaagttcttgctgtgtgagctgagggaaagaatgtggtgtgactgtgcatcactcctaatcacagagtgctgtgtgggcagcatggagacgatggagacgatggagacgcagggctgcgagcccatgctgtgtgcagccagaagctcaccggtcacgggcaaatgtctgcctgcctgagaaacaagagtgaaggtcttttgcttgatgacataaacgttcattatacccagttttaaaaaagtatttggcatacatgtttacgtgttccatctcatccttttagctgtggatacagtgttgataagttcccagtttaatgatgtgttctttgcggttgtatttctttgacttgacactttaatcaggattgtttggaaagccccatcccccatctttgctattctaagtcctcagacctcagcctcccaagtaggtatgacagcaggcttgccctgctgtgcctgccttagctgtttccctccctcgccccaccatgttattgctgtctccaaggaagagctcgcctttgtttgtcgttgtttgtctacttgttcttcgtttctgagcctgggtcttattttggagtttataggcctgctcaagctcatgtctccccagcctttgcttctgaggctaaggagagcttatctttgtctgtatgtgtgtttgagacagtctttcccagaatctggggcttgccattttggctaggctgccttgcccggaaggcaagggggaaatctttctgtttgtgtctctccagtgctgtggctgtagccacaagccttcattcccagctttttaggttggtgctggggatctgaccaggcctccatcctagtgtggcaagaactttacctgccgagccatctcttcagccatgtgagaccctcacacattgttcatcctctaatgcatctacagataggttctggtgttgcatttagtaaaccatgagatgatttaaagggagcttacggttgggagcacgccaactcttggagagagctgcagttgagttctgagcacttgggtcagatgattgccacctgtactgcctgcagctccagggcatccagtgacttctcttgccctgtacaggtgcgcatacacaaatggctttcattcttagagatgcacacccatgcagagagagaggtacatcagcatgcttcaactctgacacacctttactctgacatgagcactgttatgcatacttaagtaaactctacagtagacacagactggcacctgtattgttttggttttactttttccttctccaattccaacatgtatggattctttcgtgttttgttttgtaaggcagtgtctgatgtgtctcaggcttacttccaacttgatttgtgtcatagatggcctcgagcttctgatcttctgcttctacctcccaagtgctgggaccacaggcgaatgctaccgtgttccgttgatttagtccagaagatggaatgtagggctccacgcacttaggcaagcgctctgtcaaccgagccacagcccatcccaaagacagacttctctttttttttttttaagatttatttatttatttatttatttattgcatatgagtacatcaccattgctcccttcagacacaccagaagaaggcatcaggactcattgcagatggctgtgaaccaccatgtggttgctgggaattgaactcaggacctctggatgagcagtcagtgctcttacccactgagccatataaacaaggcataagaggtaacattaccatgaggggtagtggagcagtcacagccctgtcagcctcacattatttaagtcttattgcccaggccggcttcagctagaaatcctccttcctcggcctccagagctgccgcagcacgtggctctttattttcttaggcagataatctacttgatttgacaaggctttgtttgattagttttgtaattatataatttgaagggtaactaaagaattaaaataatttgacctctaaattcatttgcctccctgatgttccacagcagatcttgataagcgttgccgctgccccaaacaagcagcaggtgatccgttcacagccctccccgctcccacagcagccctgaatttcagtgtaggatgacgtgagctgtctttcatttatagtttatcttagaaagaagtcaggccagttgtggtggtgcacgccagtaggatttgctgaaggaggcagaggcaggaggatcatgagttggaggttagcctggactgcacattttaaaaaagaaagaaaaaagtcaggctttcgtggatgagtaggttttgtttctgtgtgctctgctttactgcactgtcctgtcttgtcctgaaccattgctcacagagatttgtcttacatatctatctgtgagttcaaggccagcctggcccataggtgagttctagaccctgcctcaaaacaaagtccttaaaaaaaaaaagaaaagaaaggattgcatatggctccaagccccagcactctagagacaaaaagatggagagtctgaggcagcctggactacgtagtgagttcccacctgagccacatggttacgtgtgccctagcctagggcttcattcatactagactactactgtacccactgggctgcatgcccagtgccctggagcgaaccttggttttttgtgactttattttttgttactttctctcttgccaagaaagagactatgctccagttttataggtttaaaaattttcctctcatctatttgaaacatgtctattaaaaagtggtgataactattttcataaaattgtattaatttaaaattacctcttctaatctcagtatgaactttttaaagatctatttatttacatactttatgtatatgagagctatttttgcatgtgtgcctgcatgatagaaaagggaatcagacaaaagagggcatcagatcccatcacagatggttgtgagccaccatgtggttggttgctgggaactgaactcaggacctctaaaagagcagcctgtgctctttaccactgagccatctctagaatcctctcagtatgaatttaattctgcatttttatgctaatttttcacaaactttttgtaaaatttagtcaaaagcagaatcctgttggaagtatgtcacataggaagagcacgccagggcctggaggtgagtgttaattggcactctccctacaggagagagagttaccagtgtcctttagggaaagatggatcctagactggggcaaacaagcaggacgcacaggagtaaaccctacaaagatgggaatgtgttaaaggggcataggaaccaacgaaagccaaaattgaaatcatttgcttaacaaagtcatgtaatgtagttttaacaatactcagtgtaaaagaaatatccatgggtcagcagtggggtaaatatgtgactgggtagaatcaaagcggggaaaagaccgtcctcttgtgcagaagaattccaaatgattggccagtgccacagataaagcccagcagagagactgcgcacctagcacactaagcagctagacagtgttctgtgttcagagagaactgaagctgcccccaacaccctctcctttcttgtgtgtcatcctggagattgaacccaggatcttctgtacagtgggtcagagctttctcacccacccaccccataatgcagtggaactccgccccttgaaggctaacaactgtacttgtggaaaggccttgtggcccacaccaccttttacctgcccaggctagccttaagcttaaagttgcccaggctagccttacgctgaaagttctgctgtagccccttgagtctcctgagggattgcagcctgcatcgccatgcttggcttccatactgtgtgggaaggagctggagtggagtagcttctagtggagaaatggcaggcccagcccagccaggtgaccaggccagcagcatcagccacagtcgtgctgatagtgtttcaagggctgtaaaggtctatctcctatctcctatctccagttttcccaacctcataatcctcgtctggttataagaaagacaggaaacaaattccagcaaagagctttataaagtgtttaaccgagcattgctcagaactggaggagtctccagaactaaggaacattgggagaaaatgttacagccaagagaagccttgagattgtaggattacatagaagtatcttggaaggaatggaaaaacttatgtaaaagctaagtaaagccaacaattaagtatactttaaaaaaattaaattgttttttgtttttgagagaggatgtcacactatagttaggctggcctggaacatactgtatagcctaggttggcctcaaattcatggcagtcctcctgccttggcctcttggatgttgggatacggagtaagctcccatggtggtcttaagtgtgtacttcagttgttccggcacaccaacaagcgagccgtgtaatgtaaggtgtgagcagcagaggaggtgggcacgggtctgtggggtctccctgcaccgtcatcctggggtgtcttgaaagctcaagcctttcatcccagaagagacgacctcagactgtttttgaaagccataatttaaataatgccatgctgttgagcagtccatgtttttattttgttttattttaaaattaataaatacagtaaaggaatactttgccctggggtcctgggtaaatggttcttgtaaagaggccctctgaaggcatagtcatgaatgtgggggttctgggttttgtttgtttgtttttttaaagtcttaatccctttagaatatttcaagtttttgtttatttatttatttatttattatcttcaggttaaccaaaattcttataaaatactgactatatttcatactaaatttttttgcctgtgtttatattgagtttctgtttgtgtttagcttaacttgtaaaagaaaggttggagcgttagtgttgctaatgtgactaaccctgctttcatataaaagcagccctgttgtaattcaggtggaggagtttgggttttcatctacaataatggttttgtacaatttttttcttcctagcaataagtttagcacagttttagtaatttaaggagggcactggttgcacgtgagtaacatttactttgcagaataatttcgcattaaactttgaatgctgtgattactcttctgttaataaagcaaacgtcatcagagctctggagagcacacagcactcactgctttctaactcgggggtgtggggagaggaagtgttctgaatattttcccttaccacaggattttcttagtattgacaaaataaacacattcatttctggcattttaattaaagtgtgaaaacacatatgctgccaattccagtcctaaacaatctcagccttagtagtaacttacaggctgtacagtgactgtaccactaggtgagaagatgaactgtttattcatggatttttttttcaaatttttagtagatagaaaactaatgggaagaaactaatattcataaactattatttcagtagtttatgatgttctacagttactttctttttttattatttgtacaaatattagttttagctgaagtaactatttttaatacaccaaaggttatcactatgtagaccaggctggctttgaactcacagagaccctcttgcctctgccttcttgagtactgggattaaatatatataccaccacacacagctcatattattatttttaaaataaatttaggggttttttgttttggtttggtttttgttgttgttgttgttgttttgagacagggtttctctgtgtagccctggctgtcctggaactcactttgtagaccaggctggcctcaaactcagaaatatgcctgcctctgtgcccagctataaatttagttttttatgtgtacgtggggtgctcacattggtcagttagtgttggatcccctggaacagagttacagatgattaccagccaccgtgtgggcgctgggcacttcatcagattctctacaagggcaaccagtgctctgctgagggagctctctagccactatttgtttcctaaggtttcaaatagaattataccgcttttcctgtcgcccttccttttacccttcccctgctagtgactttcttctcttttaactatgtcccttacacaggcagaagacagacagacagacagacacacacacacacacacacacacacacacacacacacacacacacgtcaccatgcagcctgctgagtcactggcattaccgacatgcacaagcacatgtgtctagggttgagcacttggtttaaataacagtcagggccttgtccccgggaaggaaggctgaatctttttctccgaattgtcagttgcttgtagctcttcatctagggtggggctccatgagatttctcctatctcaactagaatctcaattattgttgagattattcaggccttgtttaggcagccatgttgttgagatttcatgggtgtagtttccctactacatctagaaggcatgttattcctttttaatttgacatagttgatagtggtagtgtgtgtgggggggggggggcgacttagcagacattggttctcctcccattggatttccaggaacagtaaaagcagagctttattatctatataatcacttccttttcactgcacgtgtattacattcaggtctgagtcattcatcagtggagagaaaccaaagagatttaagaagtcacacagagggctggagagatggctcagtggttaagagcactgactgctcttgcagaggtcctgagctcaattcccagcaaccacatggtggctcacaaccatctgtgatgggatctgatgccctcttctgatgtctgaagacagctacactgtgctcacatacataaaataaatgtttaaaaagaaagtcacacagaagatctgaatcaaatcaaatgcccacgacacccatggtccagtgagttgttgttcttcatattgggagtgctttagtttgtttgagactgagaatgtattttcatgtacaaagtatgcttttaaaggaagcacaacatttttactatccagtacacctcaaatagtaggtatttgtactgaaagtttttttaaattactttatatcctgataccttcacatacatagtccctttctcaatgcccctccccccctctgaaaagcaagcaaatccacataatacattgttagctttgctaacagtcaaaacaattaacacataaagtgatacaatggactgcagtggcactcagctgccatctcagtgtgcaggagcaagaaggagggggaccataaatgacagcagcctgagctgaacaggggaccctgtctcacccccccaaaacaaacaaacaaacaaaacaaaacaaaacaaaacaaaaaaagaaaaaaagaaaagaaaagaaaaaaaaaaaaagccaggtggcggcggcggcacacgcctttaatcccagcacttgggaggcagaggcaggtggatttctgagtttgaggccagcttggtctacagagtgagttccaggacagccagggctacacagaaaaaccctgtctcgaaaaacaaaacaaaacaaacaaacaactcaaaacagacagtaacaaacactatatacaccaacttcaaaaggaggccagaggagccgatgtgaggcacagccgttacttcatggacagtcaggctgatgtctctgagctacagagtaagttccaagacagccatagctacatcgtgagacctgtctcagaaaacaggcaaacacacaaaatgtgagtaaatgtttttcaaagatttaaaatggaactttgaattgtttttaagtccttataggttagcatactgattctgtaatatgttcatcttcaaaatggatttttctgttggttttttttttttttttttttttgccactcttgtttacttactataaacttactcagtgtggaagtgggcagatgctgagagcccccagcagagaaataaggaagaacggtctctctgagtagagttaaagctttgagaaaagatgtagacagtgggagcagagcctcaaataagaggagtgctttgtgatcggagctgtgggcacttgtctctttctgcatatgtgtactcacacactaatgtatttgagtgctggagaatggaagagtatatagaatggggcttcttaaacatttttcattcatgaccccttttgtgtgagaaagtttcttataactataggtgtatgtttatgaaataagtatacaaaggaaacagttactgataataaatcaggaagtatttatttatttatttatttatttaatggttttttgagacagggtttctctgtatatccctggctgtcctagaactcactctgtagaccaggctggcctcaaactcagaaagctccctgcctctgcctctggagtgctgggattaaaggcgtgcaccattttttggtatacatatagttttaccaaaagcaactttccatgcttatttctacataaaaaataaatgttgggtgaatatgcgaaaccacaagacacagaatatcaaacatcttcatagttggttgatatttgtaataatcggtgttgagaatgttcatacttggtatgaaagtggcaagagggggctggagaagatggctcagcggttaagagcaccgactgctcctcccaaaggtcctgagttcaattcccagcaaccacatggtggctcacaaccatctgtaatgggatctgacgccctcttctggtgtgtctgaagacagctacagtgtacttagatataataataaataaatctcttttaaaaagaaagaaagaagtggcaagagtatgtttagaaccattcctgtcctaggccacaccacaatttactgaacaacttctatggcacgtgagtgagcagctcagtcagcgttctctaaaatcaagcttcccgtccggtgcggtcagagatggactcactgggcacttacctgtgggggtaaagacaggaaagtgctgtctgtttctatagttaagcctttatgtttgtacaggggcagaaaactgtgtggtccatagaagtgctgcagttcccagcactgagcgttccccggcctgagccgaggtgttccaagctgtattccctgatgttggggaacatggatagtgaagtcacgcattacactgcagtagactactgtcagaaacacctcacactcattgcccatttgatactaaagttagtttcgctcattgaacattcacacactttgcctggggctagcaagccggctagtagctaagagcactgctgtccatgagcagagccagggtccattctgctcagagctgtctatttcagccccatgggatccaacaccctctctggcccgagcaccagacatgtttgtggtacacagatgaacatgcaggcaaaacccatgcatataaaataaaaataaattttaaaaacaaaaaccgggtggagagacatcccagcagtcaagagcgctgttgctcctccagaggatgcaggccagaggcctcacacccacatggcggctctcaactctctgatgccatggtttagcctccacgggcctcatgcatgcacgtgatacacagacagacatgtagacaaaacacatgaacatacattaacataaaaatgatttttttaataaaacattatgtgaaattctcaaagaattaattaaaaatatatttaaaaactcaaagcaaatccccttttattgttgtcacatattttttgagacctatagtttttaagaagccatgttgtctttgaaaaatggtgtctcagggctggacatgtgcttcagttaagtgcttgcactcagcacggtgacgcacgccctgggcccaactgctggaaagagagtcattttttttctgttatttctaggttaaagtaccaaacgaagacctggtattttgaaatatgattaatctcctgatgcagcatcagaggctaacaatattaatggccagatctaggtaagttgaaatttaccttacaagaaagaaccaatcgacatcattttgttgaatgtaaccacgttgtgtgttgatttgctgactcccctatccccagaaaatgaggacaaatggcttttattaaacaaacacagcatttactaatatagaatattcagctgatttgtggaatttttcatcacagaccgaaactccctcttgctaaatgcactcagatatctgtgtactgggggagcataagacccctcacataccagctgagttctgtttaaaatgccagtgcttattatgagctatccacagagatgtggccttcagataccagtctgctgctcagaatgcagactccagcgcccgcctgtccctatgcctaggacagggtggttcccaaggagggtgcagaaatctgagtgcagattccccattctttaggcagtgcacagccgttagaaccaagacctcggcatggcacctccggatgtccacatgtgaatgggctccgcaacagcaggcacatgtgcgggaggactcagggcaccggacccctcattgcagaaccgtgcggaccacaactgccagcgttcatcagctggagttcctcactcgtgctgagctgctgctttcatgctgaaacccttgtccttcgtcctctgctttgcttctttcctgaccagaacatcctgtaatatctgtctcttctaccctcagaccctagatcaattaaatcagtcaggccctctaactgccgagtgcagaatcctgactctcatcttctgctgaggtcctcgaatctaaaaatcttcttgggcactcagttatttaccagtctcttcagttccctcattttgcaacccgtgtcttgtattttataagatgggagatgccatcaacttcagcttatttgctattatcactcgtctgccctttagtacgtgtgtgtacatatgtgtatatatgcacatgcgtgtgtatgtgtgtgcatgtgtgctgtacaggtaactataggggccagaagaagacacctaatcctctggacctgaagtcacctctctagtcccttccgttcttatgttttctcttgcctcagagtctgccacctctcggtaggcgccacagtctggtcactgtacccatctccccttctttaggttctcagcccactctgttagttaggctcccccctccatgcttcctctctgtgctttaaaaaaggaaagaaaaaccctttttctgcccattgattgaagatctgcttctttaattacgtgacacctaagacggtggtacgtggtgctcttcgtccttagaagacttgagacaggacagttataaagttgaggccagccttgccatacttacgtgtgtgggcttgagtgtatgtatgtgtatccatatgtgtgtgcatgcacgagccctcagaggtcagagggcagtggatcctggacctggagttacttgggcttgtgggccatcatctgagtgctgggaaccagacctctgcaaaagtgctaagtcctctcacgtgctaagctgcctccagccccggctctccttcacttaatagcttcagtggtccatggagtctgctttctaagctcctccctcaaacccatatttccatacttagctctttgtttgtagcctcaggttaggattgtcgcagctgagtccgtctgcaccagaagagtccccagcacctacacagcagatagaatagacccttgcttccggctcctggggacagtcagccactcagcactgttggctgtggctctaaagccatgactttcttcctcgtgctactgctgttgtgttgctaggcttttatcctagttcagttttctcactcaagtgtatcctgcgggcaactaaattttaaacacacacctgagtatctcccctttgtggttaaaatgaatgagttttaaggagggtggggaaagaatgctatataattttaagattttcaaaatgtttccatcaattacatcttttttgtaaacttaaaaaagtttacaggctggagagatggctcagcagtaaagagcactgactgctcttctgaaggtcctgagttcaaatgccagcaaccacatggtggctcacaaccatctgtaatgagatctaactccctcttctggtgtgtctgaagacagctacagtgtacttatgtataataataaataaaaaaaagtttacaaaatttaataatttagcccttcttggtaaaaaaagaacaacacatatggagcatatctgtgttggatagtatgctagtgccctaggaaatgaagaggacatgggctattctcagcgaggtcccagtggagtgagtcagtacagaacagaactgttgcaacaaaacatggtaaaaggcctcgacagttcactgtggggatactggcagttatcactccgcaggctcacagatggcctaaagtctgcacagatgagtgtggtctgcttctactggaaggggcttctaatggagggagaacgggacataaatagatcgccaaccccagttcctgctacttagtggatactttgctatcaggacagcctgggggaacttagatggggatgggtgagaagtctaaaacaattctaaatcagcccaatagggctggagttgggaagtttaatcttgagaaaaggaagccacagaaagctgtgtggaagaacatgatgcagtaggctaatgtgggagaaggcagtctgttactctgaggaagaggagggcttggttgttaaacctgaaagtgggaagaagtgtctaatggtttcagtcagagctgtgcttataaggttacggcctgtgtggcttcattccctgtgtagcacacagcagggtcactccacctcgctactctgttagaaggactgctttgacattctcctgtgtttatttggaatggccttgaacatgaatctcacctctgtaacctttcctatctgaccttctgaggcaaagaattaaatacacaaaatatcaggttgcccagtgctgtgtgttttatgctactggtggaatttttttttttttttggttttggttttggttttggttttggttttggttttggagacagggtttctctgtatagccctggctgtcctggaactcactttgtacaccaggctggcctcgaactcagaaatccacctgcctctgcctcccaagtgctgggattaaaggcgtgcgccaccacgcccggctttactggtggaattttaagttgacctttttccctactaatgtactgtttaagatttgatattgtatgaactctttgatgtcaccaatgaactcttgtctaatagaatatgtaaaaaaggtactacaatgagaatcagaataaccgatggctaaaagtatagcatccttttttttaagttgttttttaaaacttttttttttttaacttttttttttttttttggagacagggtttcactgtgcagccccggctggcctgggacttgctatgtaaatcaggctggcctcacagagctgcctgtttcggctctgaattaaaggcatgtgctacgtgctcaacttttttttttttttttaagggagagtgtgaactttctgatacataaaagattggtttcttgattaactgttgagtgattgtaaactaattatttagatagtggcataaggttgtagagtgagcagactgttataaattaaactagaaatgtgagtttctgtggcgtgtatagtttattcttattaaaagcataaattgaccaactagttgaatgaattaatcctaaacatgaacattattgggcattctttcctgcatcgaagcaccatgcttacacgggatgctttgtgggcttttcctgttttggatcttttgtatcctgtgtataataattttcttcaaattattttctttgtagtgctcacatggtcttctgaagaagccatgggtagctgttgtagctgtccagataaagacactgtcccagataaccatcggaacaagtttaaggtcagtaaaaccagcagaactataaatgtttctcctgcctacttggacatactactcagacattgatctatgttgccttttttttttttttttttaagatttatttattgttataaataagtacactgtagttgtcttcagatgcaccagaagagggcatcagatctcattatgggtggttgtgagccaccatgtggttgctgggatttgaactcaggtcctttggaagagcagtcagtgctcttacccgctgagccatctcgccagtcccgtatgttgcctttttaaaaatccccctcctctcccacagtgtgccttttcgtatttgagtaaacaatggtgctttcttactaacagtatgggttgttgctctgttcttcactgctgcagcaaacacctaaagctaagcacttacaaagcacagaggtgcgctcagttcacagctctgaagaaaagacttcagtcagcgcagcactggccctgcccaagagcccctttgctagactacctctgtgtgggaaagagactgtggactgcctcaagtctcacaggaactgtattgatcccttttgaaggcacacccccaatagcataagggcctcccaccatgcctcagctcttaaaggtcctaccaccccaatactgcctcagtgatgaccaggccgcctgcacatgagctgttaggtcagaccatgataggaatcactttttaattttcatttggtcctttttatccagataatcacataggtttggtaataatttttttaaatgtcattttacaattttctcgtttgagactataagcttagcacttgtgtgctttctgttactgtaacaaaatcttacatggaagaataattctctttcgggtcagtcttagaggtttcagtccatggtctgtagcccactgctgtaggatgtgatgtgatagcacctcagagcagacatgtactatagaccagaatcatgtatgtcacggtcagcatgtagaaatcctcatcggagccacgtctacagtgactggaagacctctaaggtctgacgctttgtcagtactgctgccggtgagagtcgggggccctcaccgtctcagacatccttgggcatgcttagatcatggggcttttcttagtacaagagtctcgctgtatctaaggctgcgtgcaatctcggtcctcctctttcctagctggaactgcatgcatgtaccaccacgtctggcttgacttcttaactgcactgctatccatgctgaggttagcatacagttagtcctccttcacccttcgtagctgctcccagattggttagtgtcccgtacactcttatccccctgcgctgggggtccttgcctctgcatgactcctatctgtgtaacttcaagccctgttacttcacagctttgctctcttgggcagtttgtgtgattagtaagtggaagcctgtggtctgaggcgttaggaagatgacatgaagaatgcacatggagatcatggagatcacctgcccgtgccccaggaagagcagtttctctgtgtgttaccctttagtcttagtctctggccattttctatgttgcaacactgcgagtggaacctgggacctcaggcatgctaatcccctgctccaccattgagccgtatacccagtcctttagatggactttgtgcctgactgaatttggtctctttgaaaggtgctttctttattctgtttcagcatcgtgccttcgtgctgtgccgtgcatcttgtgagccacccgatttcctctgtaaagttagtcctactccggcctaaaggaggggccgtggtttttttcatccaccttaggctaccgtcgccaccttgtgcgggctgtgttgcattcatttgtcaacaatcaaaccgtctgacttggtgtttgtgtcttattaagtgggaatgtaaattctctatcttactgggacatagtccattcctctacacacactggtggtgagtgaagcagcaagtggagggaagctgacagaattctcagcagtgcttcttgtctaaaaggtcgtgaatgttaagctgctctcatctccttctaggtcattaatgtggatgatgatgggaatgagctaggctctggtgtgatggaactcacagacacagagctgattctgtacacccggaaacgggactcggtaaaatggcactacctctgcctacgacgatacggctatgactcaaatctgttttcttttgaaagtggtcgaaggtgtcagactggacaaggtagggagagcctttcttttctccagatgatagtgtttggaagcattgcacttccagttactctgaatacaacatggcatggagacacaggcttggccaccgagccctcggtggaggtagacataagttatggattcatttaccaagcatgcacgagacactgtgcccttgatagaaataaagtgttaactgtctatgtcagcagtggagctgtgcagtagctaacagctttaacatcctgttccacaggcagcaggcagagggcgctggcctggcctgggcttcccagtgacacatggcctcacaacacaaggccacacctcctagtgctgctcataggaactagattgagatatatgagtctgtgggagccattcagaccgccacggtgcctgtttcacaatgtcttcctttctgagtgttctcacaacttaggaaaagtctcattacatagatccattatacataaagtgggctttattgacattttcacaaatgtacataataaagtgtgatcacacccacctctcactcttgctaatccttgtagctagatagtcccgcccccccccccccccccaatctactttcacatcatttggtgtgcaggggctagagggatgacagcttggggaaattgagtgggtttcatttagaatcatttacggggacatgtgtgagggtttgttcaggggtataggcaccttaccaaaggctgccccattgataagtatatctttcccaaagccccttgagcccgctctcctacccaagggtagggtatgttgatgggtctaataagttcagttctcatgtgcacggtaacagctgctggcatgcccagaaatcagcattccagaccactccttgccctttctgtgagtctgacagttttctgcctttctgtactgttccttgagccttagaggggaaatacgaccaaatgttcaacagtcatttgtttttggtcctttgaatcaatctctgcagttattgctgcctaatgcaaaaggaaattcttttgaccaaagttcctatagcttgttaaaggcatggttaccatgttttgctcttgatttatatttttaggaatttttgcttttaagtgtgcccgtgcagaagaattatttaacatgttgcaagagattatgcaaaataatagtataaatgtggtggaagagccggttgtagaaaggagtagtcatcagacagagctggaagtccctaggacacctcggacacctacaagtgagtagccctttccttccatgtttgcatgtcagacgttcatatggatatctaatctataacagtcagaaatggccgggcagtggtggtacacgcctttaatcccagcactctggaggcagaggcaagcggatttctgagtttgaggccagcctggtctacagagtaagtttcaggacagccagggctatacagagaaaccctgtcttggggggggggtgcagggggcggggggggggtaaccagttagaaatggtgatgaacagccacaaaacccctgctagctttatttataaacattttaaaaatgaaaacattaaacgtgtcacattgactagactgagagttcaaggtaggagactactaggtcagtgtgggaatgcttgccttgcctgtgtaggggcgggggtttcagcatcagcactacagaaaaacagccagtgtcaccagctcccagtgtgcattagtctcagtctttttattccctgccctactccatgttctgcctttcttttcaacgcaccaaacaaactgcagctccagggctcggtgctcagaacttacctaatgggtatccccgctacccctcgtttggagacgcttcatcccacccctcaagccggcatccttcggtgggaagtgctcgcttaccttcagtcggtgaagagtccacacaccctttgctcgtggctgaggaacaagtaaggtctaccactgtgcccggaaaccgattctgtggggttaaagtgtgcctgtgttagtgcttgaagcttttactcagtacggattctaacctcactggacatcacttctgcatcgacagctgaagaagtggttttcatttgctaccctgtgctgtagtgcgcacaaatgtcccgggcttcacttttctctttcctttctgagtaaggggttccctacctggccctggctggcctgggactcacagagatccccctgcctctgcctcccgagtgctgggattgaagacactttcgagtacttagtctgaccatagagaggtgcagctgtggatgaagaaaggcaaactaatagtcggctctgaacagaagagccgtcagagggtcagggttttatgctgctttgggtgtgttggtctttgtttccagtgagctgcacatggaaaggcagattgtgctgttgaggttgtttggagctctttggagttcctcactacttcagatatggagccaagtatttgaacattatatattatcagataagtttatcctttgtaaattgcatgatcatttatgagtaacagtttttttagtgtttttaaaatatagttctttagccgggcgtggtggcacacgcctttaatcccagcactcgggaggcagaggcaggcggatttctgagttcgaggccagcctggttaacagagtgagttccaggacagccagggctacacagagaaaccctgtctcaagaaaaacaaaaaaaacaaaacaaaacaaaaaaccaaaaatatagttctttgcatagtaaacatttttatattatttactataattatatctactttttcatttcattttgcattttgttttgaaccctaaaattcttaggtagagtctgtcagatacttgcagattgtcttctacaatactatcagacatttctaagcagtgacgacaccttactaggtggcagctattttgcatctataaattttgtatagagctcttacacagggtttccactttgtcgatggagacagagctgcctcttccttttgtgcttgttgttccaaacttgtgagtcatgtgttaacacctgagagctgcaaaaagagaagcctatttggttctgacttctttcctttttcctttccttttctttctttctttatttgaggggccggggggtggggtggcgtcctgttatatagcctgtgatagcctcacacttgtctatcttcctgcctctgccaggataccaggattatagatacctgtcaccgtggtcagctgacttcctgatggatgcaatactatttcaatataatgctgcatgtcatttttaagtagttattcttttttataacttactatttcaatataatgctgcatgtcatttttaagtagttattcttttttataacttatgagatttctgcatactttccctacctccaattttttgattaggtaaaaagataggtgcaaacattttaaggtagcagtatatttaaagaggaagtgataaaattaacaaatgtaagccaagaatggtggcacaaaccaataatcctaacatttgggaagtagaaacaattgagtctagtttgatgctagcctggactacacagtaagaccctgtttcaataaataagtagaatgaattgacatgaccagtatctttttaaacattttatgtgtatgggtgttttgcccatgtttatgtgtgcagtgtctgttgaagagggcactgtagttacagaaagttgtgagcggccttgtgggtgttaagaattgtgaactcttttggatcctctggaggagcagtcagtgtccttaccactgagccacctctctggcttcctgattagtcagcctgttcttgttttgtaccatacacttgactgatttgctctgtttctttttaggtacatacttatgttaacactacaggtgtgcaagaggagcgaaaaaaccgtgcaagtgtgcatgttcccccagaggcaagggtttctaatgctgagagcaacacaccaaaagaagagccgagtaaccccgaggacagggacccgcaagtgcttcttaagcctgaaggagtcaggtttgtgctaggaccaacccctgtccagaagcagttaatggaaaaggagaaactggagcaactgggaaaagacccagtcagtgggagtggagcgggcaacacggagtgggacaccggctatgacagtgacgagcgcagagatgtgccccctgtcaacaaactggtgtatgaaaatataaacgggctatctattcccagtgcctcaggggtcaggagaggtcgtctgacatctaccagcacctcagacacccagaatatcaacaactcagcgcagagaagacctgcactattaaactatgaaaatttaccatctttgcctcctgtttgggaagcccgcaagctcagtagggatgaagatgacaatttaggaccaaagaccccatctctaaatggctaccataataatctagatccaatgcataactatgttaatacagagaatgtaacagtgccggcaagtgctcacaaaatagactattcgaagcgcagggattgtacaccgacagtctttaactttgatatcaggcgacccagtttagaacataggcaactcaattatatacaggtggatttggaagggggcagtgactctgacaaccctcagactccaaaaacgccgaccactcccctcccgcaaacccccacgcggcgcacagagctgtacgctgtgatagacattgagagaactgctgctatgtccaacttgcagaaagcgctgcctcgagacgacggtacatctcggaagacgaggcacaatagtactgacctgcccatgtgagccgggaagcactgcgtccttctccgcaaggcgttcagagcgaagatgcagtgcctcctcttcatgtctacactagctcctttatagactggtcttctgctctgaatatttcatctttaaagggaattgatgcagagcaggcactccttagaacactaatctcctgatagctactcactgtccagcagcaccccattctcacagtgcctacttaccacgagaattgaagtgaatgccgtgctgggtgacctgtcctcagcatcctgggggatgcatagctttcatgtctgagttgtggttggcgtttgaaccttttataaagtctcttgataatgcgcattgctaacataactctgggccctgagaggaaccctcatagatcactgttcacagggtatggtcgccagcatggaacgtgaggattttatttcattagttaaaggctttttgtcttgggccaaattcgtgtcaaagaacaaggagaaccacacttccttttgtaccagtcagcacctctgtcttgagtgtgctgtgattggaaggcagccaggagacagctctgtgtccccacctcctggtgtcatctgaagggcgtgtccagatagcatcttactcagagttaggatgggcttaggagtcagtctcaggtcactttacccaaaagcatttgaaagtctacccctgatctctcggtgtgtctgcggtagattactgacagcacacatgtgtctgcagacactcgtgccattcagtcccatggagcttcagtttcccctttggtctttgggttgtcttaccttgtatgtaatgcttttttcaatttacaacacaatgtttgtgtatcgtcttggaataggattgtgtgtttgctgttactacttaggctgcgtttttgttgttacggtcctgaaggtccatttgggactgactgttattctctagctgggttgcccttgtccagtatttatttatctcctgcttgcttttcaagttgatgaaaaaaatcgacgtttgggttttaaagttcatttgtgtccatgggtgatctctttagtagctgagaaggaaaggaagagactcttaaacatgtgagtccccgaaggtcctgtcctcgctggggcgccctgcgctgcactttagcaggggttgtctcagctccatggctgcaggcccgctctccctgctctgctgtcctcccacgtggagctgggctctgattaccctgtgatgctggtgagctgttaatattgttgccagcataacaggaacagggaagtcttaaagaggcgccgttatgtcatagcgtgaagtgaagaaaggccactcagactgatgtgctcccagaccgaccactggacagtacagggaggggcagcctgcgggataggttatcttttctctaaagttggagacattcctggttatgatctggatataccaggtcaagaaaagggttcagtcatcggcaggcagtgtatttaggaactcatccagagcagcggctggatttgcagaacagtagtgcggggccataatatctagatgtttcatcatcttcagcgccattgcttcatagcatagcagacgcttcctttcctttccctctgcgaactaaaatgtttgctgttctcttcaagagaatagtggatacatgtgcagtttacatatttaatacactgttccattcgtcctttcttctgagtagcttgctaattgtgccaaatttcagtggtggttttgtggtgtggggtaaggacgcttatgggaagggcgcaggtccagacagaattagccctccacctcagagggctggtctgcgcggccgtctgcaggctgggtgctttgttctttctctgtactcttcacttttcccttcagatttgaattagattttatattttttagctgactaatatcatcattacagctatgctttaagtagtatatggcttaagaatgcaaatgggaccaatttgtctgctaagaatttgattttagggtacaatatgaatattaggaagaggtaaacaggtgtgttaatttctagatatcttctggaaaccacctttgtttctgtttaaccagtcctgtagaatccctgtgtcctttacagtcgtctcatgatgggcatttagctctgtcctggaagaatgtacctgctactatttggtgaattttagagtgagatattttattggcatatttgtagccatatgtctcagattttctgaatcaaacctaatgtcagatcattggttttgttggttagaccatgttaccccactttctggttttggaaatataatccttgctccctccttttctccccagataaaaacccttgcttagtccatatagtccatatagatcctaacacttctacagaccagggctggagactgatagggcatcactagtgtttcctgactgttgtgtcccagtttcatcttcctttgaaaagtgaaaatatggtgccttccctccctcccttcctccctccctctctcccttctttctccctcccttcctctctccctccaagaagacgggcaaatcgttccttgttctcccactgctgtggagtgatgagacacgcactttactcttgaagactcagcaaaaagactcacttctcagcatatccataatagaccacatttcggacttaggaaactttgccaagcagtctctgtcattacagatattaatgttgcctcccccacccccccacactatgttgtaagtcaaactgtgtttgtctgtgctccccactgcgcctaccctaaatctgtgggtgtgcacagcatataaaatgtacctcactaaagttctattgcaaatgggacggggccttatgtgttcatcatttcccagcaatgtgccaccatgtatttgcctcaaggcaaaggtttaacaagctaacaagtacttcccagttcccctgtgctgttttctacccacaatacccaagtgttttgtgcaatgtgtagtgtgtatgtataaatatatatatatatattctttagagacatcattcagaagtaatgtattggcatctcattcatatttctgatgtgaagtatatggtactatttactttttccttaatgtttgccaaattagaatcaagacgttggtacgaaattacagcatgtgtagaaaccattttggcttgaagagttaacctgaaatcctttcccccgtcagtgtgccctgcacagactagtgccctgccggctcgctgcctggttcccaaccctgcgtcctcaatgttcagggtgtaacacagttctctcatagcatcctatcattgaaattgtctgacagttggacaatgaagcctggaaacaggctggtacagtgtacaatagtcaccaggggccgagtttgcattagtaaatgcaaaatagatgttttataaaggacagactttgtgttatgtttctattttcattacattgtataataatgtaagattattgtatgttctaatttgcattataaatgtttttttcctacataaaggcataaatatagcaactttgtataaaggtagcttattagattttaatttttcttttataaaagttgtctacagtgggactaccattgccaaattgtatatgagatatgaatcttcccctatggttaatttcttttctaaacattccatatttctctaatgaaagacgtgatactgtactatgcataaattgtgttttaatgctgtttcatatcagcaggttaatcttgggttggcaaacgtaaccactgttattacaataaaaccttgtgtgtgtaacggcgtcactggccctctggcccctctgtctttgttcttgctaccccatcagtgccaatgtcagacaccctgtagcatggcaataaaacagaccgtctacactgaggccgagtgtggctttgtggaggaagtgtgggtgggaggaccaccccacagttgtcatagtgtgggcctcttgccatgtcagccgtgttgtcaggcataaggagttatctacgatgtaaacatgctttaaggacaagtgtgcgagtgcttggaagctttgcttttgatgtaacaggtaataactagttgttaatctttggaaaagtcagagtccttgaagtacaatcaagcctttattaactggagtacttaaagaataagctaataatggaattttgttccacaagggctaagcaacacttttaaaattctcttacttattgtattagtatactttcctatcctaaaattagaatgtgtaaaatgtggctccatcttagactgtagcatctcgcgaggccttcctgtcagcatccgggcgtaaatacccatgatgggtacaaggtgatactgaagctgagctgacacacactgaccttcagcgttcaggaaaactgctctgtggaatcaaatctgatgagttcttatggtcacttctcccttattgccaaaagtagatcgcaataaaacccaaataaaagtttggttggatacttacgtaaagttttactgtatttatattccatgtattgcttgacacctcatgatagaggtgttaatcagttggggagtgttgctgtacaagtgaatgcagtgcccacataagccagaagagggagtcaatccccagtagactggttggtgagaaacaaaccatggtcctctgcaggaccagtgtgtgctcctaaacactgagccatctccagccagatttgttttaaaagtgaacgtatactgtgttaaagattatacatttagttggcagactttcttagtatctagtgtgcatggtcattccaatttatctcactcagttctgggaacccaaaccttattttagctactgagtgagattgccaagtctcgtctggtatagcagagatggaaatcatttaagcaatacagggctgagacaaacccacaaatgattgggtgtgtacatgggccacacattacagaatgttcaaattggttatggtgtggtgcaaagcatctttgaagactagggtgttagtgctcagactctgaaagctgctttggattgcttatgtacttctcctttgaagatcttttggggacagtaactggtcacatgctcatatttaacagatgagcttaaagtcagccttgtgctagtcaccaagacagtcatctccaccctccaaagaatctactagttagcccatcactagtaataaaagacagtgtccttccttcccaaggactaagccctacgacagagattacatattacagacagcttctataactttagaatgacagtagtcaaattccataggggaattaaggaaagtgtattttttgtttgtttttaaaggtgtgtgtgtgttgtgtgtgtgtgtgtgtgtgtgtgtgtgtatgtaacaggtttactttcttatgaatatcggatgcagttatgtagttaaagcctagatgtattctagaagtgcacataggttatggaagaagcatttcttgtgcactaaaggctatcaaggtttccttaaatatgtcccacctcataaaaaagtataatagtgattatacatttcttttatagaggctccagatactgaaagagaattccctactcagtacaagagaaatcagcactgtccccactgagaaccacagggccacaggttgatagctacctatcaacacagacagcaaaagcaactgtgatgtagtgtgttgtttaaatactgacgtttttttccatagaaattagaattttgacttgtaaaatgccttaactaccaggcactatcacaaatgctatcttactttattaaatgttagtgtgtgtgtgtgtgtgtgtgtgtgtgtgtgtgtgtgtgtgtgtgtgtgtgtgtgtgtgagactatccttggaagcctgagagaagacccgatttcctagatctggagttacaggcaattgagagctgccagataggggtgctgaaaaccaaactcctgcaccaggaaccagcatgtgtaaccgctgagccagcttagccatttaaagaccatcctggctggggccggtgagatggctcagcgggaaagaacactggctgctcttccagaggtcctgagttcaattcccagcaaccacatgggggctcacaaccatctacaaaaagatctaatgccctcttctgacatagatgtatatgcagacagagtactcctacatttaaaattgatgatgacgatgacaatgacgacaacaatgatgatgatgatcctggctaatcttgtaggctgcctgcccccattggcagactgttaagcatcctgtatggtgaatgatgtgacagtttagtgtctaacagtaagaatccaagtaggtgttgattctggatcctaatcccctacgatagtattaagaaagttcttgaggaaagtctcattaactgtgttctggttgttgtttgttacttcagttagttatatctctccatatagcagttttcaacccatgggtcatgagggttgaacaaccttttcacacggctctcctaagatcgtcagaaaatgcagatttttacattatgattcataacaataaaactgatcttatggctggggtcaccaccacatgaggaactgtagtgaagggttgcagcatgaggagggctgagaagcactgctctagacaatgtgactctcttcttttccccaagtcacttatcaaatatacttcattccaagtacatcaactgcaggagcagtgttttccaaacacactggaattccagctaagctacagagagcttgctgtagcccaggcacccgcccactaagcaatgtagtcttgcttttgtgaaatacatattctgattacatccgtttcatacaccaggaaattgaggcacagacgtaatgtagctaggggcagtcacttaacagaattcaccaaaggaattccaaccataggcaagaaagactgagggcggcgggacagggagagggcgtcataagacaggataaagagccaagagaacccgaggaggagtaacaaatgagaggaataagcaagggtggcccctggaccctgcaacattcccggttcaaaaatgctacacaagttataaaatgcttagagacaaacatttggggtggggggtgtaagatgacacattcagccagtgggacttttggaaatagctttcagtcagtcaactcagaacatttggagcttagttccaagtgaagggaggggcagaggaggaagagaccaaagatgcaggggagaagacagtctctagagcccccttccaggggactgactcctgagtgccactcagctcagagctacaggatggcaggtctgtctctctgttctattccaaagcctttatgttcacctactcttctaaaatctgatagggaggggacactggtaacccttcacccacagtctaagtttgcctgccacccactgaacactatatactttgtgcataatgaaagcagccttttaaaatgtgcaggtatgttagcttcttagtgtgattgctcctaaataccaccttggatctgctcatgaaaatgctgttcaggaggcagaagcaggccaataactatgagttcaagaccagcctggtctacagagctagttccaggacagccagggctacacagagaaaccctgtctcgaaaaaaacggaaaaaaaaaaaagactgttgtaggctctgtggacccatacactgtaaaaacgtttgatagggggctgagaggataattcggtggttaagagcccttgctgctcttggaagaaactgagttaaattcccagcaacagggttggattgcttacccctccggctccagaggatctgatgccctcttttgacctccgccagcacctacatgcacatggagatttcacagagagaaataaaagttaagaaacaggctccgtgggtaaaggcgtttgctgttgagcttgacaacctgagttcagggcccgggagctgtgatggcaggacaaaactggtttctccaagttgtcctctggcatttacatgtctacacatacacatgcacacataattagttttaagtgcttaagactttataagcagttgataactagatttgactctccatagcttgccaactcaatataaattagtttactatatctaagggtaaaaataactaaaaatggaaaatgactgagtgtcggcaagtatcagaaatataagtacttgctaagtgatcagagagataaatgctacctaccagtggataaaaggaaaactaacattctttttttaagcacgagagctttgccttaggtgtcaagagtaaagagaaaaaaatattttctgtttttgtttttttttggtgtttttgagacagggtttctctgtgtagtcctggctgtcctggaactcactttgtagaccaggctggcctcgaactcagaaatctgcctgcctctgcctcccgagtgctgggattaaaggcgtgtgccaccacgcccggcaaaaattaatattttctaaagaattatttatgtgtgtgagtacactgtcgctgtcttcagacacaccagaaaagggcatgggatcccattacagatgtttgtgagtcaccacgtggttgctgggaattgaactcgacctctggaagagcagtcagttctcttaaccctcggccatctctccaattccaagagaaatcttttaaaaaatgatttatgtaatatatatatatatatatatatatatatatatatatatatatatgaatgagtgctctatctgcatgtatacctgcatgccagaagagggcattagatggttgtgagtctccatggagtttctgggaattgaactctgcaccccaggaagagcagccactgctcttaaccgctgagccatctcgctagcgccgagaaaactttttttttttttttgcattagttttggggcttttccctagactatgtatgttttaaccatttctctctttttttaaaagattatttatgtgagtacactgtagctgtacagatggttgcgagccttcttgggaatagaatttttaggacctcagcttgctctggtcaactccactcagttcctgctcgctctgagccaaagatttatttattattatacataagtacactgtagctgactcttcagacgcaccagaggagggcatcagatctcattacaggtggttgtgagccaacctatggttgctgggatttgaactcaggaccttcggaagagccatcagtgctcttaactgctaagccatctcgccagcccgagaaaactaatttttttaaaggttttatttatttattatttatatgagtatactgtagctgtcttcagacacaccagaagagggcatcagatcccattacagatggctgtgagccaccatgtggttactgggaattgaactcaggacctctggaagagcagtcagtgctcttaaccgctgagccatagctccagctcccgagaaaactatttttgataaactggaatatttaggacttgatctctgctttgaagtcatgtaagttatattagggtgccccccccccccccgagaaaacaaatgaagctgaggtagggcagaagcagcatcccagaatggccagcctgggtccacaacgtgagttccgagctaagccagagctacacagtcagatcatgtctgaaagattaaatgaagactcctttataaaaaaatcatttagtaatctattgataaataactttcccaaaggaaaaaataagcacgaaaatgggaatggttgcctccaggaagggtaaataatagaaatgattagtgtgcaacacttgaaaatgtacgtctgaccttaaaacaaattttgaaagattatattttaaaaatatatgtcagcaggaacttggtttccgcggcaacccgcgcggtacattgtctctttgttctctagttctattctaaagcagcccgcccctggccccgcccctagccccgcccacagctcaatgatttccgccaccaactgaggtcccgccccttctccagcgagccgctacgcttccggcccagcccgccacgcaggaggcggaaacccgtgcgtccggctccgccccccgcggcggagcgtgtcgtcacttccgcctttctctctttccccggcctggcttcccggcgcggattgtgaggggttctctcctctacgcggaatccgtcggaaccatggtgagcctagctttcggccaaggacttaggctccctgctccgccccgctgtgtcctgccgccccgctggtcctcttgtctaaccggagtcgcaggctccgagcggccgcctcctggcccctccgcacatggctcgggccgggcatgaggcctgcgtgggaccgggtgaccgagctctccgcgcgggacgggaagggggaacgcacactaagtcagcatctctttgtaagatcagggctgtttctcggctaggggaccttggcgacccccggtcctcaccccaagtgaagaagtttctagcaggacctgctggctccgccctcttcggggcggggctggaagggcgagtggccgtgcttgcctgcggaagatggagggtagctaggtagctatgttggtccgtgctcgaccggcccaatgttgcctttagttttgccattcagaccagtgggtcggtgtgatgatttattcctggcgcccatatgagcgtccctctccccatttaagtaaataccccactcccaggacggattcctgaaattagatggtaaaccaattttcctttagataatctacttcccgatctagtgagaggccctggacgggtgttaacgagtactggcattcaaacggcgtgtgttggcttcctctcttaggcttccctttccctcgcacctgttaatatcttcaaggctggagctgatgaagagagggccgagacagctcgcctggtaagcccgtctgttgcttttaaatgataaaatccaacgctttgtgagggtaaattctgaccgccttttctgatttttcttttataatttaagtcgtcgtttatcggtgccatcgccattggagacttggtgaagagcactttgggaccgaagggcatggtaagaaagatagggaatttttagaagtttcttttgtttgtttctaattttgctttcctgcggtcttgcgtagtagtggctggccaaaattttaataatggtttaaagcctttggtgtaaatgtagatagtaacaatgttcttatttatgttttttaatctaaaacttacaaattataaaccgttctcctgtgttaccatccccaatctcacatccctctccagtggcagcaagtgttaccatttacaaaacttg

SEQ ID NO: 2616 - DNA, 3275 bp, Mus musculus
ggccttgtagacacaggcgccgaggctccgagcagggggtcaggtcgcggggagagtgaggagctccgcggctgccaccccgcgcccctcgcagcgccttcgcgccgacgaaatggctaccaagaagtaaatgcccagacgtaatggtgatgcaggtgtcatgaagtaagatgcagtatagcatccatccagattaggacaaaattatatctgtttttctcagaaaagaattccaaaagactttttgaaggaagacatcatcgagttaaagtaccaaacgaagacctggtattttgaaatatgattaatctcctgatgcagcatcagaggctaacaatattaatggccagatctagtgctcacatggtcttctgaagaagccatgggtagctgttgtagctgtccagataaagacactgtcccagataaccatcggaacaagtttaaggtcattaatgtggatgatgatgggaatgagctaggctctggtgtgatggaactcacagacacagagctgattctgtacacccggaaacgggactcggtaaaatggcactacctctgcctacgacgatacggctatgactcaaatctgttttcttttgaaagtggtcgaaggtgtcagactggacaaggaatttttgcttttaagtgtgcccgtgcagaagaattatttaacatgttgcaagagattatgcaaaataatagtataaatgtggtggaagagccggttgtagaaaggagtagtcatcagacagagctggaagtccctaggacacctcggacacctacaactccagggctcggtgctcagaacttacctaatgggtatccccgctacccctcgtttggagacgcttcatcccacccctcaagccggcatccttcggtgggaagtgctcgcttaccttcagtcggtgaagagtccacacaccctttgctcgtggctgaggaacaagtacatacttatgttaacactacaggtgtgcaagaggagcgaaaaaaccgtgcaagtgtgcatgttcccccagaggcaagggtttctaatgctgagagcaacacaccaaaagaagagccgagtaaccccgaggacagggacccgcaagtgcttcttaagcctgaaggagtcaggtttgtgctaggaccaacccctgtccagaagcagttaatggaaaaggagaaactggagcaactgggaaaagacccagtcagtgggagtggagcgggcaacacggagtgggacaccggctatgacagtgacgagcgcagagatgtgccccctgtcaacaaactggtgtatgaaaatataaacgggctatctattcccagtgcctcaggggtcaggagaggtcgtctgacatctaccagcacctcagacacccagaatatcaacaactcagcgcagagaagacctgcactattaaactatgaaaatttaccatctttgcctcctgtttgggaagcccgcaagctcagtagggatgaagatgacaatttaggaccaaagaccccatctctaaatggctaccataataatctagatccaatgcataactatgttaatacagagaatgtaacagtgccggcaagtgctcacaaaatagactattcgaagcgcagggattgtacaccgacagtctttaactttgatatcaggcgacccagtttagaacataggcaactcaattatatacaggtggatttggaagggggcagtgactctgacaaccctcagactccaaaaacgccgaccactcccctcccgcaaacccccacgcggcgcacagagctgtacgctgtgatagacattgagagaactgctgctatgtccaacttgcagaaagcgctgcctcgagacgacggtacatctcggaagacgaggcacaatagtactgacctgcccatgtgagccgggaagcactgcgtccttctccgcaaggcgttcagagcgaagatgcagtgcctcctcttcatgtctacactagctcctttatagactggtcttctgctctgaatatttcatctttaaagggaattgatgcagagcaggcactccttagaacactaatctcctgatagctactcactgtccagcagcaccccattctcacagtgcctacttaccacgagaattgaagtgaatgccgtgctgggtgacctgtcctcagcatcctgggggatgcatagctttcatgtctgagttgtggttggcgtttgaaccttttataaagtctcttgataatgcgcattgctaacataactctgggccctgagaggaaccctcatagatcactgttcacagggtatggtcgccagcatggaacgtgaggattttatttcattagttaaaggctttttgtcttgggccaaattcgtgtcaaagaacaaggagaaccacacttccttttgtaccagtcagcacctctgtcttgagtgtgctgtgattggaaggcagccaggagacagctctgtgtccccacctcctggtgtcatctgaagggcgtgtccagatagcatcttactcagagttaggatgggcttaggagtcagtctcaggtcactttacccaaaagcatttgaaagtctacccctgatctctcggtgtgtctgcggtagattactgacagcacacatgtgtctgcagacactcgtgccattcagtcccatggagcttcagtttcccctttggtctttgggttgtcttaccttgtatgtaatgcttttttcaatttacaacacaatgtttgtgtatcgtcttggaataggattgtgtgtttgctgttactacttaggctgcgtttttgttgttacggtcctgaaggtccatttgggactgactgttattctctagctgggttgcccttgtccagtatttatttatctcctgcttgcttttcaagttgatgaaaaaaatcgacgtttgggttttaaagttcatttgtgtccatgggtgatctctttagtagctgagaaggaaaggaagagactcttaaacatgtgagtccccgaaggtcctgtcctcgctggggcgccctgcgctgcactttagcaggggttgtctcagctccatggctgcaggcccgctctccctgctctgctgtcctcccacgtggagctgggctctgattaccctgtgatgctggtgagctgttaatattgttgccagcataacaggaacagggaagtcttaaagaggcgccgttatgtcatagcgtgaagtgaagaaaggccactcagactgatgtgctcccagaccgaccactggacagtacagg

SEQ ID NO: 2617 - protein, 521 aa, Mus musculus
WPDLVLTWSSEEAMGSCCSCPDKDTVPDNHRNKFKVINVDDDGNELGSGVMELTDTELILYTRKRDSVKWHYLCLRRYGYDSNLFSFESGRRCQTGQGIFAFKCARAEELFNMLQEIMQNNSINVVEEPVVERSSHQTELEVPRTPRTPTTPGLGAQNLPNGYPRYPSFGDASSHPSSRHPSVGSARLPSVGEESTHPLLVAEEQVHTYVNTTGVQEERKNRASVHVPPEARVSNAESNTPKEEPSNPEDRDPQVLLKPEGVRFVLGPTPVQKQLMEKEKLEQLGKDPVSGSGAGNTEWDTGYDSDERRDVPPVNKLVYENINGLSIPSASGVRRGRLTSTSTSDTQNINNSAQRRPALLNYENLPSLPPVWEARKLSRDEDDNLGPKTPSLNGYHNNLDPMHNYVNTENVTVPASAHKIDYSKRRDCTPTVFNFDIRRPSLEHRQLNYIQVDLEGGSDSDNPQTPKTPTTPLPQTPTRRTELYAVIDIERTAAMSNLQKALPRDDGTSRKTRHNSTDLPM

SEQ ID NO: 2618 - DNA, 129402 bp, Homo sapiens
ttctgctcctgcctctaggccttgacttgagctgtagcatatactcagcttcaagcctcctcacttacaagaacccctctgagggcagtacactagtgttttgtatttgtaatttgtcctattggatggcattggtggagcaggcatttccaacttacagttttgaatgctttctcaggaaatgtgtatccatctctgtatatagaatactttttctttccacaggccatcaagtggttaacatatagacagtatttaaatccttgggactggatgagattaccaagggaggaaatgtagatgaaggagaagagaaaggatggagttctggagcactacaaatttaagagactggggagaagaggagaaacccagaaaatctaccttggagatcactgcgtaatactacactgggagcagtatcattctttgaaataataattataatgtaatataatagttataaactattccagtgtgtgaacatgccctttattcaagcagttctctaccagtagcttcttaactggtcttcctgctctcagtttatccttactccaatcctttgtaaatactgcttatgctaaccttggattaatcttagttatttatgcctgcatgaaaaatggaaaaattggacacatattgcatttatataatgaaatacaatgcagtttattaaaaatcatgttgaaaaacccacaacataatgttgaattaaaaaaacataatcccagtctacacacacacacacacacacacgtgcacacacataaatatatgaccagaaataaaatgctgtacatttagccatcaaagtttaacatatttatggatgatggatttccaagtaatttttattttcattttttattttactattatgtatgtatgtatgtatgtatgtatgtatgtatgtatttattgagacaaaatctcactctgtcacccaggctggagcgcagtggtgcgatctcggctcactgcaacctctatgtcccagtttcaagagattctcctgcttcagtctctgagtagctgggattataggtgcacgccaatttttattctatttttggtggttttctgtgttttgcaaattttcttcataaaaaaagaaagatttttagaaagcatactttaatcatgttgcttcacgggaaaccagctttgattctttactgcctaaaaagataatgtccaaatatcttaatttagtagtgaaggcccttcagagcagaggcccaacctacttactcaaagttttctcctagttggcacaaaccctttgttgcagttaaaaggatctgctcaaggtctgctagatgtgcttggtactttgctgcatctgtactttttttttaatgctaggatccttttcatgtcccttattttcctataatttccaaaatcctttaagacatgatttaagttctatctcttacctgaagaccatgagtgagggacgaggtctccaaaaatgaatgactctgttattcatttagcatttaccacaggatccttagcattattacggttctttttctatgagcccataacttatctccctaactggcacttttaagcacttagaagacttgttctgtaacttggagttcttggtattcccctgacctcctatgcatattgagtatgcaataaacatttgtagtagtttagatccagggttatttcaaataaatataatttttgaaatttgaaataattctggatctctctttctctatgcgttctatgtgcattgaacttgctgaaggagtaacagattttcagcagttaatttcctataagggaaaaatttaaataaacttaattataaactattgcttaaatatttttcctgcaccaaaggtcattggttatttttgcttcagggaacgttctctttttactgtctcctgaaatacaactgaaatacaatgtagctttccttttcttctttattccctggtcccaaatataatctccacatgtgctctatctttgtaggtgaaatacttcctgcctcagtgaaatccggctcccagtgaatttctttggtttagagagcaacttgaggattttgcatttggcaccattcaatttccttggcatctctccatagtcaccatttagaaggctcctggtcagtaggatttctctccctcttacactctgtagagattaaaaaaggattgtattacaggggcttggaaatgtgatggaaaatgaaatttgctttagcaaaaatggaagcttttgaaactcaagttgttctaacaggacccttagacaagaatagtttttaggggagcaaaatggcagatacggtttaagttccttatttagattgccactaagaaatattatgatgtgtaaaatcactcactcaaataaagtcatttgcaaaacaatatgattacatttatgtatttaaaaatattggtgcatacatacatataaagcaagcttggattaagatcttaagacagatcgtggccaggcgcggtggctcatgcctgtaatcccagcactttgggaggccaaggcaggcggatcacctgaggtcaggagtttgagacaagcctggccaacatggtgaaacgccgtctctactaaaaatacaaaaaaaaaaaaagttagctgggcatggtggcaggcacctgtaatcccagctacttgggaggctgaggcaggagaatcgcttgaacctgggaggcggaggttgcagtgaaccaagattgcaccattgcactccagcctgggggacaagagcgagacttcgtctcaaaaaaaaaaaaaaaaagaaaaaaagaaaaaagaaaaatcgtaagcactaaagagcttatggtccatagtaaatattattttactgtttaatttaagaatttaaaccatgttaaaattaaattagtataaggaagtcctaacaagctctgatttttttttatatctatgcatttgtaaaaacacaaatttcttttttttttgacacgtgtataagatctttattatcaaaagtttctctaagaatttcactttggtaattttttttcatatctcattgaaattttaaccacattttcctccttctattttgtaaattacttaataatgattgaaaaacacaaaattctttaattttttttttttggtggggccaggcacagtggcacatgcctgtaattccagctactagggaggctgaggcaggaggattgcttgagcccagcagttcgagatcagcccaggcatcattgtgaaatttcatcttttgggtgctttaagcacatactttcatgtttccattgggttttctttatatgaatataaatgcactgataaatgcctggaaagcaacacaccgaatcatttatagtggttacatctgcagagaagaatgggctggggcatggggagtattagtgatgaagaggtacttttaaattttacccaattttttcctaatcatctataataaaaatgtagccatttattacatgcacaatgattataaggaataaaaatagctgggcacagtggcccatgcctgtagtcccaacactttgggaggttaagcagggcagatcacttgagcctaggaccagcctgggcaacatggcaaaactgtgtctctacaaaaaatataaaaattagctgggcatggtggtgcacgcctgtagtgccagctactcaggaggctgaggtgggaggatcgcttgagctcagatgatcaaggctgcagtgactgcaccactgcgcatcagcctgggtggcagagcaagaacctctctccagaaaaaaaaagaaagactaaacagactgggaaaatgagaatgaaatgtctcacctttccttttgatatcaaagttcaatattaaagagcttatatttgatgaatattaacatggtaacctagagggcagtaccaattattctccaagttgaatggattgacttactatccaataacatggctagactgctgcctattattttttttttttagatattgctgcaagtcatcaccactgctaatgttcactgagcccttatagtctgccagccactagttcagagttctacatgtattaatgtgttgaactctcacaaaaatcctgtgaagtgggtattattattattgtaatttttatagtgaagagatagaggttggagattagctgtcttgtatgagctgggtcgcacagccagcaagtgatgaaactgagatgtgtcactggcagtctgacttcagattctgcataggaaagaggaagggagtagagccagtctgtggtttaagatttttatttgatttaatagttggtatatacacttttgtctaactggaaggtgactaaaggcatctgggtctggttgatgtgctggttgaaaattactattattatgaggatgattattatagtatttagtaattatgcagtgctttatacttcaaagagctatgctgtgtaatcatttattagctatgtctcacaacatctctaagatataaagatgcatttatcatgcatattttgcagaaagagaagctgaggcaaggtaagatgggcagtgttttgataaaaaaggagtaagagtggaaggcaacctcttaaattcctgatactacgtaattcaatgtggacaacagaaatttaattaatttaagccttttaaagaaaagtgccagttccagtactttttcatgatatttagttaaaaattaaatgtaaaatataccaaaggttgatgagcattcccttttaagttctctatttttgaactttctctgcatttgtgtcaatgtgacatttttgctcaaattcaaccttgacatctcccatttctccacgcaagcaggatttgactagagatactggttttcactgtcagtattatatggcttcaaatttcttccgttgtttgtgaaaccacgtgcataggattcgttatgataactttcaacagaaacaaacttcatgcaagaactatatgggaattaaaagaagttttagacatgtggcagtttgtccatttcaaaaatgattataaacatgtcaatatgaggggtgggagagggaaaaggatctatgtgggtttattatagtgacctgtaaaaggcctggaagagatttatacattcttctataaatctggttgtctctttcagttgggaggcagtcatggccatggcacatagaaaaggatcaataaatattagtttagtggttatgagtgtgtctctggggacagactgcttggattctaatcctgacctcatcatttgctagctacctgaactagctttgcttgtgtctccatccaggaaaaaataaattaaaaaaatatatatataccctatagggtcgtttgtcatcaaatctatttaagtaattgctattattcattttttgtctttccaaggctgttgacaaataacattagctacaactccattaaaacgttggtggtaatgatatttataatttgatgtctgcacttgccttgcttgtttagaaatggtacaacgtggccaggcatggtggcttacacctgtaatcccagcactttgggaggctgaggcgggcatatcacctgaagtcagaagttctagaccagcctggcccaacatggtgaaacccggtctctactaaaaatacaaaaattaaccgggcatggtagtgggcacctgtaatcccagctactcgggagactgaggcaggagaatcacttgaacttgagaggcggaggttgcggtgagctgagatcgtgccactgcactccaggctgggtgacagaatgaaactctgtctcaaaaaaaaaaaaaaaaaagtacagtgtagtaccccacaattgctatcccagaaaaacaatttaaaattacctcaaaatacattgaatagttatgagcacatgtaaaatatataaggcaaaattctatacttgtttctttaaaacatccatatgatgttttgggaccagtggtcccaaactctgtctaccataaagataccacatgtgggtaaggccaactcattgcactgtttgatgaagagagatgctgcatctagctaaagtcactgatgccttgtggatgcatgccagatgtctgccagagtgtttaaattttcaagggatgccagaaattgggatttttttttacatgacatttctcaattttaaaattttgactcaatttatttcatggtacaaaactctctggatcaaacaatacatttgtcaaatctttgccataaatatttacactaatacatatgtactagttacactgtgctgttattcaaagcaaatgtttttgaggcatgaataaaagatgaggaagacaaaatataaaaaggtcttcagaaactcacaagtctagtggggagataggcaacaatgtcacagaaaagagtgaaaagtgtcacagtagagtgtggaagttagaacttaagctgtgtggttaggatcagatctgcattaaaccaacaaacaaaatcaaagaaccccattatttcaaagcttggcaaagggtggacacccaagtagatggctcttttgtttaacaaaacaccttaatggattttgggggtaggagctatgcatagacagggccacagccttgcacagttccagggggcatcatttgtgtttgtcacctcttgagcatcattcatgttgtattctttgtgaatagcaccccctggaattgcacaacatggtaattgtgtcaataaaggtggcctggagtctggcctgagatgaggattgagagttaaatccttctacataataaagtaaaaggaattttaagtctttcctagtgggtagaggcaggcgggtagagggatgcctggaatggacagaagaaaagggttaggagaaaagacatctctaagatgaggatgggccagcaatttggcaacaacctggagccgaatgagcctggtgagagattgcttgtaatttttgcaagagatgcatacaatcctctgtcatcttctacctccaggagacactggtaaatgaagtcaaacaactttttctttggcactcttctttatgaatcaggagataattgggaaagacttcaccgtccagaatcacacagcaacacttgcctaaacatacaatgccttaataacttgcctttttactgtttttctttaaaaagctgaaagtgcttacactttcatttcctcatttgttctgacattccagtgtgggtggggcagatttatgataacattatttatagatggagaaatcgaaatagagattaaatcgcttaatcaatgttgcatagctggggcagtggagcccacagtggaatttggttctccaggctccagccacgaagtggaaagaacatgagttttggaattagagggatctttgcacaatcctgattctgccccttaacaagaatgtggccttaagtcaattacttcacctaagtctcagttatcctcatctctaaaattaagaccataaaacctcatagcaatgtagtgaagattaatttagaaaacgcgtgtaaagccttggcatagagtaattcccaaataatattagttccacccccaacccagtattatctggttacatttcagtacaaatttaaagtaatcaaaatgaatcctccattatagtaattttttttctagcctcatcttctttcactgagagcaaaacatgaataaaaatccttcaataggtcatttaattcaacggcaagaacttttgctccggtaagagttatccctgttggaaaaaattagaaaaaaagaggaatatgtggaagacaagatattagttcttaatatcttatgcagtggttcttaaacttgacagtatatcagaatctcctggagggcctgttaaaacacagattgctgggtcccaccccagagcttctgattcataagatctggggcgggacccagtaatgtgcatctgtaacaagttcacagatgatgttgagaggcttagtccagggacttctaggggtggggcccagcaatctgttttaacaagccctttaggtggttctgatgcactctcaaatttgagaaccactgggatagtggtgaaaagcatctgagaatatggtctgcaaattcaaacccaggcggctccatttaccagttagatgaccagattaaatgactaacctctagcacctctgcatcccacacagagcctgataatatctgtgattcaggattcctctcactatccctttaggccttgagtaaaaagagatgtcggtgagtcctgccaacccacgctgttttttacttcttcacactctgaggcacaaaaggctgcttgaatttgagtattacggaagtatttgccaacacttctgcgatcacaaaaataaagtaagaaagccctgtaaataaagccaagagcagtggcattgtttgcatcttaaatttgtaataatgggttttcaacttttttcctttcccctgcctttcatagtagaaacatttaaaaatcttccccgccaccccccccccccccagtttcaagagatgttagtacatttgttttgcagatagtatgcattgctaagaggcttttttttctttccctgcatcccagatacagaatctgcctcagatatctggtgcctttctgattttgtggctgaggaatcccacgccctcctcctttccatcccttttccctgtctggtatgtaactctgtgggtcctcatattatcactgcatggagcttcacaagcacctgtatttttccagttgtaaaaacccctactctttctttttttttttttttttttttttgagacggagtctcgctctgtcgcccaggccggactgcggactgcagtggcgcaatctcggctcactgcaagctccgcttcccgggttcacgccattctcctgcctcagcctcccgagtagctgggactacaggcgcccgccaccgcgcccggctaattttttgtatttttagtagagacggggtttcaccttgttagccaggatggtctcgatctcctgacctcatgatccacccgcctcggcctcccaaagtgctgggattacaggcgtgagccaccgcgcccggccaacccctactctttcttatttccttaactaatcttttctattgcctattgctgatgaggtataagaatcgttaacttttatccaatgccagacattctgaaatgtttatcatgcattatcattttggattcctacaatgcagagatgattttataacttgccagggtgaaaaaataaaagtaaataaaaggagacaagcaaaaagattccagatccccaccccaacccccccaaccccccaaccccagctctcgcctctgttgaagtcaccagtgatgacagaatataggaatatagtttgagccctgtttttaaataatttcaaaatcttggtataggtagatgagatttatacacacgtgaattaaaatcaaccaacatttgtgagattgggtttggtatctttgaccgtttttctcccctgcaagacgtagataatagcaccaaccccaaggagtttggggatgattaaataagttaatgcacccgaagggacttaatacagtgcctaccacgtagtaagcgttcaataaatgttaactattatcattattttttaaaggaggcagattggagcgtagagtacactgaagggagtcgggaggccgggtgtaggcactggattcttgcacctaattctccgagcctcggtttccttatttgtaaaattagctggctggagtaaaacaactcaaacagcagttaaagcaaagggtgcagcagtagccggggaatcgaggaggcgcggggcggaaagggttagttaggagcccagaggctgatctgtgggcgcccggcgagagaggccccgccccgccctggaggccctggcagctccgggctgagagcagttccggtgccaaaacccttccctcccccgctcccccggaagtgcttttccaggattcgggccggagagaggccttgtaggcacagcggctgagactcgatctgctccaagtaggggctccagcgcgggtcggagtctgggggttcgcgcccgccgacccgcgccctgctccctctcagcacctgggcggacggtgagtggctagggaaacggactgggacggccgcgggcccgcgtcggagctggcgttctcgtgcccccgctgcccgcttcgggatccgggctgagggctcggctgccggcgtccggggaaggggattgtcgaccgccgcggacttctccgggccagcgggacgggaagagctggctgtgggtccatggggtgggcggggcggagccagggagggggttcccagagctgttgttgctgttgggactcgagagtggggatgggctgggcctctgttcgtccgtccgacccccctcatgtgtgctgccccaaacctcgccgctccctagtttggtattctgtgtccggcctggggtagtagctggacaccagactcaatcttgggctccagttcccgacttttcgcctcctctgggtctgtcctggggtcagtaattaacccgggtcccaggggtgtcgtcttttccctccagggtggggcgctgcctgtacatgccagggatcttttgcagggcttttcatccagatttgcttcagggttgtccgggatcgatttggactgggctcggaaccggtcctggatacgtaggtcgctgtggcaccagcatgctctgtatcatctttactcacttgaaagcttgctgaagctgttgttgaagtaaacttaaagaaaaaacttgcttaaggaaaatcagtagtttagacaccccctcccccgcctttttttgcagacatactaaaaaaaaaaagatgcttttctctaatctacactcttaattcttttggctatctgatgtcacagttgtatgatgagttcattcagaggctgtacgaattgattttaaagagttggacagttatatcctttctcccaaagtttgtttaccttcatatttggaactgtcatttttcttaaggaaaaattgttcttggattttcttgagagattccttacactgttaaaattgttgctgcaatgcagagtttcacacaggtgggcagagatgttttgtttaaacttattccatgaagtgtttacttcggataaactgaggatttcctaggggagaaagtgatgtaggtaggtttagtgaacagattttaggtagtaaactttactgctgaaaggtttgtaggaaatatgggttttccacaataaatggtgatttaaaaactttttataagggaatgcagttactgcagattattgctattagcagatggccactgtttttgcagcgtaaagtattcacaaatcaccttcttgaaaccagtgacgctatctgcaactctcatcttgtgtgtagattagggtttattctgtagttttttgggtacttatgtcattctctttcctcccacccctgaaaggggaggtggtatcatgaatcaggaaaaatagactgaagtgacaagttcagtgagcttttcctatgcaaaggaaaatttatttcaaggttgttgattttgaacaggcaaagggtagatgatttttaaagtccttggaaaaaattgtggagagattagctgcacaacttttctttttcctcttcctttcttttcttttttctttcttttcgagacagcctcattctgctgcccaggctgcagcacagtggccccatcatagctcactgcagcctccaactcctggactcaagcagtccttctgtctcagactcctgagtggctaggactataggcaccaaccaccacacctggctaattttttttttttttttttttgtagagccgaggtttcactatgttgcccaggctggtcttgaactcctgggctcaagtgatcctcccatctcggccttccaaagtgctgggattacagttgtgagccaccatccccagcatatttgcacaacttttaaatttagatagaaactgtagcttcttccacatgtgaagtacttaattatttagagcataagattggaatattggaattgagagaatctggaaaaatagttaagttagatgtagttacagatttgcaggtatgacaatgtatttttaagggaaatacttcaagagttttaagagcagagaaaggtgattggggaaaatcagatactgattgtatttttatattatacaagtcaattcaacaaacactgagcatttgctatgcatgttatgctatgttatgcatagcatgctatttgctatgctatgttaggtaactatgtaaggagcaaataaaggtatagccataacagttgagtttcatgttttggtaataatttctgaaatcatgaagagttgagttgtattctttaggcatactaacaattttttttgtaattgggacttaacattggcgatgggtgttgagtgcttcatgaaaagcgctatactaggcattttaggatataaagattaaacttttggtttttaggaatttgaaatctagaaggggatataagatttgtgtaaacatttacaacataaacatttgtaaatacttatgggtggtttgaggtaaagtttggagtaaattatacaaaagaagaaagggttcatttttagcttaagtaatggaaatttgtggagatagctcagaagctactgtttattgagcatttactgaacagacttaatgctagttgctgtttacagcattttcttagcttcacagcaatatgtaagtaccttaataatgaggacagtgaggctcaaatatgttaagttacttgcctgggctatgtggctagcatgtaacagccccaatttgaatccaaatctgtctggtgccaaagcctgtgtgtttctactgcatcatgttgctccccaataaactggtaacctgagtttaatgttacagagaataagacttttctaagacaaagatttatggattgggagtaggtgggtgaagaaggcctttcaaataaagagaatgatgtgagcagaagtgtggaggtgggaaagttcattgtgtacttggagaaaagttagtggaccagattacctggaatatactgttcatttttgggaattagagatgaggtttgaattttaagtgggggcaggattgtggagcatgtttaagtgctgcttttagaagtttgacatttggggaaaaaaagttcgacgtttgggaggtaatgagaagttaccaaggtctaatagagtagtgtgcagaatgatttgatgtggaaagctgactttcaatgtagtataaatactgggcaagggcagtggtaatggaattagagtgaaggctctgcaggacctcaatgtcgtaggtgggtggcgaggaggaggggtttttggagcaggtttggaggagatggaaggtgaagattacacttttgtttttgagacagagtctagctttgttgccaggctggagtgcggtggcgtgatcttggctcactgcaacctccgcctcctgggttcaagtgattgtcctgcttcatcttcccgaatagctgggactacaggtgctcaccaccacgcccagctaacttttgtatttttagtagagacggggtttcaccatgttgaccaggatggtctcgatctcttgacctcgtgatccgcctgcctcagcctcccaaagtgctgggattacaggtgtgagccactgcgcccagctgaagattacactttttaagtgtcggagatgttgacggtggtactcttactagaaatacgggcaaggaggtacgtaatgagatcagttttggatttgttgacttttttgtatacttgccaaacgctggaaatgtccaaaggcttttggaaatgtggatttgtggttaaggggagaggtcaggactaggcatatattaaacatgggtttagtgaataatacaaataggtgtactggttgaatctgtgtaagaagatgaaagtgccaagggagaatgtagaggggaaagaaaaaaaaaacttctgttttaaatggcatctgtttaaaacagaaggaaatatgctaagtgatttattttatgcagtgggtaaagaatttgatagtatgtccactgcttcttcacactgtaggttcacacggagtagaaagaatctgatcattaaaaatccaattgggaaatacagttttcttgccctgggtagcaagaatactatgctatctttaccctgtttcagggaggacaaactacttcagactcatttcatccagagtgtcagatttggttacttaaaagctatgttagcttgtttcttttggacatttgtttggcaagtggtatgtgaggagttggaagcaaatctctgatacagtatttcacttatttatgtgtatgacatcgattttggtttcaaaatcaagaacctctgaatattcaaagataatatttacatctcattaaggctgttaatattgctttttatagaaaatggcatttgattacatatttttcttccaactctattttataagttcttttgattaacatgattagttttggcttataatgtttggattatattagagggatagaataagatacttttatccattatatgataacacatatgaaagttacatattttattttggaaactgtttaagaactgtaaatttatagaattttgtgtggttttctgtttaggtatttaaatagggggaacttgagtattaatgtgtaaaagattataatagtttgcagaatgaggcttagagttgtaactttttgagggcaagtttattatttttagactgagttaccatggaagtgtttatttccttcttgagaattaatacattccttttgtttttcaggaatatgttttccactatatcacaggcacttgggaatgtcgaaagagtcctgtgtcagtgttgttggaggcagggggttttgtgtgtgctttgtctgggctgtttggcttagtttcagtaagcctggtattaatgaggcaaaggtcaggagttccatttagcttcagtctaaatgatggccagggagtacacccctcactccctccagctgtcttggaaattccttggttgtcattggtcacaaaggtgactagatgagggtggattgttataccactggaagaatattagaggaaacttaggataatggctgggacctctgactctagaattagatagacccgtgtcaaaatccttggtattcaaccttgggagagtccctaaacttctctaagcttacatttcctcattattgaataggttaatatttggtttgggcattacgtatcatcactttccttttctcagtgggagctagccacttaagcttgtggctcccgaagtgctggactgtggagtagtgtcagttcatgacagagttttcctttgagtgaaaggagaatgtagttggcttctttaaagctaaatctattgatatgtttttctaaaattatcttttgccattttcgatgggcgcttagttcttttatgaaatagtggtgatgggtaatcggtagtttttgtttttgttttttaaatgtccttggcagaataaaagttggcagccctatgctggtcaccctctccttcctcgtgcccctttttaaagattatggttctgtgaaatccgaaaatcttggcttaaacagaatctgagggattggaggagactattcatccacatatttatgcatattaaagaaggtttggggtacattctgcccttgtgttagcctacagaggacgtattgtgattctcgccaccattgaatttaattttgtcaagattcacagtcaatacttataacatatttcaaggagcagttcagactgttttcagttgagttcacacaagtagctctaaattacttgtttaagactgtgtttctcaaccagagcctctggagaaaactgttgaactgtgggcgctgcctgggggtgctgctttaagttattactctgttgattagccaacaagataaataactcgcctttgacatagtgaagcagcagaaattggctttccatttcacttcttctgcaggaaagatagagcaagaaaagcctttttattaatacagcaagtaaaccttgtacaaatatcagtattcaaaatgctttctagagaaagaatagtgcagcactgtgcgtaatgggttatgtaagtggagtcacagaagtcctcctggggacacaaaccaattatgaacataagtgcttattgaaattgcatcagttgtctagatgaggagcttattgactccctggttcacttgggtgggcaggcggctgtgggggagggacgggggggggtgtgggggtggggaacttaaggtgcaaacctagcctaggtgactgttaaattaaggcttaacatttgtttcttttgagtgtttttggttgcgtaattttaaaagttgggaatgctatagaaatatttaaattctattagaatgtccaaggcaaaatgttcaggttaagtagaaatagcttggaccctctgttaattttaaagaaaactgtgggtttgctgctttagatattaaaatgatatgggtttatagagttatgttgtgtatcattgttgctggtaaataaaaaatgtttaattcatttattttaacagtgcttaaatttttctcttaaagtactcccaatggcagaaatgtggatgaatagtaccctcagaagtctaggaatgcagcccaaagtgtgcctgctataaattgaagtttttgatgcctgtagggttttatattttaaaatttatataaatgttgcattttgctatcttacatgcatgtcgacagtattttaaaatactttttttttttttttttttttggtttgagacggagtctcgctgtgtcccccaggttggagtgcagtggcgcgatctcagctcactgcaagctccgcctctcctgggttcacgccattctcctgcctcagcctccccagtagctgggactacaggcgcccgccaacacgcctggctaattttttgtatttttagtagaaacggggtttcaccgtgttagccaagatggtctcaatctcctgacctcgtgatctgcctgcctcggcctcccaaagtgctgggattacaggcgtgagccaccgcgcccggcctaaaatactcttaactaaaattgatgctcctaagagagagtgcagtgttcatcctgcggctttttatatccctatgacatggctttatcactggttagtagtactgtgcttaaatatttaatagtagcttatttatttatttatttatttatttatttatttatttattttttgagacagagtctcgctctgttgcccaggctggagtgcagtggcatgatcctggctcactgcaagctccgccttctgggttcacgccattctcctgcctcagcctcccgaatagctgggactacaggcgcccaccaccacgcccggctaattttttgtattttttagtagagacggggtttcaccatgttagccaggatggtctcaatctcctgaccttgtgatccgcccacctcggcctcccaaagtgctggaattacaggtgtgagccaccgcgcccggctgtttatttatttttaaaccctgtgtctgatggtttttgttggaacataggagatggtaaacaatttctgatacttcctatgtatttttaataaatagcaagctgttttaaatactactaagaagctgtagtttcatagaaataaaatgacttttaagggggatttaatccgttaaaatttttttttctatttaagattttaaaattatcaatgtatttctatcataataaaatatggtagtactaagagctttctgaaatgatggaaatgttctatgtctatgctgttcaatatggtggcccctatatagcttctgagcacttaaaatatatctagtgttataggagaactaaatttttaattgaatttaattttaattaatttaaatatgaatacccacatggggctggtggctactgtattagtgcagctctataaggttaggaagacgagagagaagagagatcacacatcttcatgacacctctcacctcacatgtaggcagattaggcactcagtaagtatttgttgaatgaaataattcatctttttctttgaattttgaagaccagtgtttgtgaagtattctaaatttttggggaggagccatagatttttgaatttttttcttctatattgattttcagaatttacttttattcttacaaagacatacatcattatgtgtgtgtgtgtgtgtgtgtgtgtgtgtgtgtgtgtgtaaagaattatataatgaactaccatgtatgaccaaccactttaaaaaacagaacactgccagcacctttgatggccgttcatgtttctcactacttgtgatctctgacatactctttaagtaaccgccatctgaattttatattaatcattaccttgctttttgttttaattttatatgaatgtcttttttttttttttaacatttccctctgtcttgaagtttggaagttaaactctgtgtagctttattttagttctccctgacctccaacaaatgagatacttttgttttaaacactgttactttgatttgcctatacactgtatttgcagatgtctgcttattctcatttgcatctgagacctctgatctaggaccatttttctttgtgtgaagtacatcttttagaattttccctagggagggtgtgttggaaaactttttgttggaaaataactttttcttagtctcattcctgaaactggttttcctgaatatatattctagattagcagttgttttttctttgttcattatagattttatttcattatcttctggcttttattgctgttgaaaaatacacagtgtgattgacagtcctttacagttaatctgttgtttctttttttttttttttttctttttttttgagaccagtcttgctctgttgccaggctggagtgcagtggcgcgatctcagctcactgcagcctctgcctcctgggttcaagcaattctcctgcctcagcctcctgagtagctgggattacaggtgtgtaccaccacgcctggctaatttttgtattttcagtagagatggggtttcactatgttggctaggatggtctccatctcctgacctcatgatccacctgcctcagcctcccaaaatgctgggattacaggtgcaagccactgtgcctggactaatctgttgtttctttatggctagttttagaactgctactttgttcttggtgatctgcattttcatttttatgtttggaagttgatttctttttatttatcgtgcttggtattaactaggttttcaaatctgaagattagtgtctttcaacaattttggagaatttttggcctttttcttaaattttgtcttccatattttctgtttggaacttgtatttgaagtatgttagatcttcttactctacctccgtgtctcttaacctgtcttttatattgtccatttcattatctttgtgtattgtattgtgttctggatacttttcttgaagttagctacttctctcttcagctgtgttcaaccagtttattgaatttaaaaactttttatttaactattatgcccatttttttcattatggttaaatacatataacatagaatttaccatttaaccatttttaagtgtacagttcggtggcattaagtgcattcacatcattgtgcatctgtcaccactactgatctccagaactttttcatcatcgtgaaccaaaacttgtacccattagacagtaattccttatttcctcttttctctagctcctggcaaccactatttgagtttctgcctctacaaatttgactattctaggtacttcatgtaagtggaatcataaaatatttgtctttttgtgtctggtttattttacttagcatgttttctaggttagtctatgttatagcatgttctttgagttttacaaatttatgttagagatggggtgttgctatattgcccaggctggagtgcagtgactcttcatagcggcgatcatagcacactacaacctcaaatttctgaactcaagccatcttcctgtctcagcttcccaagtatctgggagcacaggcatgtgccactgcacctggccattgggtttttaaaaatttcatttactatatatttttgtttctagacattttattcagttccttcttaagactatcatcctttttttgggtagtcttattccttttcttggttatgttctcaatatttcttttatttcttaaaaatctattaaatatacttactttacattttgtgcctgataatccagtatctgaagtctttgcagacatgattctgctgtttgtttctgctggctgttgcttatggtgccacgccttcttgtcttgtaatttttgactgtgaagttctcgtaactttatgttagttttgcagagtgatttttagtagtacttaaaaattttattccttagagcttataagtaaccgcctggagaatagtgtcctattttcttaaacgttttattttgaaataatttcaaacttacaggaaagttgcaagaatagtgcagtagacctctgtataccctttatccatagtcactaatttttaatattttgccatatttttctttttgcatacacacatttatttttttgtgaaccattgaagagtagattgtatgccttttacctcagggtgtatttcctaagaataagagtattctcttaagataatcacagtaccatcatgaaagtccaaattccagaatttttttttttttttttgagataaagtctcttcctgttatccaggctggagtgcagtggcacaatcacaactcattacaaccttgaactcctaggctcaagagatactcatgcctctcttgtagctggaactacaggcaggcccaaccatgcccagctgatttttttttttaagatttttgtagagatggtgtctcactatgttgaccaggctgaccaggttggtctcaaactcttgggctcaagctatcctgtctcggcctcccaaagtgctggaattacaggcataagccaccaaacctggcccgagaaatttaacgttgatacggtactttacactttacattcccattttggtaatttgatcacatattttattttagtctcctttaatttggggagagttcctcagcagttctttgtctttcatgcaattgaagagtataggtcatttattttacggaaggtttttcaatttggacttgtctgatttgatctgattagctttttgattgtagtcaggttatgtttagtcagaatgttacaaaagtgatgttttcctctcagattatcacatctggagatacataatgcccacttgcccctcattagtgattttaacttcggtcaagatatagtctggttcttctactctatagttactatttttccttgtaacaagcagtctgcttagaggtaccttagtgttttatggtttttttttttttccttagtgaaaactaagtgtagtaataatataccttatatttgtatagtgctttctatatatatgtgtataatgtataagtatatataattgtatatgtataattgttgagagtttaaggcttgtgtagaagaggtttttgatactttgcataactctagctaagatttgttagatcaagaagtcaatagagttgcacatagcaaaggaaattctaaagcattaggtgacaaagattagtgaggcagattttttgataccagatcatttctttttattaaacaatcctttaagatatgagtgattagaggaggtgacttaaggttttcctaaggtaaacttttacattgatattacgggagtgttggttaatataatcctttgatctggtaaattggtagaagctgggcctttttccccctaaccctctacctcccattcccagttaaagctggagagacttgggcattgaaccttggttaaaatgtgaattcatccattgactgactgagtcagtagatagttattgggagcctactatattaggcattgtgtcaaaatgtttaattaagacagatgtgattgctgtcatggagcacagtccagaggtaataagcttttatatcttttgtgtgtagtagtcatttatatatttaaaatgaatgtatgtaagaaaatatcatttatatctgttgaaactgttttctggcaaggaagaaagttccgagggctcttgcttaataaattatgtaagtataggctttgaggttcaaaactattcagttaagcatgttctgaaaattgactgatattttcatttaaattgaagccttttattaaaacctgacttaagtaaattacattcaatctagactgccatttgccttctgtggggttttgtgaatagttggtaggttagtgccttgaaagctacatgttacagggctcattttacattcccacatctcccactctcagaaaagtttaatattatacatgctagtgcatgtattattttaacattctattttgaagtagactcacaggaagttggaaaataatagtcctgcataccttcacttggttttcccaacgaaaacatcttacatagatgtcatttatgaacacaaaaaaattgacatcaatacattactgttaatgagacaacatacggtatacagatttcaccatttttcaacctggacttccttgtgcgtgcatgtgtacatatagttctgtgtaattttatcccatgtgtagttttgtggaaacaataccacaatcaagatacagaattgttccatcaccatgaaaacactccttagtgctgcctctttgtagttacaatgccccgtgacccccaaccactagttttgtcattttgagaatgttgcgtgaagtcatgtagtatgtaatctttggagattgatgttttaaaaatgtaatttgttttaattcataaagtgaaatctcagaaagtttacaaaaatagaaaaaaattcttaattctatcactaatacagtcaattttggagctttttatagcctttttcatatacatcttctatcacttatagtatatactcaattttgtttgctactttttacaaactttatattaagtattttccgtgtcaccatccatcatatttagttgttgctatcataagaaatgttgcaaaatataaaaaaataaattaagcttaaaaagagaaatactgcagaaaacacctttgagtatatggatttcttcatatttctagttatttccttaaggtaggttcccaggtatgatttttgagtcaaaggatatgagagttttttaatcttgaaatgtggttaaattgcttctcaaaaggatagtattactagtactgtttcactgtattcttttagattgggtattagtgctgttttctccttcccccaacttactaggcgagaaaggtacttcactgttgtggttttagagtgcatttctttatgtaacagttttttcatgaagagtaaaattgattataatgtcctaagacatgaactttaaaaaatgtgatattacttttaattaattggaaaagcttttctttctttttttttgacagagtctcgctctgtcgcccaggctagagtgcagtggtgcaatctcggctcactgcaacctccgcctcccgggttcacgccattctcctgcctcagcctcctgagtagctgggactacaggcgcccaccaccacgcccagctaattttttgtatttttagtagaggtggggtttcaccatgttagccaggatggtctcgatctcctgaccttgtgatctgcccgcttttgcctcccagagtgctgggattacaagtctgagccactgcacccggcctggaaaagctttttaatatctgtgccagtgttccacagttctgagctagaggctgaatcaccacatccttctctttagcttacaggtttacctacaaaatgattgccagtttctacattgcttctctttggtctttatcattatctcctagttactctcctcaatttggattctcaacctttcttcctgtctgctccctgttcaaagagctgctgctccctccactggtaccatgccagcacctcattcatttttcctatgttgtcactttcaagtgcctagtcgtgctgacatgttaatacattaccataatcttatctttatagttaagtatacccctgggagactacagtctcctggagctctcaggagtattggccttgacgttttttgatggctgtttaggaatttatatggctaataatgtctgaagtctgtatgtgtaacatatatgaatacaaaaataacaaaacaacaagaaaattgtgcatcttttacttttctgtgtgttttgggagacagcaatactatgttgttagagcagcagatcattatggtaacaacagaagacatcaaaacctgccaggcatggtgacatgcacctgtggtcccagctacttgagaggctgaggtggaaggatcacttgaacccaggagttcaacactagcctgggaaacatagtaagacctcatcttaaaacacacacacacacacacacacacacacacacacacacacacacacacacacactctcacccccctaaaactcttaaaacagaagtttacttatttatttatttatttatttatttttgagacggagtctcgctctgtcccccaggctggagtgcagtggcgccgtctccgctcactgaaagctccgcttcccaggttcacgccattctcctgcctcagcctcccaagtagctgggactacaggcgcccgacaccacgcctggctaattttttgtatttttggtagagacggggtttcaccgtgttagccaggatggtctcgatctcctgacctcgtgatccgcccgcctcgaccttccaaagtgctgggattacaggcgtgagccaccgcgcccagcctatttatttatttatttagagatggagtcttgctcttgtcacccaggctggagtgcagtggtgcgatcttggctcactgcaacctccacctcccaagttcaggcgattttcctgcctcagcctcctgagtagctgggattacaggctcccgctttcatgcccggctaatcaagatgaggtttcaccattttggccaggctggtctggagctcctgaccttgggtgatccgcccaccttggcctcccaaagtgctgggattacaggcatgagccaccatgcctgacctaaacaggttttaattgaatacttactaagattcacacactgtacttaagtgcattttttttcagtcttcacaataattctgtaaattttgagatagctatgtattaagatcctctatgtgatatattgagtaggtacttgaaaatgctggttacaaggaatcataaaaaataacatttttttattttaactagaatgtacattccttcactttttccctatagggtcaaggtttttgtttgtagatgggtactttgattagagttctgcattgccttttttggcataatccacagccatgcagcattatccattaagtatcctaattcccttttttatggagaagagagaatataaggcactttcagtgtaatacaggcatacctcatttttttgtgttttgcagataactgcattttttttttttttaacagattgaaggtttgtggcaaccctgtattcagaattctgtatcagtgccatttttccagccagcgtgtgcttacttcatgtctctgggtcacattttggtaattctcacagtatttcaaactttttatcattattatatctgttatggtgatctttgatgttactattgtaattgttttggggcacctcaaactgtgcccatataggatggtgaacttgatcaataaatgtgtgtgttctgactgctccactgaatggttgtttcctcatctctttcctgctcctcagggttccctatttcctgagaccctaaatattgaaattaggccagttagtcctatgatggcctctaagtgttcaagtgaaaggaggagtcacacatctctcactttaaatcaaaagctagaagtgattaaagttagggaggaaggcatgttgaaagagaagcctcttgtgccagttaggttgtaaatgcaaaggaaaagttcttgaaggaaatgcaaagtgctactccagtgaacatccagatgataagaaagtgaaagtcttattgctggtatggagaaagttttaatggcctgaatagaagatcaaaccagccataacattcccttaagccaaagcctaatccagagcaagaccctaattctgttcaattatatgagggctgagagaggtgaggaagctgcagaaaaaaggtttgaagccaaatagaggttggttcatgaggtttaaggaaagaggccatctatgtaacataaaagtgcaaggtgaagcagcaaatgctgatgcagaagctgcagcaagttacctagaagaacttctttatcatttttcttagaattatgtgttatggttatatagatgagggcttgctaaattgcccaggctggtctcaaactcctggcctcgcctccttatgcaccagaaccataggcctgagccaacatgcctcaccagaagaactaatttagataattgatgaaggtggctaccctgaacaacaaattttattgtagttgaaacagctttctattgcaagatgctgtctaggactttcatagctagagagaaatctatgcttggtttgaaagcttcaaaggacaggctgactctctacttagccaatgcagctggtgacttgaagttaacatttaccattccagaagtcctagggccctttaagaatgatggtaaatctactctgtgctttatgaatggaacaataaagtctggataacagcacatctctttacagcatggtttattgaatattttaagcccactgttgagacctactgcccagaagaaaagatttctttcaaaatattactactcactgacaatgtacctggtcactcaagagctgtgatggggatgtacaagattaatgttgttttcatgcctactaacacatctattctgcagcccatagattgaggagtaattttgactttcaagtcttattgtttaagaaatactattttgtaacactataggtgccataggtagtgattcttctgatggatctgggcaaagtaaactgaaaaccttctggaaaggattcaccattccaaagagtcattaagaacacttgtgatttatgggaggaggtaaaaatatcaacattaatgggagtttggaagaagttgattccagctcttatagatctctttgagagattgaagacttcactggaggaagtaacagcatatatggtgaacattgcaagaggattggaattagaactacagccttaggatgtgactgaattgctgcaatctcatggtcaaactttaacggatgaggaattgcttcttaggaatgagcaaagaatagtttctgagatggagtctactcctgatgaagattttgggaacattgttaaaatgataacaaaagatttagaatattacataaattgagttgataaagcagtgacagggtttgagaggattgatgactccaattttgaaagaagttctactgtgggtaaaatgcagtaaattagcaccacatgctacagagaaatcttttgtgaaaggaagagtcatttgatgcggcaagtgattgttgccttaagaaattgccgcagccaccccaccctttagcaaccaccactctgatcagtcagccgctgtaaccttgagacaaaaccctacactagcaaaaagatgaccacttgctgatcagatgatcattagcattttttagtaataaagtattttaaaattaaggtatgtgcgtttttttaaacataatgctgttgcacacttaatagactacggtacagtgtaaacataacttttgtttgccctgggaaaccaaaaactttgtgacttgctttattgcaaaatttgctttattgctgtggtctggagcagaacccgcaatatctttgaggtatgcttgtatataaaatccttccacgttttcatgcttttcctcctatttgaagctgttttgacatatacctaattccataataactttaaaaaatactagcctctgaatctttttgaacttttcaacataattttcacagaaacaacctttttcctcataattcagttcatacgatcttaaattatataattaacaataacaagtgcagttggcataaactggtttgggaatggactgctggctcttattaagcattaagtgcagaagggtagggacatgttaagaaagtggtctgcttagaagactactaggtgtaggtgatgagcctgtgttgggcattagggagtgatttatggagggattggagagctttacttttgtaagtttgatacagtagaagtctgttaaaagagtttctactgaattattattcctctttccattttatagatgaaaaaactgaggcctcagagagttaagtaaccttcccaaggtcaggcaggtgataatagtggagccccaggatttttacctagatgtttattggttcaaatacagcatgtactcttaccttctgtgcaggtgtttgatgccttttagggaatctgatttacccagtcaataggtaatcttgagtggtcttcaggtagtgtttggggtagagttctgtaagttgtcccacatcttagatactggcttcattttgctccttggttcttttttttgcaccaactgtgtaagaaaaatgagggaacattccaagataaaaattaagcttacaagccttggttaggtggcttccgcctataatcccagcacttttggaggctgaggtgggaggattgcttgagctcaggagttcaagaccagcctgggcaacatggtgaaatgccgtctctactaaaaatacaaaaattggctgggtgtggtggcgcatgcctgtagtcccagctactcaggaggctgaggcaggagaatcgcttgaacccaggaggcggaaattgcagtgagctgagaccatgccactgcactccagcctggggacagagcaagactccatctcaaaaaaaaaaaaaaaagaaaattattggttggttggtgacattcttgtcctttttctctgtaattgtcaagatatgtaaatatcacatattctgaggtgttttttatatcctgttttcttaactgtaccttttgtgaagtttttggggtttttttttttggcttttctgggggtcattagcctgagtgtttgaatctggcaaaggaatatactgattgtttgatatgccagctaacatcttttgtttgctgaggtatattgtagacctcaagagactgtaattgattttaacaacaaacctttgagctatatagtttgattaaaaaaaaaataggtcgtcaagtctaaaacatactgatgtagcagtatgttcagatggccaagtcataatgttaacaaaagacccagtaaaaggattttaacaaaaaataaatacactactctttatgttaccgttatgtattttccccatgtcaagaatatgctttcttgttttataatgaaatagattgtttgaatctgagaaagaagaggggacctgagtagtattagctgctatcaaattaataattctttatctaatagcaaaaacaaaaatcatattaaatagcaacatttaaaaattagcttgaaaaagatgaactgtttctttacatttcttgagttttaatgactaattgagggattatagtgttcagcttatttggaatttaagagctaaaaagaaaaattccattagaaaaataccttgaaaatgtgtgggttttttttttttttttggcatttgaaacttttgcccaagtttttgtcctccttcttctcttgtttttaactgccttttggattcaaatgattttggcacttcttaggttctttacaaaatatttctggtgtatatagccatttgagatctagaccataaccagaaatttcagccagatggtttttttcttttggtgaagcacagtttgtagagtgctaacaaaattgtattgtattcagtgttatttctgtaaaaagattgctttgggtaagatacattctttgtgtatttcttgacttcttatattttgttttggttgatgcaaagttgccatggttatacttttcactaaagaaataagtcctctacctatggttattggtaacctctagtagcctagattttcagtccaaattaaaagtgcctagagataaaagagtagaactatttatggattagaggatctgagagaatgtcctaaattattttgctgttttaaaaattattttaacaaaagtttagtaagtgtacatgatctaaaatttaaagatacaaaagggcttattgtgaaaagcaagtcttttttcctacctttctgtctactaggtcccatgccctaaggcagttcctgtttatagcacattttcttcctacatttataaccacattctttttcttttgagacagggtctcttgctctgtcaccctggctggagtgcagtggcgtaatcttggctcattgcagccttgacctcctggcctcaagcgatcctcccacctcagcccttgaagtagctgggaccacaggcacaagccacccacctgcctaattttttatattttttataaagacgaggttttgccatgttgtccaggctgctctcaaacacctgagctccagcgacctgcccacctcggcctttcaaagtgctgcgattaatagtcgtgaactaccgcgcctggcccatacgtagctttttaatggctgtatagtatccatcaaacggaatgtactataaattccttttttggtggacattaagtttgtttcctatctttggtgcgtttcttccattttttttttttttttttttttttggagacaggtacccaggctgaagtgcagtgtcacaatcatagctcaccacggtcttgaactcctgggctcaagcgatcattctgactcagcctcccaagtaggtaggaccacaggtgtacaggtacatacctccatttccagctaagtttttaaaattttgttgtagagacggggactcactatgttgtccatgctggtctcaagtgcctggcctcaagtagtcctctcaactgctgggtttacaggtgtgagtgagccacagtgctggggctatgtttgacttttaaaataatgatttaatgaatattgtatacatattttgcccgtgcaagtactttaaaattagaagtagaatttctgtgtccgtggatatacaatagcatttttgataaatatttccaaattgttctttgtgtattcatttctaaagatagaatgttagttttataaggtactctgcaaaaatatgattactagtttggttatatgctgtttataattagatttattttctctatttttattaattatgtggttgcaagcactgatcactcttgtgcaaacaactggctttcacttgtttacttcatcaaaaatgtattattttcattattagcagtcactgtaattttactttatgtggatagcctgtatcttgtgaatgaattgtgtttaaaaaagaatttgactagaggctgggggtagaggaaagggagagtttgaaataagacaaagaaacaaaaaaaagtaatttggaattatgaatctgtatttccattaagtcatataaaatggagtaacagggaaatgggaaaatatgttactagttccacccaggggatcctgatatctgtgattcaggtaagttgagatgaactaggtcttgaaggagatgatggagagggatgaaaagtggaaatggctgtaattgtcaggaagatttatggaatctgagaaaaaggaaatggaatggaaaagaagatttctagggataagacaaagaaccatctgtatgttaagcatagtttattcctttttttaaaaatctcatatatttttggggggcaagcgagtggttactgttgaagtcactttaaggattgttttgggagagaggatagcttggctccatatggattttttttagggatgctctaactattcttccctgacgtgaaaacatacacaaaagctctaacttaaaagataatgttctgtctgttatagtccacttagtttagaggtatctagggctggtctcacttggtagcaataattctctgtttggttccatggtggagcaaaacagacttgactgtacagccattgtccttcagatgtgtctaaatttctcagtctgtttatgagcatcaacaaacactttgtgcatacttctgccatgggttgaatgcgtctattttcctttaatttagtttaaaactagtaatggaattcctgaggttttgagaggaatagtgttggcaaattaagttttgaaactaaagacatattaagataccaagcaaaacagagagactattgctttagaaagagatcttaaaactccgctgacatttgcaaagccagtgtcttatatttataaaagctttagataggaactgctatttttctaaaattgttggtttaaaaataattgttacatttgtgcattttaaaagttgcttctaacacactttgggtatgcttgagctcagccttttcagcaaagtatacagacatttgggcatcagcctttttggtcttattctgtctcagacgatttatggattgtggatgtcagggatttgataagctcccattaaaatatgatgtggtttttaaaattgcttaaaatgccctttgaacctgttaaaatgtgctgccgtcatctgaattaagaaatttagctgccgggcgcgatggctcacgcctgtgatcccagcactttggaaggccaaggcgggtggatcacctgaggtcgggagttcaagaccagcctgaccagcataaagaaaccacgtctctactaaaaatacaaaaattagctgggcatggtggcgcatgcctgtaatcccagttacttgggtggctgaggcaggagaattgcttgaacccgggaggcgggggttgtgataagccgagatcgcgccattgcactccagcctgggcaacaagagcgaaactccgcctcaaaaacaaaacaaaacaaaaaagaaatttagctaaatattgctaaaatggcaaatgatagcacttgtcattttgatgtttgtgcgttaagtgtactttcattccctttagaaaatactagctgcatatacataggatttaatcaggaaaatatgctttttccctgattaaatatctttaatactatttcatctgcattccattaatattcaatcgtggcctcagctatttacgtgaattttacccatcaatccatgagcttttttgagtgcctactgtgtgttaaatctatctgtatgttttgttttcttgttaggcttcttttcagaatttttccagggcaagaattatgttttcttatatttggcaattttgcacaatgcaatttataccttattgtaatgggtaggtgcttagaatttattcgtccatttgtgctagacgctgaggctacaaagtccaataaggtaaggactcttatcttcaagttccttaaattttgataggcgataaaataattatagtaccataataatttaaaaatacatctttgagtgggccagagctctgtctgtgatggagattttactctgaagaatggtaactaacatttgtagagtgtctactctctgcctagggcttctgtttcagtttttcctcctagcaatctttcagtataagcatgatatccaatttatacatgaggaaactctctcagagaggttatataatttgctgcagctcatttagctaatgagttgtggagctggaattctaactcagttctttcttttaaactggggcttctaaatgttagcattattgacatcttgagccagatacttctttgttgtgggagactgtcctatgcattgtagaatgtttaataacatccctggctctacctaaggccagagtgagtcaaggaggcacgtaggacttaaaatttaaggaggcagtcactctcaggatcttgtaagtgctgaccctatgttttatctcacagcacctgagtaagttctcctgtgctatagcctgttgcttctagatttttgttttgttttgttttcgagatggagttttgctcttgttgcccagtctggagtacagtggtgcactctcggctcgctgcaacctccacctcctgggttcaagtgattcccctgtctcaacctcccgagtagctgggattatagacgcccaccatcacgcccagctaatttttaaatttttagtagagacagagtttcaccatgttggccaggctgatctcaaactcctgacctcagatccacccaccttggcctcccaaagtgctgggattacaggcatgaaccacctcgcctggccgcttctaggttttaattcagtattccctggtatcgatatgaggactaaatctcctacacacttaaaagtttcgtgggagctgaagaacagtgatgaacaggagcttttaggcgtttattgtttttctcatcccagaacacatactcttggccaaaagtgactaatcagaaatagcatttataaatgctaaataaatacttgctaagtattacagtgcttagaagctgtaagtgatgtgttatgaaacaaacctattgcttcaaattattggaaacttgtactatacatggaatatactcagcttactcatgcctggtgggcctagcatttagctgctagtcttggcttatttaccattagaaattccattgattgttttctcatgtctgtgcctcaatataataaatatttccttgttgtatggatacatgcactaataccttttgattaactacatgataaacacagtctagatcgtttgggtgggtagttctctagaatggagtatttaaaaaatggagactataataaaaatctaaattttaggagtattacaaaataatgcttaacagtttgggaggctgaggcaggaggataatttgaggccaggagtttaagactggcctgggcaacatagcaagacactgtctctacaaaatagcaacaacaaccaaaacaaaaattagctggctgtggtggtgcacacctgtagtcgtagctacttgggtggtgcacacctgtagtcgtagctacttgggaggctcatagggaggattgattgagcctaggagatagaggctttgtgaactctgatagtgccgttgcactccagtctggatgacagcgagactctctcaaaaaaagagaaaggaaaaaaaaagtgcttaattgaattattaatagtatgccagatttggaggccaagtagttttaacttacatttagctttctgataaagcattaatatttgacttacgataatactaatttttttcttttaagttttagtgtgtttttttgataaatggtcaaaactctgtcctaaaacatattgtcatggatttacacttaaagcttgtagtctggccaggcgtgggggctcacgcctgtaatcccagcactgtgggaggccgaggcgggcggatcatgaggtcaggagatcgagaccatcctggctaacacagtgaaaccccgaatctactaaaaatacaaaaaaattagccgggcgtggtggtgggcacctgtaatcccagttactcaggcggctgaggcaagagaattgcttgaaccggcgaggcggaggttgcagtgagccgagatcgcgccactgcacctccagtctggtgacagagtgagactccatctcaaaagaaaaaaaaaagcttgtagtctgatgaacaaatccattgcaatagaaaggagcctgtgaacgataaaataggtatatctacatatttttgaagtgtccagctaaagtcaaaacagcaacctagtttgggtttggtagagctcttacaggcttcagatcaggtatatataaaccaaacgctttcacttataataatagtgtataacaattctaacttgcagttgtattagtagttttatcattattaggaaacactctatactttgtagctttttgcctaaggtaacttttggttagagaagatattagttatctttaccatttgcctacaaaaatcgttgcttagggcataacaaataggaatcatacatttatatctaagaatataattggaactaagtggctgaaattaataacaataggtaacagagaacaattctatgtgctagatgctattctaagttacacacactctgtctcttaatccttacatctcctgcaaggtttagatattattccaaatgtatgaaagaggaaatgaggaagcaaagatataaaatggatgatattaaataaaactgaagatagaatgttctagagtcaattcaacttagattcatttcttcatacaacaaatctttattgactattgggccctgttgtctgtactggggactggggctgtagcagtgagcaaagcaaagttcctgcactcatgtagcctacaggccggtgtttagaaagagacaacaaacagatatataattcattggtggtaataagcgctatgaagaaagagttggtgaaagggttggaatgtggggtgagcttagtgctcttagtgtcttagtacattcgggctaatataacaaaataccttagactgggtagcttatacataacagatttctttctcatagttctggaggctgggaagttcaagtgaccagtagattcagtgcctggtaaaggcatactgtctgcttcatagatggtgcctcttgctgtgtcctcacatggtagagggggtaagattgctcccttcaacctcttttataagggcactaatcccattcatgagagcagagccatcttgacttcctcacttccccaaaggccctaccgcttaataccgttgttttgggtactaggttttaacataaaattttagggggatgccaacattcagaccgtagcagatgataaggaaagggctttctcctagaggttgcctgaagagcatgggagagtgagccctgtagatattcgggagagaacatttcaagagagggaaaagcaagtgtaaaagctctagctgagctaatttgtttcttactgtattcaaggaactgcagagagagcaaggggcctggccattgtaaatactttcacttttacttgggtgagatagaaagtccttggagagttttgagcagagtagtagtctgatctggtaagtctgctgtgttccactagtagatgtttcaaatggtaaggtgattatgagagtataactgttattccaggaaaaagataattccaccaatatctatcatcagtccttgtttgttttttcagattttttttttatgtgtacattaactttaacagtagaaacttgctattttctctcatttttttatgtgagatttattaactaaagtgctatttttctgaatggagagtgggccagtagcattatactatgtatttttaggattacaaagaagacataagttagccctgacaggaagattgcagtctagttggaaaggaaatactaaaatatgcaaaacaataattttatgttgtggatctattctatacaaggaattaatgtatcaagggataaaagtataaggcacaatgactatcctcagactgctaatagtctagtagaggctgagacagagaatttcaaagtctacaagttttgagatgagttgagtattaattcacctgccacaagagccgtgaggtgtagagcaagcttgtccaacctgcggttcatgcggcccaggatggctttgaatacagcccaacacaaatttgtaaactttcttaaaccattatgagggtttgtgtgtgtgtgtgtgtgtgtgtgtgtgtgtgtttggttttttgtttgtttcgtttttttttagctcatcagctcttgttagtgtattttatgtgtggtcaggacaattcttccaatgtggcccagggaagccaaaagattggacacccctggaaagaatatgagaagtgggggaagtctggcctgtgcatgcttcagagagctggtggagcttgaagaagtggaggattggcagaggttattcagggcgtgggaaacactgtgagccaagcacataaagtcaggtgtatttgtggtagtgggcaaaccagccttgagctgagattgtgtgtaggattataaaggagtaataacactattgtttattgagcttctattatgtaccagtcccttcattacacacttgatgtttataacaactttatgaggtattattggccctctttttacaaatgcttagccaaggtatctggaggttaaattacttttgtaggatgacacagctggcaaatgatggaaatattacttgagcagtttgattctagataccatgaaaatctattatattggtagaattggggctagataagtgcctaaaagctggcagagtaggcaactcttatgattatagtcaataggaaactattaaagattgttgactagaagtgtaacctagtgaaaactcttcaggagtattattcaggcaattgtgtgtatagtgtattggacaatgacctttgcaaaggtcaatttagaggacagacaggaggatttaaagagagttgaactaggatgcttgaataggaattgagatgtgagtccagatgggaccactttttggaatgtatttttttcttgatgataaaaatatagaaaacatacaaagttacaggaaaatatggagcagatggaacttactcatttctaccatgtaccatgtagaaatgacccctgttaatattttagggcattccttttcaaatctgtcccatatcatgtgttcccctctgccctccaccctccaattttggagaaagcatccacaaggctacatatctcctctcatagagtgtgaaagtttttaagaaacaacattctaaaataagatgattttatttgcacacatgattttatttgtggaatgaatgagctggtaaattctggaattcagtgaatggagagggatgaatcacaggtagcttctagatttttagattgtgtgaatggttatataggagaatctagctaggttttgatggtgaagttggagtagggtgggggtgggggatgatccagaagaaaatggtgttgaatttgatgtgctggtatagtatcccaagttggaatctggagcttagttgagaatttggggtcatcaaataagccagaaaatgtggagaaaaaattgagtttaaaatggccacaattctggtcagagtagtgtttctgacacttcagtttttttgagggccattccaagattcagttatttccttaatatctttaaatgactcttttccttaaatacatttatttaaagagaaattttatattggtaccgtaaatggaaaactagtatcactggctttgaatagttggcaatggcaacattaaaataacaacgaaataatggtattaacttttagatagatgctgttacctgctaaattctctgagcctaaatctgcccagtaaaaaaaacaaaaaacaacaacaaacgacatgaagatactaagatcttgtaattagaaggcttgagggattgaaaagctattaactttctcatgacatgattggttattgtatacattctacctaaagtgggcatacatcccacacatcctaaagtggggagcatcaaggtatggtagagggaagaggaattggcagtgggaatagagaggaattgataaaataccttctcagtgtgttaggaagttttatctagaatataaattagtaaatgaaaatgtggacaaggtgcctaacaatgatgaagaaaatgcattcttagatttcaaatatagtatctattagaacatttcttttggttatgattctggtcttatgattgagtcttagcaggcttatttaattcaaccataataattcagtaaatgacatttgtagatacaggcttaaacgtgaattagactgtcatctttttatatatgaactgtctctaaaaaggaagaattccacccctttttagatcctactttgagggaatgtgattatatataatagggatagggaataattttgaggaatagttttgtgagtcatatacaaaggtatgaaccaacactggtcacagatgtgaagttctttttacttttggtggatgggggaggaatgaatgtattaatggtttacttgtgtttttgttatccttaaaatgaaaatttgtcccttaattctgaacacatttttggaagttctttaaatttatgctgattaaatcattctacttttctgtggattatgcataatagtactttgttgttttctacattataaaattaattttaaagaatatctaaggggaatgtatgtgctttccctgccttcttttcaagctgaattgagatggtcccaatttaagatgaactttttctgttgaaaaaagacttgtttaggaattgccatccttaaaaaaaaaaaaatcattgtattgctacatatgatgattacaacctcccccctccccctttaaaagaatgagacaagatataaataaatacgtagtgtaattgccaggacacaaagctctgtaatgtacctgaagtacagactgctcatggcacctaaccaccatttttaacagtgattctgtgggggtggaaagacattcgtgactcccgaccaaccagtgaatcattttggcatgtaccatgttgaagtttggaatagaaataattgtttctagcagaagagatgtattagaattagatatctcttgctgttatctgctcttgaatgtgccagaaattgtattcagtagaaggtataattgttaacatatttcttttgcattatattagggcttttaaacttaattttgagcaacattcagtttagcataacaaacaaattagatgttaagtgttagattcactgtagaaatatgctccactgctcatctggagatttttctggttctcagtttcttcaagcatatcaggattctcgaactctggagggtgtggacggttgtgtggaaagaggtgatgaattggctgtattacctgaaagtaaattccccatcttaatcagttgatgttgggatttcattatcatattgtttattaaaacaccattctattgttgttgatatattttccaggttacaagcattctttactagacagcattagcgtagacatctgtggaagcatgtgtgaaacaactgtatggagaaacacctatctgttttttttgttttgttttttttgtttttttgtgagatggagcctccctctgtcacccaggctggagtgcagtggtatgatctcggctcactgaaacctccgccttctggatttaagcaattcttctgcctcagcttcctgagtagctgggtttataggcacctgccaccacgcccggctaatttttgtatttttagtggagacggggttttaccgtgttggccaggctggtcttgaactcctgaactcaagtgatctgcccaccttggcctcccaaagtgctggtattacaggtgtgaaccactgcacctggctaacacctatcttttgtattaaagggacatcatttattagaatggacttcactgaatgcagcttttccagttgataatgtagttattccaagaaatcttatatataacacagtttactgtgatttttttaatttttaattttttttttattatagagttggggtctcactggttgcccaggctggtgtcaaactccgaggctcgagcggtcttcccacctcagcctcccaaagtgctggaattataggtgtgagtcaccatgcccggccactgtgatttttggttgatgacagcttatccagcaaatatttattgcatgcctatgtgtcagacattttttaaggtgctcagtattccgcagagaacaggagacataatctctgtacggatggagctttcattatgataagtgagaggagcagcaagcaaattaatacatacagtctggtaattataaatatgagggaaatgaatgcagtgtggtttcaaagctatgtaccccattatgatgacctttctttagtttccaggcaaatttatagtctgcctctggtcttcctgttggaagtgttgctgaagctagaagtaaatctacctactctagcagcagcagcagcatcagcatcagcagcagctgccgcctacagcctttccctccaaggagtcccttattaattttgctacataacaaattaccataaattcagtggcacccacagttctatacatcaaaaatctggatacatgtggctagattctctgctcaggatatcacaaggttgaaatcgaggtgtcagctgggatgatttcttgtctataggctctggcaaagaatccacttctaagctcattcagattattggcagaactgagttccttgcagctgtaggactgacgtcttgtttctttgttggctgtcagctgggagccactctcagcttatagatgctgcctttattctttgccatatgccccccctccattttgaaagccagctatggagaatatcgtttttgtctaatctctcaccgaccagtctctctgacttctgtcttctagacccacgtttgaaggatttttgaggttagttcaggattatccagctggataatcccattttcttaaagttagcctgatcatgaaagtaaaatcccatcatattcatagtcctagagattttacagggtatatacatcatggagcagggattttggatcttagaattctgcctactactgacagtccccattgcatggctgccagtaagtgatgcagtcgcctcttgtgtgtggtgtgtgaagaggagcattagcaaccctcctttgtacatctgtctatcaccagagaccatgagcttctacgtggtggtaatggagattcttttgggctgtggagaggagtttgggcagtagttggtaggaactgctgaagttgtgaaatagtgtctttgcatttacctcttcagtgctaggagtaagatggggaatgatggcttggagaagaaagcagagtggaagggtaggttctcatgccctacatcacccctggggtgcagagtttagccattttatagaaatgagaacaacaccagtgcttttattttttaaatcccaaatgaaaattagtattaaattgcttttacagatttttaaaatttggctgggcccggtggctcatgcttgtaatcccagcactttgggaagccgaggtgggtgtatcagttgaggtcaggaatttgagaccagcctgtccaacaaggtgaaaccccgtctctactaaaaacacagaatgtttattgcatgcctatgtacctgacagtttttaaggtgctaagtattcaacagagaacaggagacatctctctgttctgatggagctttcattccgatgagtgagacaagcagcaagcaaattaatagatacagcctggtaattataaatatgagggaaatgaatgcagtgtggtggcaggcacctgtaatcccagctattcgggaagctgaggcaggtgaattgcttgaacccaggaggtggaggttgcagtgagccaagatcatgccagtacactccagcctgggtgacagaatgagactccatctaaaaaaataaataaaaagtttttaagggaatttaaagcatagaaccaggagactgaagtgagagtttatttaagaacaccaaataaaacaaagtacagatgatccctgatttacaatggtgctacctttgattttttggcgtcacaatagatttattgggatgtaatcccttcacaagtcaaggaatatttatatacattatagagggaaaataacataagtctgctatgttaacagttgcatcccattataaaaaatatattttttctcatagattattataatttaataatgttctttttatttaatgtatgctttaaacataaaatgtgcattatgataactttaaaaacacaaataacttttccttctttctcaaagtagaattacaacctgatggaaataaatggacaactatttccagttccccactttttaagttgcttacagttgtgcatctggtggtagaagcctaatcccccatagacagggtctcattctgtcacctagggtgaagtacagtggtgtgatcacagcttagcgcagcctcaaacccctaggctcaagtgatcttcccacctcagcctcccttagtagcaggaactgactacaggcacatgccaccatgctgggctaatttgtattgtattgtattgtactgtactgtactgtatttgtagagatggagtctcagtatattgctttggctgatctcaaacttctggcctctagtgatcctcccaccttggcctcccaaagtgctgggataacaggtgtgagccaatgtacctggcctcttctaatttccagtttttgtttctaaaaactgaatatcacatggtacctaatattagcaaatgaggaaatggaagcaaaggaagtgtgaactttcttttgtagtagtcaacttttggcttaatgttttgggaatatagttctgtggaacatttctctgcttttacagtggtggaatagtaggattcactgtgtagctaaccttgaaatactaattccataaaataaaggatatacataataagaatctgtttagcaatagggtaaataagcactaaggtggtattctcatactagggaaaatgtttgctttattacatcagcaaataatgtgttccacaagttttgatttattattttaactgtataggtggtcttacatctaaaaaagaataccgcttaaaagacttgtagtacagcatataagttatattagacatggaactatgtttctgccaataactcgacattttgaggacagatagcatctcatttccaatttgagattgggtacaaaaatatcctagggctgagaataggcatagtaaattgcaccaacacaaaccttttgtgtatttgtagtggaggaaaagtctacattgagtttgcgtggaaaaatgtcataaaagctctttatgcttttaaccagtagattggacctcattttgtgatgattactttgtatgattagtttccaatgcagattccaagaatgtttctgcacatgagttccttgtcttttttctgttattttcacctttggttgattgcaatccacccccgaccaccatttcttgttcaagaagtgtttcattagtttttcttctcttatttttattttcatgttttctttaatgtttttatactaacctaaaaatttctcctagtgctttaaaaaattatgagacagtaaagttgtctttggatgttttttatttttacccgaacactatttgagttggcttgcaagacatgcttatattgcataaatttctgttcatggggaagagtcactttgagcattaacacttctgggaattgtttcaaaatttagtttattgtcttaatgttaataagagttccagaagtctggttggggtttgtttttgttttttgttttttgttttttcccctatatccccaaagactatatttgattttgttttaattgggtcctgtaatacttaattggtttgatcctggatccttcataagctataattacttttagtagtctcttgaatttatccagtattttagaataatatcgcaaatacagttaggcagataaatttgggaagtactgatatgtattctgttttttttcttttcttttctcatctgactgataacgtattatttaaatatatagcaaaatccagagagagagagtactcattctccctaatatcccttatcttttcaaatgcttttatagcatttgaaagattcttttagatccagttcggtgtctacttcttctttcaagccctctattatcttccccttctctaaatttacaatttcgtagtttacttcttagtcatttctctgttttgtattgttcatgaattgttttaatgtcttaatattggcagccttctatggtttgaatgtttgtcccctccaaaactcatgttgaaacttaatccccaatgtggcaatattgagaggaaaagcctttaagaagtggttaggtcatgagggctctgccctcatgaatagattaatacattcatggattaatggattaatgggttatcacgggaataggactggtagctttataagaagaggaagagagacctgagctagcatgctcagccccaccacgtgatgccctctgctgcctcaggactctgcagagagaccccaccagccaagaaggctctcaccaaatgcggtccctcgaccttgggcttccctgcttccataactgtaagaaataaatttcatatcttataaattgctcagttttaggtattctgtaataagcaacaaaaaacacactaagacacagccctactacaacatacttcttaccccctctcctacactagtcaatttcaaactccttgagtgcaggaggagtatgcctttctttctgtcatgttccgacacataataggcactcagtgataaatacttggcattttttttggttgttatatctctgactatgtttctgtcctgttatatgggtgtgcaatgtaaataataagacaaatattattttaatctttttaagcttttataatacttgtttaattgtttgcaaatttgttttatagttgacacatgaaatccagcaactctgtgttgtagatcaacagagcccattagtactgctgggaaaggaaaccaaggcctcatagcttttctcttcatatgaaaagaacttcattaatttttaaaaaatttaatagactgtgatgtagttttaatctcatggttttaatcttgtgtttttaagcattttccttttctggatgaggttcttggttttgactgtgtagaagtatgttaattcgattatatttagttgatgaatttgtgcccctaagtatggtacttaaaaagttgcagccgggcccggtggctcacgcctgtaatcccagcactttgggaggcccaggcgggcggatcaccttaggtcgaaagttcaagaccagcctgaccaacatggagaaaccctgtctctactaaaaatacaaaattaacagggtgtggtggcacatgcctgtaatcccagctactcaggaggctgaggcaggagaattgcttcaacccaggaggcagaggttgtggtgagccgagatcgcgccattgcactccagcctgggcaacaagagcgaaaccccgtctcaaaaaaaaaaaaaaaaaaaaaaaaaaaaaagttgctgcagtgctgcagttcttgcagataagataataagattgtttactgttttctttgcatatttattcctgtgtgtatttttctgtgaggtagcctttcagtctgtccatttgtatcatttgacattcagacttaaatcaactctactattgctggtgtttacaaatgctagtcattgaaaatgtcaaaatttggatttgacccaagagttgcaaataatgtaagcttttataaaatatatccaaatatctattcttagggagaaagagagaaaatacggcatttaaggagtggtttttaacagttaggctttagaattgctacattcccaaagtatttctctagtgaatgacataccagttaatgaattgttctacaagaaaggcatctattatgattggcctcactattactggaagtcctaagaattaacagaaattaataatgatagttggaaaaaatgtatactctgtagacaattttagatcttttaaacaaaatcttctggttacctttctaaattaaatttgtattttaaaattaaaatgatatttgtacatgtgtagtttaaaaagtcaaattgtattacaaggcttatgaaaacagttccccatctctcttcacctccaattaccaatctttacaaggcagtcagtttccgttcttttagttatttgttctgatatttgtcttcatttttctaagtcagttattctgctttttgttgggttttcattttagatagtagctactgacttccatctaagaaggatgaagattagttatcttaatctctctactgcccacaggcttttatacatacttccctttttctcatctttatagggtatcagattttgggggtagtttagtgtttattaagactatgcaaatatttttcacaactgagtcacaaaattcactaattatattttgtttttccagataattatcccagtttaaaatttttttcttgttattaattcatttacaattatttaacaaatctgaaacagctcttaatatggttggacacattaagtaatctgtcatctccattttctcctgggagatagtctactgcatcctgagcagaatttcacataattttcctctttttcagtaagacattttgtcttgcttcagttgtgacttgtgttcctaagattggggtctctcattcaccctctccagagatgcatctccagactcttatcagggatagggagaagattggttttcagggggaggccacttataagaattttcagccagtcatatggtttccagccccatcctgtgttttgtcttcactgtccctacaatacctaaatctttccagcatgagtcaacttgctgctgctttttttgttaaattgtggtaaaatataataacaaaatttacggctacaaccattttaaagtgtacagttccatggtattaagtacattagtgtgcaataatcaccactattcatctccagaactttttcatcatctccagctgagactcagcacccattaagcagtaactccccatttccccctccctagctcttggcaaccattattctactttctgtctttatcagcttgcttcctgatggcttctccctgtcaggtttaggtttcaactttcttggtcttgataggttattcttttccttttctagcttccaaaatgatgttgatgactctcatttgctgttgtgtctttcccaattctcctcatccttatgggctttatacttctaaaaactcctataactttttaaagcgaggtctcaggaagggtcagtcatgctttacatccacctttcccctcccagccctcattcctttgttattgtttttaaatttaggtttattttattaagaatttattgggaatttacaggtatgccaaacaaaggcaattttaacagccatgttagctataaaattaagtgtgataaatggacttgtcactggcttctattgtgtttgtaggggtttgattctgcagatctgtggcaatctctagccccctctttctctccctagcatacctcatgtggtgccagctgtcctaagccatattctgtgcttctgctgcagcacttttcatagtgataacctgacccatctgtggagaatgattttgagagagaaacttatagccagacacattaaaagtctgttattcaagttacaattgagctgtttcctttctgtgcaacttctctgagtgccctcggtagagttaattactccttctgtgtcttgacacttgtgaataattctattttattctgtctccgttacatctgtctctgtacgctagatatctgtattacaagatctgcctctttcttccctaaactgttttcaaggtttgaaaaatacatattctgatacagttcttggcccatgatagataataaataattatttactaaataaataatccatccaaattgattgaacaccctattttctggcaagcgtattgtcattgtaccctttatcactaatgtccactgaaagctgtgccagaaactgtatttgcttttgcttgttacttggagtcaataatgtgtagtgattaggcgtgtggccagaatgtcttggttcaaagaaacaagcaagtttctttatcttctgtttctttgcctgtgaaatagagacaataatagctagcatggaatgtggtgaacattaaattaatacatctaaagtgctagctcaataccctgcacattgtctttatagtgaatctgtttttcatctttatgggatacctgctataataacattagtacctgtgaataaaaatcaatgtaaaatgaaaaatctagttagtatttaaaagatttagccctttgaagctctttgaacatgttctgaaattatcttcgtggacagtgtgccatttagataataaactgggagaagtagtatctttcagtgttacatacctactaaaatactgtattctttaaatatactataaggtatccaactcttttaaacatatagagatactttgaatggcagtgccagtacttgtgctttttttctccctgaggagggttttatgcagcccatcagtaaatttgatatttggcatcatttgtcttctcatttgagaacctgcaggatttaattctcccctcagagactgtgtgctaagggaagggaaacctccatcattcattaagcagtcaatgaatacttgcttatgtactagatgttttggacacaagggagaataagacacagttgttttcctaaagggaccatcatctcttcatcatttcagtagtaataaaatcaaatgttccggctgaatgtgtgcacactctttgacccagaattccattgataatgttttataaatggaataaaaatgtacagaagtgtgtgtagaaagtgttcatcaaactgttaattataaaagcaataaaaatatcagttttagtatattcattatatttcccacagtttcaattagaaacgtgatattacttaattaaaattttgttttaaaaaaactctgaactggtggatttacatggagatgaatagaggattaggtcagtcgttgagttctatgatccattacaaaggaatggtaaactgctcatatccgtgttagggcccccatttcttactatatatacgactggctagttggttattgaaaattctgtaaatcttgtttcttttcttccatctataaaatgggcacagtgttagtagttatgaagtttgttttgaggattaaatgaacaatgtatgtaacctaaaaacaaaaaatacctcagtaaatattggctgctcttattgttcctgtttttctctatactctttatctgtttaatgagttttctctgcagcttttgttcagtcagtctcaaccagggatgacagtgttatatttaatctgacagctcccattgctttgtaacagaggtttctgaagcctttgccagactccacagagctgtcacctgttacctgtgtctgccaattttgaaggacgagaaatagcagtacatgtgtcttaggtttgccttccttgctgtaaaccttttatctctttatacacaccctccctccctgttctcttttgggtttcatgtactttttgatcttgcaccttattttaataggagtctgttagctcatctctttttggcgggggaggggaatattttgactgttactgttatttcatagcataaattactctttataacagggtagtaattcagagctagccttaggacctttttagctctgcttcttctaggcttctcataaaacacaaatatagctagtttgtaagacttatttgtgcaagcctcatttaagaaagaagacctggatcttgtatgaactttttccttttattcccttgagtagaaagctcacactacatttagtataagaatcaaatgcagaagaacttttttctaagggattgtggtatctttataaggtgagtggattgtgaccagaaaagaattttttttgttgagttgcatacacttaaattcatggtgtttaggtatatgttctgagggcatgcagtaaataacaacttgtatattataattgatggttaagaaatagcccttggcacatatgcaaaaatgattttactttataacacatcccgggcattacctagaaatgaagttatagacactataaaaagttttcactttccttgatggctttttctgtactgatgggtctagagtatttatgaattatcataaatcagaacgttatgttaaaaagaatacaaacagttgaaatcacttgctttggatttagtattttcttgttattttaaattcaggaatcatgccatatggtattcagttaacttcatttcagttaactttattttgaagggcaaaaggaagatgtcttaatgacatcattcagctaggaatcagaagataagttccttgggtaagttgctcaactctcaaggcctcagccacttgtaaggtgtaatgtagctctaatgcatgagcatgaaccttgaaattctgtgacttctccccccgcccccaaatctctggcaaagtttggggtttgttttttttttttgaccttttaatacattggatgtacattaacaacaatatacctttccaaattcttctttcttttttcctaaattttaatctgaaaagatttgcttttttaaactctctttttttttaggttggcagtcaacaatcacctttttaaaaactatgcttgattttgttcatatatatatattttattcattaaaacatagtttcaaccccatatggtaactggctcctgagaatagggaaactagtccccaagcttcagcctccccacaaaccttgtatcaacatttttactgatgagtaataaaattaacagatttgagctgtaacattctgaacactggaaaaagcattactgaactgtaaaatagacctgcagagaaatctggcagaggaggaggagtgtgcgttagcctgtgacaatgaggcactgacttactatgcactattttaacagagaattgaatagttttgctatttagatattttactgagttatttttttaaacaaaagaggaatatatatggttttctgataataattaaaaattttttgacctaaaaatgacccttgggggtggggctcctcaagtgtaaagctcctgctgggaagaaaattgttgggaatacataggttggttttaggcatggtggaatcatttgttacctcaatgaaagctactccttggatagagttgttttcctgtgatatcacttctccttgacagtgttcctttgaaataaatctaaatctgcctagatatttctcactttctaaattaagaaaataattatctataatttataaaaataaaattcgaagtcttcccaggataaatccattggttaaaagcaaacaatactttttgagtttctttggagagatggaaaattgcttttttttttctgtgtgggtgaggcaggtgagaatagatttcgcccctgcatgatgtcaatcagaatttttggttagtaaaaaccaaatcaaatatgttttaaaaggaaattgggtagagctcagtggcttatcaaattgttgtgagggttggagaaccagattcagggctaagcaaccagaaacaatgctccaaatcacattgcataattcccatgaggatgccagtaccatctagagacagacggatggatgccacaacctgtcccagcaacactgctggctctggatgactctaaatgctgccacctctgccccagacttgaccttgctgaaactgctccaccattagtgtgagaatgagctccttctgctctctgcttctgctcactaattcgctactctgggatgcacatgtgtgtttggcaaaacatgtatcctagatgtatgggacatgtgggaaagtgtttaaccttctgcaattataagacgggaggatggccagatgcagtggctcatgcctttaatcccagcactttaggaggctgaggtgggtggatcacctgaggtcaggagttctagaccagcctggccaacatggcgaaaccccatctctactaaaaatacaacacttagccaagcgtgttggtgtgtgcctgtaatcccagctacctaggaggctgaggcaggagaatcatttgaacctgggaggcggaggttgcagtgagctaaatcacaccactgcactccagcctgggcaacagagtgggactgtgtctcaaaaaaaaaaaagatgggtggagttctcaagaactccaagctgtagaaccagtgttttaccttctgaaatcatatggcaggagaagttcaagcagacaaaaagaataatagatgttcactgcacctgatgtttcagataaaatgtgaagccctcaatatgtgccaccatgctaaatgttatacaagaattatctgtgtcatcctcacaacaaacttgttagtttcattttagagattaaaagatagaccaagagcaggtaacctgcccaagattgtacagttagtgatagcagtgttgggatataaattcagagctatgactccaaagccagtgctaactacttaattaaactgacttttaatgtcttttctgtcctgatgcatttagctcaaaattctgtaaatgaatctgttagattgaacctactatgtttattaagattttgtgtatggcatgtttatgtgtttaggtagtttaaggaaagctgaaagtttctggctttaattttttctattttcagctgatgattaaataatttcttattctttttctcactttgtgactatttttataattcactttgcctcagactacaacctgataaaatgctttgtttctgaatatcagtgcttagaaatgagttactgagtgtgagagacaggctgacataaaaggagaggggatatagagtgaccgagactgagggaggaagggaaaaacatccctcgcgctctcttgctgtctctctctctcacacacatacacacactcacacccactcctcgagagggagaaacaaagacaaatacatgtggaagagagggtatgcacacacattaccctgaaagcaacatttttaatcttttgttccctctaatggtgggttgaaaaacaattaaaattttccctttctgtatcaggaaagtcattgaggtctttttttttttttttaagtttgaatctgtgctttccctagagtaaacagtagatcttaagcctctctaccagtttacattttatattggtttatgtatttttagtttgaccgccccacccccacccccacacactgcaaaaggtgtcatatctaggagaaataaacaagaactgttatttaaccccgggaaatatccagcttggtttgggcaagaggaaatggtaaagacaaactcccatagtttctgtgatgtcaattaagctggagtatttattcgtaaaccacctctcgttaattattactttagtacaagtctgtcctacagatttttctatacttcccaaacagtatttcataataatgttattttattcacttgtgcctttaagactaaatgggcagatatatttttgtaaaagtgagtagattattattattattattattactattttttttttttttgagacggagtttcgctcttgttgcccaggctggcgtgcaatggcgcgatctcggctcacagcaacctccgcctccctggttcaagccattctcccgcctcagcctccggagtagctgggattacaggcgtgtgccaccacgcctggctaattttgtatttttagtagagacggggtttctccatgttggtcaggctggtcttgaactccggacctcaggtgatccacccacctcagcctcccaaagtgctgggattacaggcgtgagccactgcgcccggccaaaagtgagtagattaagtgcccttccacacacatgctcttgtagaccgtctgaatgtgggctgggtgctagagatgtgcttgatgtaaggtaaatatccatgaaattaaaagtgatttgtgttctgtttaaatattaaattgtcaacattgagtatactataccttttgtccttatctccatctgatctttcctagcatataacttttaatatgagaaatgttatttctttataatttttttgttttaatccagtactagctgtataaaatggatttttgcataaaagcagttgatgttatatattcttctattctgccacttttaagatttatgcttcttatacaaactttttagtgaatcagttttgaaatgagcagtagtccatttttgaaaacagtgttggcatatatagacttaggatccctaatccaaaaatttgaaatctgaaatgctccaaaattcaaaactttttgagcaccaacatgatgctacagtgaaaatttcacatctgacctcgtgtcatgggctacagtgaaaacacaggcacacaacacacagcttattcatcctccacaagggaaaaaagaccctcccagccctcacagctgtagttaccttttctgtgtgcagaatgatgatagtgctaaaccaccacagattgtccacgtgggtggctgagatagcaacacctttgctttctgatggttcaatgtatatacaaactttgtttcatgggcaaaattatttaaaatgttgtataaaattactttcagcttatatgtataaggtatatatgaaatgtaaatgaatttcatgtttagacttggtctcattcccaagatatctcattatgtatatgcagatattccaaaatctgaaaaaactgtgaaattcgaaacacttctggtttcaagcattttggataagggatactcaacctgtacatttttttttttttaatctttaggggcatttgccaatggtgaatctaactaatcatctagataagaaatggtgtgtgaggccaaagcagtgatccactgaccctagactgtcctaaagagccacaccaaggaaacagatttcttactggaattctgccattcctaaagggcacataggccatttctaatttcctttaactcataattcatgcatttatttaaactcttcagcattgctgtcggttctgattcatatttaatacatgtatgttatacatgtattaagctaaaatgtcctataaatttgttggaatgtgtaattctggggggaaaaacatttatattgcgaacttgagttctttccttgctcataagctacttcattttctttacctgtaaaatataaaatgatttcacaggcattttccccccactctaaaaatatgttgtaatgtggcaaatttatagggcttgtcttttttcctcttcttcttagcatttttttcctatattgcatttatatataaaatattaagcattttttttatgtataaggaatgaggcacaagttagggaggaccactgaattcatttggcttatcttaactaagttttgtggatttcatgagaaacactatttcacagcagtagttcagagaaaacaggtatagcttgtcttgagtgctttgagatatggatttattgaagacctcttcatgaaacatgaattctacttctcaatttgttggaaactggttgaacacgttggtgattccttctttgtcttttgtacaattcccacttatgagaaattaccttagaatttagttgtgggaaaatttgtctctatatcctgtacactcctgaaaaatatttagagcctaccagaactactgacaaatgaagatagtgttttccttctgacagataaaggcagattttttttttttaattgtaactatttttggccagggggctcacgcctgtaatcctagcactttgggaggccgaggtggcagattgcttgagctcaggagtttgacaccagcctgggcaacatggtgaaaccctgtctctgtgaaaacatagaaaaaatataattagctgggtgtggtggcacatgcctgtagtcccagctactttgggggctgaggcaagaggatcacttgaaaccaggaagtcgaggctgcagtgagcagagatggcgccactgcactccagcctagttgacaaagtgaaaccctgtcttaaaaaaaaaaaaagttgtaggccaggcacagtggctcatgcctgtaatcccagcactttgggaggccgaggcaggtggatcacctgaggtctggagttcgagactggcctgacaaacatggagaaaccccatctctactaaaaatacaaaagtagccaggtgtggtggtgcatgcctgtaatcccagctacttgggaggctgaggcaggagaatcgcttgaacccgggaagcgggtagcgcccttgcactccagccttggcaacaagaacaaaactccgtctcaaaaaaaaaaaaaaaaaaagttttaactggttttcattgacttctatttttgaagttatggattattgcgtagaaaataagggggccaaggtgtgttttatacaaattgcatccacttctgaggaagttaatggactgggtgacagtctctgggacacatagatatgaagataccatcttcaagaagaggttgtcaaatactgaggtgttttggtattcatgtaagtcagttccctgggattgtataaaaggcaaacctgctttaataccaggctgctcttcatagtgaatattttgtgtattgcattaaaattcatgaaaaacagtaaaatcacagactctgatgacgtttacatttgtatgcctctcttatgcataatgttgaagacatagaagaaaactcactctggaagtttcatttttttaagttcaggaatacgtgtgcaagtttgttatattggtaaacttgtgttacggggtttgttgtatagatgatttaatcatgcaagtactaagcctagtacccaatagttatttttttctgctcctctccctcctcccaccctccaccctctggtaggccacagttgtctgttgttcccctctttgtgtccatgtgtactcatcatttagctctcacttataagcgagaacatggggtatttggttttctgttcctgtgttagtttgcttaggataatggcctccagctccaccttttgttgctgcaaaggacatgatcttgttcttttttatgacagtttagtattccatgttgtatatgtaccacattttcattatccagtctaccattaaagggcatttaggttgattctgtgtctttgctattgtgaatagtgttgcagtgatcatatatgtgcgtatgtctttatgacagaacgatttatattcctttgggtgtatacccggtaatgggattgctggattgaatggtagttctgtttttagctctttgaggaatcaccacactgcattccacagtggttgagctaatttacactctcaccaactgtatataagcattcccttttctctgtaaccttgccaacacgttatttcttgacttcttaataatagtcattctgactggtgcgagatggtatctcattgtggttttgatttgcatttttttagtgattggtgatactgagctttttttcatatgcttgttggccacgtttatgtgttcttttgaaaagtgttggtacgtgtcctttgcccactttttaatggggttgcttttctcttgaaaatatgtttaagttccttatagatgctggatattacagctttgtcagatgcatagtttgcagatattttctctcattctgtaggttgtctcttttcctctattattagtttttttttttttttttttgctgggcagaagccctttaatgtaattagatctcatatgtcagtttttacttttgttgcaattgcttttggcatcttcgtcatgaaatctttgccggttcctatgtccagaatgatattgcctaggttgtcttccagagtttttatagtttggggttttacatttaagtttttaatccctcttgagttgatttttgtagatggtgttggaaagggatccagtttcagtcttctgcatatggctatcagttatcctagcaccatttgttgattagggagtccttttcccattgtttgtttttatcaagtttgttgaagaccagatggttgtagttgtgcggccgtatttttttgctttatcttctgttctattggtctgtatgcctgtttttgtaccagtaccatgctgtttgagttactgtagccctgtgatgtaatttgaagtcaggtagcatgatggctcctgctttgttcttttttcttaggattacattggatatttgggctttttttgtggtggttgttccgtataaattaaaaaatttttttttctagttctgtaaagaatgtcattggtagttgataaattgctttgggcagtgtggccattttaacgatattgattcttcctatccatgagcatggaatgttttcccatttgtttgtgtcatctctgatttctttgagcagtgttttgtaattcttgttgtagaactcttttactctcctggttagctgtattcctaggtattttttttgtgtgtgtggcaattgtgaacagaattgtattcctgatttggctcttagcatggctgttgttggtgtataggaatgctagtgattttagtacattgattttgtatcctgaaactgctgaagttgtttatcagatctaggagcttttgggctgagactgtagagttttctagatatagaattatgttgtctgcaaacaaggatagtttgacttcctcgcctcctatttgaatgccctttatttctttctcttgcccgattgctctggccaggacttccaatactatgttgaatagaagtggtggcaagagggcatccttgttttgtgctggtttttaaggggaatgcttccagcttttgccctttcagtatgatgttggctgtgggtttgtcatagatagctctaattattttgaggtatgttccttcagtacctagtttgttgagagttttgttttttgttttttgttttttgttttttttgagatggagtctcgctctttcacccaggctggagtgcagtggtgcgatttggctcactgcaagctctgcctcccgggttcacgccattctcctgcctcagcctcccaagtagctgggactacaggtgcccgccaccgcacctggctaattttttgtatttttagtagagacgggatttcactgtgttagccaggatggtctcgatctcctgacctcgtgatccacctgcctcggcctcccaaagtgctgggattataggcgtgagccaccgcgcccagccttgttgagagtttttaatgtgaagaggtattgaattttattgagagccttttctgcgtctattgaattgatcatgtggtttctatctttagttctgtttatgtgatgaatcacatttattaatttatatgtgttgaaccaaacttgcatcccagggataaagcctgcttgactgtaggggattcactttttggtgtgctgctggatttggcttgcttgttattttgttgaggatttttgcatctatgtttatcaaggatattggctgaagttttctttgtgtgtgtgtgtgtgtgtgtgtgtgtgtgtgtgtgtgtgtgtgtgtgtgtgtgtgtctctgccaggttttggtatcaggatgatgctcacctcatagaatgagttaaggaggagtccctcctcctcagtttttttggaatagtttcagtacagatggtactagctcttcttttattcatttcttctagattttctagtttgtgtgcatagaggtgttcgtagtagtctgtgatggtatttttatatctgtgggatcagtagtaacattgtctttgtcatttctcattgtgtttatttgtatcttctcacttcttttattagtctagctagcagtctatctattaatttttttcaaaaagccaactcctgggtgtattgatcttttgaatggtttcttgtgtctcagtctactttggttcagctctgattttggttgtttcttgtcttctgctagctttggagttagcttgctctttcttctctagttcttttagttgtaattttaggttgtttatttaaggtccttctgacttttttatgtgagcatttagtgctataaatttccctcttcacgctgccttagctgtgtctgagattctggttgtatctttgtactcattagtttcaaataatttcttgacttctgctttaatttcattgtttacccaaaagttattaaggagaaggttaatttccatgtaactaaggttttgagcaattttcttagtcttgagttctatttttcttatgttgtggtgcagaaaggtagttggtatgattttggttcttttgcatttgctaaggattgtttatattcaattgtgtagttgattttagagtatgtgccgtatggcgataagaagaatgtatattctgttttggggtggagagttctgtagatttatatcgggttcatttggtccagtgttgagttcaggtcctgaatatctttgttaatattcctcctctaaggtctgtctaacactgtcagtggggtgttaaagcctcatacttattattgcatgggagtctaagtctctttgaagatctcttaagaacctgctttatgaatctgggtgctcctgtgttgggtgtatggatatttaggatagttaggtcttcttgttgaattgaaccttttaccgttatgtaatgcccttgtcttttttgatctttgttggtttaaggtttgttttgtctgaaattaggattgcaacccctgctttttctgttttccatttccctggtagatttttctccactcctttattttgagtccatgggtgtcactgcatgtgagatgggtctcttgaaacagtataccattgggtcttgctgctttatccagtttgccactctgtgccttttaattggggtagttagcctattaacattgcaggttagtattgatatgtgtgcgtttgatcctgtcatcatgatgttaacttgttatgctgacttttttgtgtggttgccctgtagtgtcactggtctatgtactttagtttgtttttgtagtgactggtaagggtctttcctttccatatttagtacttctttcagcagcttttgtaaagcaggtctagtggtaacaaattccttcagcatttgtttgtctgaaaatgatcttatttctccttcatttatgaagcttggtttggccggatattaaattccagtgctccaggaacactggtcaccacactccaatgggcaagtgccagccaaagcacttcatagggtgatagcagcaggcttggtccttgtactcgtttgcacgtgccaacagcagtggcagtgtggacgtgtgtggactgtggcaaggtgctagccagcgccggggtgccagcctccatgcaggcatttgcagcagctgggtggcagcatggctggaggagggcagggggtccctgcaaggaatagaattgggcactcatgggggcagtctgctgttctccatgcttagttttgggcaggcagcagtgtcggcggcaggggctggtggtctcattgctgccagtgctcctatgacagtggtggtatggtgggggataggggacgggggtgcactcacggcagcagaggcatggcagggtgcagacaccctggctgggaagggaagacaagattcctgctggcacacacatgctggcaaagtgatgtgaggggttgctgtgggctagtgcttgtaggcaaagcagcacaggggagggcacagttgggggagggcacaggcagcctggtgtgtgtctgtggggcagctctgctagagcactctgccagtcaggcatggcctgccagtgcaggagctgtgatgcggcccccaggaggtacctgggggctgcactgcatgcaggtgtggccagggtgggaccctgggagaggccagctgactaaagggtgttcacgtcaaactggccctgtttcatggacaagactggctctgcagagttcagatctgacagtttcactagggctaaaatctcctatgggggcaggtcaattctaggggaatgggcatccctggccgtgttccactacagaggctgcagcaccaaaccctctagacttggcacaggctggagttctgctactaccacttctctaagtagctgtccctgccaactcaagtgtccatggtggcagaggggtctcttcctactgggattccagaggcccctggtgagagcaggttgctccttgcctgttcaactcaccccttctgcaggaatcactgggggccaggaactagtcctgggtgcctggtagccctgtgtagggttcccagcttcctcccgcttcagctatgccctgtatctttcttccctctgatcttaatgccttccctctgaaggtttgctaggagtgcacgagtcttcctgatgtcccagtcccttggtgggagctgtttctcctggcttcatgtagtcagccatcttggagagtcctccactctggaagtttttaccttgatgctctaaatcaaatcacaatgttaagatgtaatattgtttttttttttttactaaaaaaatgcattttatgtcatggcctagaatgtgtgtagcatgtttttatacaaaccacaagtatttaaatatgcattattcatactgtttgtgagtattcaagaggaaggaaggaaaggagagaaagatgagacaaacattgactatagagagactgtgtgtatgataaagtttcaagaaacaatacatatctatgtgctctgtgatctgcatttccttaaaatacaaaacaaaacaagtaaatgccacaggtgataacccccaacattgatttcaaaaccatgcagaccttcccattatctttatatgttcctaattctaggtctgcacacggagtctttgttactgagaaaggaacactaaaatcctaaggcttaaaaaaaataaagttgtattgtttataattggtatcttgagaacgcgtgtcctctctttcctctcctttcctttccttcatctttattaaccatcagtgcaatggagactgtgagggagattattttttttttttagcaccataaactcaaccaagtggtatgtgtttttttaaaagaatgttggtttttgctgataatttccagatcacaaatatttagaagactagcatatgtatttagtactttgggaaactttatttattttgattttaatttcattttttgagatggagttttgctcttgttgcccaggctagagtgcagtggtgtaatcttgactcactgcaacttccttccgccccctgggttcaagcgattctcctgcctcagcctcccaagtagctaggattacaggcatgcaccaccacacccggctaattttgtgtttttagtagagacgggtttcaccatgtttatcagctggtcttcaactcctgacctcaggtgatctgctgacctcggcctcccaaagtgctgggattacaggtgtgagccatggtgcctggcccatcctttgggaaactttaaattgatcagtctgtttctctgtgtaaatctaagttgtactgatgtttacatggcatgttttttaatcatggggataatttgttctaaggaattttcactttttccaactaacttaggacattagtataataaggctacatttcctgggtaatgtgtcctgagaaggaattactttgattttcatttgaaaatacagtgggtatattacttttgctatgtgataggcagtagttcaatctaataataaccaattaagcttacgattcagaaagaaaatattcctacacaatattttttcattaatgacacttataaaatcagatgctattgagtatgaagaaataaagccaattagtgttatctgataatgtcaagaatgtgttccacatgagaggattttttagaaaaagaaaattaggaaaattaatagaactaataatttcattataaattctaaaaattactttaaagataatttaacatatacatgtgtatgtatgtagatagatgagagagaaaaatatttcagatagtcagaaaagtgtagaaacttttttttttttttgagacagagtgtcactccgtcacccaggctagagtgcagtggcacgatctcggctcactgcaatctccgcctcccaggttcaagtgattctcctgcctcagcctcctgagtagatgggactacaggcgcgtgccaccacgcctggctaattttttgtatttttagtagagacagggtttcaccatgttatccaggatggtctcgatctcctgacctcgtgatccacccgccttggcctcccaaagtgctaggattacaggcctgagccaccgcgtccagccagtgcagaaacttttgatgaacacctgtgtggccaccccattgaaccctgacattttttccctgacttttctaagtgtatggaataacaatcagtcatttaaaggtgatttgaaaaccaattattgtgctttgctctggccagcttatttttactcaattcttttagacctaagcatggcacattctttggattcaccccttaatgcccttaataatcccctaatgccacaggtttactcttaatgtatagcagtgaatctttcttcatttgtcctcttgtctgaagcaagaatggagcaaagtttttttttttttaatgatttttttttttttttttttttaaagagacaaggtctaggtacatcgtccaagctggactctaactcgtgggctcaaagaatcctcctgcctcagcctcccaagtaactgggattcttgttgcgggtcaccatgcctggctttaagcaaatttttacataaacagcctggatttacatgttattcctatggcacaaatatgggatttgtcgttaataactgtattccagtttactgcagattataatagtgaacaagacaaactgggatttggaatcctgaggctatctctgatttagacaagttagtaaccaccgtgtgctttaacctttttgattgggaaattctgagaattaactaatgtaaatatggggcacatagaagttgctcaataaaagtttttaatattactagctttctttcaagtggttgaacttgctaaaattctgatttctaaatgagtgggagcatttcggtacaaaaatattcaagggttctctccaactttccaaacaaagcagatttgaacattaaatttcatcatccaacttttggaacccctgctaattgttttctttgtactcttggtttatttttatacctaaggtctgatagacacataacaaatgctttatgtaccttaaagtaagtgaaaatagattgttcagatgaaaggtatgtggataagtcagttttgcagcaattctagagaactcttgccagaactgtatctttgttttggttttcagggactgttaaatgtgatcactgagtcagacttgctgttttctctgtcccctggctatctctcttaagaccctgaagtttgccagccatagaatgtttaaaaggcagaggagggcttagcctagggggagtttgtttatttaaagaaaaaataattaagtttaaacatcctaccatgtcatagctagtttagtcatgttaagagttagtgagttcttttgattgtttcctggtggtcttgatatctaaaggtaacagataaatttgaagcagttaaacttcctgagattacctggaaccttataatataatcccaaacagaaatccctaacaaagtgggaggaaagggaatgccatttttttgctggtttttgttttttgatgggactcttttaattcaaatcttctaccactctgttctagagttatggtacagatgatttaaaaacaaaacaacagtttaagaaaaccacactttgatagatacatcttcattatttctttgaagtcgggaacttaagaatcttttaaaaggaacagtgtagctctacagatgtttagacacaaagaaagatctaaaaattgatgatgttatgtttgaagattaccatctcccaaatttataatttactattctttacaaattctttgccagataaggaaaactaagacagctattttgggcttgctcaggacactagggcagatttctttgatgagatgacttacaaaaacaaagtcctaaaggaagaggagaaataagccagagagagagatatctcttgttactggcagagggaaaaacaagtcctgagatcctgaagtgagaaggtgcttgataagtttaaggaaaggaaagatgctggtatggcttgaatggggtgaataagggagagagtggtagatgaggtaagagagatggggtgggggatagcagatcatggtctttatgggcctttgtaaggagtttggcttttagactactgagctggactcagttggagaattcgattagaagaatgacatgatctgactttcttttgaaaatggctaatctcactgacttgttgaggtgagcaagagagagactgggagatcagacagggaactattatactaatgtgtatgcaaaatattgtggcttggaccatcgtagtaagagtggaagtggtaataatatgaatatcttttgaaactggagctcctaggatgaacactacatgggtagtgacattttaaaatactagaaggtaggctgggcatggtggctcattcctgtaatcccagcactttgggaagctgaggcaggtggatcacttgaagccagaagtttgagaccagcctggcgaacatggtgaaacctcgtctctactaaaaatacaaaaattagccagacgtggtggcatgtgcctgtaatcccagctactcgggaggctaagacagaatcacttgaacctgggaggcagaggttgcagtgagccgagattgtatcacaacactccagcctaggtgacagagtgagaccctgtctcaaaaataaataaataaataaataaatagtactggaaggttaaatatttcatcaatttaagttaaaaaaattcatctgttaatcatttcagtaaatccttatgaacacttatagcatggaattcattgttttaggtgcttgaaaaatacccgtaggctggatgtggcagctcacgcctgtaattccagcactttgggaggctgaggcgggcggatcacctgaggtcaggagttcaagaccagcctgaccaacatggtgaatccctgtctctactaaaaatacaaaaattagccaggtgtggtagagcacgcctgtagtcccaactgctaggcaggcagttggattgtttgaacctgggaggcagaggttgcagtgagctgcagtcttgtcactgtactccagcttgggcaacagagtgagactccgtctcaaaagaaaaaaaaacaaaaaccagtaaataaaaccaacaaaaaccccttctgtggtttacattgtagttatagggggaaagttgacaataacaataataattgcttataacaattaatgataataattgcttacaacaattaatgataataattgtttataataaataagcaatttgttgtattcagaatgtactatattagggctaccatatatttcttttttttttttttccagtctgtaaatggcactccggagttgcaaggtcccactgggtgacaggaattgaggactgaagagttctggtcccgtggtacaaatagccagttttctatctctcccacctcagtctcagctctgttaataatgttttttatgagaaggttgctcaagaagtgctttgaggctgggcatggtggcttacacctgtaatcctagcactttgggaggctgagatgggaggattgcttgagtgcaggagttcaagactagcctgggcaatgtagtgagaccctgtctctgcaaataataatttaaaaaattggctggccgtggtggcatgcacctgtggtcccagctactcagaaggctgaggtgggaggatcgcctgagcccatgagattgaggctgcagtgaggcgtgatggtgccactgcgcttcagcctgagcgacagaatgagaccctgtctcaaaggggaaaaaagtgctttgagagttctttctggtcactacaatttagataattattcttaaagagttttgttataatatattcaagagtaacattcttaataacttaacctatatttcagaaatgaccattaagaagtagatgcccagatgcaaaagtgatgaaacagtccatttgtcataaagtaagatgcagctgtggcatgtcaaccagcttggtaagtgtggccaaatctttttttttttttttttaactttgtagttatctactttgaaaatcatttaattaaaaaatatggtagacaggctgggcatggtggctcatacctgtactcccaacactttgggaggccgaggcaagtggatcacctgaggtcaggaattcaagaccagcctggccaacatggtgaaaccctgtctctgctaaaaatataaaaattagccagggatgttggcacgcacctgtaatttcagctacttgggaggctgaggcatgagaatctcttgaacccaggaggtggaggctgcagtgagctgagattgcaccactgcactccagcctgggcaacagagtgagatactgtctcaaaaagaaaaaaaaaaaaggtagacattaaagttaccttgtatttttggttttactttgtagtacaaattctaccatacagctctaagaagtgtatttctgtgatgtatcttacagcataattttggtcattatgctacttgcatatttttaaaaattaaatttgtttcgtatgtttcttcctaggattaaaagtatacccttcagtatggggtgtcttattggagtggtgaaaatattatggaattagatgatgtggtcatggttacaaaactttgtgaatatgtaaaaaaaacactgttcaaagaaatgctttttaccttatgtgaattacaccgaaaaaaaaaaaggacccttcagaacatcaagtcttagaaagagtataaaatctatttgacttaacagctgttttagaatataaaaattgccacatatcatcaggtacctagcaaaatgacttgatatttagagaatagaataagtatttttgtaataaaagtaatacattttggttttttataacacatacttttgttattagagaccaactgtctctcaagctttcgtaatatcaaatgtcatagcgtaatattctgaatgtactctgttagcattttgtaatttttcatttttagtagactgtcttgaaactaacatttccactttctacctgaaatttttttaggaacaaaattgtatctgtttttctcagaagagaattccacaaggtaagaaattgtaaatatagtaataaaactaatattgttgagtaaggcttaattgctcctgatttttaaaaatttgtttccatgtatttatttaatatcttttctttattatgggattctcactaatttattagccactgttttactatgtcagaatttgctagcaagacacagatcatcttgtttgaatttaggataaaagggaatgataaaagtagtcacctttaaaattcaaatactgcttctcatggtcagagcttattgagtgggtttatcctttttaggaaaaaagttcttccattggggctcatttatcttttactcagtggacattgcctacgtgacttggaggagtagagggttcataggagctctcttaggggctggtagatttgtttgtttgtctggtaagggttgcatcctccagaggggaggaatgctgtgtccttgcatggcagaaggtggagggcaagcaaaactaatgctgagcaaagcttcttttataaacgccttaattaggtcatgaggaaggagcccacattacctagtcacctcctaaaggtcccgtctcttaatactatcacattggccattaaatttcagcatctgaattttagaagggacacattcaaactatagcaggaagggaattcacacatctgctgaaagtgaagccaagattagggctttttaaaataagtattaatttatatatcagcacttaagtatttataagatctttggtgggaagaccagaaagtactgaagttgatattgacttgttattctattcattgttgaataatcccgccatcctttttaaaaactaagagaattatacatcaggtaacatagttcctttctccagtttctttaattttgagtcttttgtatggcatagtaattttcttattcttactttgatgtgttaccacactgcataaatagaatagatagtattctcattttacaaatgaggaaaccagtagtaggattggctttaggttcttttactaatcttatactgccaccctatcagctgatactttcctgtatataaaaggtataacaactaggatagtcttaacttgaaagaagttgtttctaaccaggaagaacctcatagcctgagaagtttaaaaaacacacatatacagacaaaaatataagcagtgaatactgtaggccatagtcaaaggaacatttattaatgtggaaggtccacctctgttatatagaaaagtatttcagaagtatttccaatttagaatgaatgccataaatttaagttgtctaggttttttttttttgagatggtgttttgctcttgttgcccaggctggagtgcaatggcgcgatcttggctcaccacagcctccgcctcctgggttcaagtgattttcctgcctcagcctcctgagtagctgggattaccggcacgcaccactgtgcctggctagttttgtatttttagtagagacggggtttctccatgttggtcaggctggtctcgaactcccgacctcaggtgatccgcctgccttggcctcccaaagtgttgggattacaggtgtgagccaccacgcctggccatatttctagttttgagcatgcctgtttacttaaaggttatgtgtctagttttgatgggtgggaaattagaatttcatcggggtgatgaaatgagcaatttgatcttgtgtttttcagaatatagtaatcccctccccgccaaattatttgtttgtagtgtgaaaatcaggtatactggattataaaccagtatcttccgtcccaaaaggcttaatttggttcagacactgctttattgttagaggcagagatttagattgtttttgaggaatccagtgctattctaggtcattttaggtctgaagggtcttcagatatgtaatagtaaccacttggcttacacctagcttacatttaagcctgtggaaagactgagagagatttcacatgtaggtggtggaatatggaaatgcagattgatagtctacttggagttatgggtctttgaagtttagcagtctttttgttgttcaaaaatacactatgacattaaaaagacgtgggtcttctgaccctgatgtcttattgtgtattagggcttcaggtgttacagttcattttaactgaggttgaacgtaatacacaaaaatgtggattgttttatagtttataaaagaacagttattttaggtacctttttgtttcatgttccactcttagagttccttattagctggcttgattttattttttcagctacgtgcttttagattaaaaaacaaaaaaacaaaattcagaataggttgaaactcaacacaaattgctgccacgtaacaaaagtgctgatcaagttaaatcaacccctgtaatgtgtactgaaaggaaaacctctcctctctcccccaatttgaagaacaagcattttccctgccaagaagtactgactttaaatggaccagctgtccatattaggagtacagggttgctaaggtgaccatggctgtttggagaagaatgcagctgagagggcaagttctcgatgtgtgagctgagggaaggaatgtggtgtgattatgcatcattcctcctaatcacatgctcacaaagtgctgtgtgggcagcatgtagaaactacaagtctgagcgctggagcttgtgtgtggttaaaagcattttgttttcatgtaagccacaggcttacagtttagatgaaaaaggtctgccttgtatgtatgtgtgtgtttggggttaaagttggggacggtgctttgatggtagatgaaatggcaatgaatttattttgcttgatagatacatatttttattgttttttaaattatttatcttggaataaatgtcatctttccagttgatccttttcagtcatatatacagtattaatagtcccaagtaaatgatgtgttccttgtaattgtgtatttctttggcactgtaatttcagaatgatttggaaattcctaaaaatgtgttgtctacttgttccatttcttctttttaaaaaactgagtgttttttcctcaaggcatccaaagataggttctgggcgtatctgacaaataagtagccaatttggtaaaaataatgattcaaggacagtgagaatggtcaaactaacatcccatttacctgagatgctgttaagattttactgtgggcaccattactaatacttgaaatgagatctagatacaggcgttgatgtagatacttaaatgaaatgtgttatttttgttttttatccttttttgttaatccctacagtgatgtgttgatcttaaatgagggcgtaaatgtgatgtatttaagatgtgaagtagcttgaacagtggcagccctgtattacatgagcatcatattatttttcataatcagatagtctctttgctttgaaatgattgctgttaagtgattaatttataaaatatggagggaaatgaaaggattcaaataatttgacctcttgggctcaagcaatcctcccacctagaatatggctaatttttataaatgttccatgtgtatttagaaagaatgcagctttttcggttattaagtacagtgttatatttatgtctaagaacttgttaattgttctcttcatatcttctctgtcttggttttgttttggattcgggtttagttttatttggggactgatttatgagtttctctagtaagaaagacatggtaattaatgtctctcaccatggctatgggtttgtcagtttctccttatagatgtgttaatttttgctttatttattttgaatgtatgctattaagtacattaataataagccaaaataattaaacaatttagaattagaattgttttatctgtttgttgaattgaatttttatcattatgaaagggccctctatctgaacacacttttagccttacagtttttttttaattgttgttattgctgttttcttggattaatatagctagtatagttttcttttggttactgtagtattttcattcttttttttttttttttttttttttttttttttttttttttggagacgaagtcttactctgttacccaggctggagtgtagtggcatgatctcagctcactgcaacctccatctcctgggttcaaggaattctcgtgcctcaaccttctgagtagctgggattacgtgtgtgcaccaccatgcctggctaatttctgttttttaagtagagatggggtttcccattttggccaggccagtctcgaattcctgacctcaggtgatcgcccgcctcagcctcccaaagtgctgggattacaggcgtgagtccccgcacccggccagtattttcattctttagtttttcatgtattttgattggagttttgtaaatagaataaggttgagttttatttttgttctgaatgacaatctttattttttaactggagaactttagtcaattgtgttaccgatagatttagtttttttttttttaattttttttttcttttttgagacaagatctcactctgttgcccaggctggagtgcagtggcacgatcctttagcctcgatctgctggactcaacgatcctcccacctcagcctctcaagtagctgggaccacaggcatgcgctactgtgctgggctgattttttaattttttagagatgttatcccactatgttgcttaagttggtcttgaattcctggactcaagtgttcctactgcctcagcctcccaaagtgttggaattacagatgtaagccaccgtgcccagctctgatttacgtgtatttctgtccccttctgtggtttttctatttatccaattcttcctctcattcttgccagtcttttgtgttgagttggacatatatatttgtctcattccatctcctctccataccttgcatgcatgtatacttgtttataattaatatattatttattcttttagtggttgctctggctattttaacatgcttttcttaggaaagtccaattaatcagtatctttaacctattcctgaataatgtagtaacttagcatgctctggttgtcctcctcccaacctgtaacagtgttgtctgttatcttagttttggcatattcttcttatgcacacatacagaattttagacaaattactgttttaggtagtaaacctttgtttaaatttatttacctaattactgttttcttggcttattgttcctttttggatctgagacctttcttctatgataatttttttttttacctgaggtacgttctttagaatttcctttagtgaagatcctttggtgaaacagacacttttttctttgtttaaagatgtctttatttcatcttcattcttgaaaggtagtttctctgtgtgtagaattctgttttctcatgatattgaagacattattccagtactttgactgctagtattgctgttgaaaagtcttaattgcccttcctttgtaagtaataacccttttatttggctgtgttaagcctttttttttccttcccatttagtgttttgcagttttgtataatgtattgagggcgttatttttttcattccatcattttattttttgtaatcccacttgggattctttgggcttcctggatctgaggataataataatgtctttgaataattgtggaaaattcttaaccattatctctttgaataatgcctcttattttctccttctataactctaattagacatatagtctatttttcatgttacttatgccttttcatcctttttcgtctccacaaactcatttaagagctggcttatagttataaattcttgcaggagattttcttctttctaccatcatcaagatcaagcaggcaagtttacttgctgtcatcttctgcaaggtaggtttactgctcattcatttgtactttgtggattttgggatttgcaactgtatggaaggcagtcttgatctatatagtctgtctcccgcagtctgcagttttctaagcagcattatgaaattaccttaaagtcaagagccacctttcgtagctttttacatttgtgccaaaataggaaaatgtttaataataaaattaaaaaaacaaattttatatatatatatatatatatatatagcattgcagattatatatatatatacatatatatataaagcattgcagattccagcagtagagccagtctggacatctaacctaccatgttgctagaaatagaattccttgatccatttcaaataacatacaacttacgtaaggtttgtatgagaaacataatacagaatgctaatcggcggtctcccattaacaaaaaaaggccctggccttaagtttggtaaattcatgcctttttatatgtttaagctaaaataaaatgattcatgcctttttatatgtttaagctaaaataaaatgattcatgcctttttatatgtttaagctaaaataaaatgtttaaggtaaggagtgtgtgtgggggtggtatgtgtgttttaatttcctgccttatccaactaacttcatgtccatttgaattaagatggattctattggacttcctcttttattcctcacattatacatttgtcacctttttctctttgcaacaaaaatggcatgtgttaagtttatatttttaaaaatttaggttcccttatattattcagatgcattattttcaaaacacattcataaaaagtgataataccctatctataattatattaatctttcaacttcatagtcgtagtctattctccatgagtttatttctatattttgttatgcaaattctccacaaaataacataacatttagttacacagaggccctcctagatgccatgacaccccggtagcaagagcacaccaagaacccaaatcttggtttctaatacaagttgattatccttatccttatccttatcctaaatgcttgggatcagatgtgttttggatttcaaggtttttgttttgttttgttttgagacagagtctcactctgttgcccaggctggagtgcagtggcatgatctcagctcactgcaacctctgcctcctaggttcaagtgattctcctgcctcagcctcccgagtagctgggattacaggcacacatcaccatgcctggcaaattttttgtatttttagtagagatgggggtttcaccatgctggccaggctggtcttgaactcctggcctcttgatctgcccaccttggcctcccaaagtgctgggattacaggtgtgagcaccgtgcccagttggatttcagggggttttttggatttcaaagtatttgcatatacataatgagatatcttggggatgggactcaagtctaaacacaaaatttatgtttcatatatgcctttacacatagcctgaaggtgatttatacaatattttaaataattttgtgcacgcatcatgtgaggtcaggtgtgaaattttccacctgtggtgtcatgttggtgctcaaaaattctcagaattttccagttagggatgctgaatctgtacccttctcctttaaaaaggaccagggttccttggagaaatggcttaatctaggactagggcaagaaatagacaagatccactttgggaggccaaggcgggcaaatcacgaggtcaggagttcgagaccagcctggccaacatggtgaaaccccgtctctactaaaaatacaaaaaattagctgggcagggtggcgggcgcctgtaatcccagctactcgggaggctcagggaggagaatcacttgaacccaggaggtggaggttgcagtgagccgagattgtgccactgcactccagcctgggcgacagtgcgggactccgtctcaaaaaaataaaaataaacactgggtgtggtggctcacgcctgtaatcccagcactttgggaggccgaggcgggtggatcatgatgtcaggagattgagaccatcctggctaacacagtgaaacctcgtctctactaaaaatacaaaaaattagctgggtgtggtggtgcgcgcctgtagttccagctactagggaggctgaggcagaggagtgacatgaacccaggaggcagagcttgcagtgagccgagatggctccactgcactccagcctggacgacaaagcgagactccatctcaaaaaaaataaataaaattaaaaaaaattaaaaaataaaaataacaaaatagacaagatcagcttagaacatcttgtagtgccaaaaaaaaaaagtaaagaagggctttaacaaaaaacccacaaaatgggactatgtcaaaggggcataggagtcacctaaaagagctaacagtgatcaaagttggaataatttgaaaaagaaaataagtaaagtataaagtagtattgaattataactcagagtataaaataaatatccacgggctgatactggtatgaataaatgattgaataaatgaataaatgattgaataaataagtaaatggagaagagacaaatctgtacagaagaactccaaataatgtatgtcaatactccactttcctcatggtgaaacacaactccctaatccttaagtgtgggctgtgcatgcctttcttccaagaagtacagtacttccaagaagtgcagaagagttcggggagaagtaacttcacagtggagaaacctgacagccaggtaggttgtcaggggtaacatcaacagtgataagtcatgttgatagtgtgtttcaagggctatgttgtgataaaagtggcactttatctctgtgatcctcctgtccaaatcccatactcccagtctaattatgagaaaagcatcaaattccaagagaggagaggcattctacaaaatactttacaggtgctcctgaaaatggtcaggattatcaaaaacaagaaaaatctgaaaaaccattactgccaagaggatccttaagagacatgatgactaaatgtaatgaagtttgtttttttaaaaaaccacaaaactgagtccctcaagaatttttttaaacctagaagtcacatactttgcaacttttattagattttagatcgcatcccactcttgaatgcatatttccccgggagcaacccatgttttaaaaaatttagtaaaggaggatatcagataaccagttcttacaaacaggcccaacatttattatgttgcatttgctgccatctgaaggcctactcacacaaatggtagaaagttgtgtttattaaaatcttaacttctttaatatttcaaatttttaaacttcagggtaaacaaaattcttatgaaaatactgacactgtaccttagaatgtataatttaactgaaggaagcgtgtgtatgtgtgtttggcctactctgtaaaaataaagaatatagcattaatattattaggcccagttagtctattctagtatagttactggtacaaaagtaacactgggccaggtgcagtggctcacacctgtaatcctagtactttaggaagctgaggcaagtggatcacttgagcctgggagtttgagaccagcctggcaacatggcgaaactccttcactattaaaaatacaaaaattagccacatgcggtggcatatgtctgtagtcccagctactcgggagactgaggcaggatggtcacttgagccctggaggtggaggttgcagtgagccgagattgcaccactgcactccaacctgggcgacagggtgagaccctgtctcaaaaaaaaaaaaaaaaaaaaaagtaacactgtattattgtaattcaggggaagtagttttgatataaatctaataactttatgtaaaaagtcttcttattctttgatgtaattctaacaaattttttataatttaaagggagatactggtttcaaataagttatttctccattttcagaataatttttcctcacacactcgaaagatgattttattatctttttattattaaagcagatattatcagggccatatattaagagcatttattgcctctacaaccagatataggtggcggggggttatgttctgaatatttttctttactgacagacatacttagtataacaaacatattaatttgcagcattctaattaaaaagtgaaaatgtgcgtgctgtcagacccaatcttaaacaggttcagccttatcaactagaggaatttaaaaccttacttcatgatgcctttgtctttgatttatagttggtcgttcgtatccataggttccacacctgcaaattcaatcagccacagattgaaattatttgaaatagaaagcagtataaaaaatattacaaaatacagcataacaactatttagatagcatttgtaagtaatctagaggttatttaaagtatgcaggaaaaaagtataaagaagaaaaaagactagctctaaaattctttattttttcaaacagatttttaatgaatcaggttatgtaaagaaagaaaatatttaaactaatattgtttgtagctaaaccattatttcattggtctgtgatgttccaaacttgtaccttccaaccatatgtaaccatgtttctattttcgctgaaataactcagtagaccaaagatgttggtgttggaattgcatatggcagatagttcaagtatattcaaagtaaattctagttaatattaagtaccttttaatgttagaaattaaaagagcttaggaaaagctgtaggatgagaaatccaatataaacagttgtttcaatcctagagtatcttcaccttcacccaggctcatcccaggactgcaaaacgtcaaagaatgagctagcttggaggaaataatgtggcttggataatgactcttaggcagttaacttacccagatagtgtcttcaggagttacatctgctataataactataatgcaaatgacagtttttgaatctatagtacaaaaaggaaaacatcaggtactacctcagtcttatgagtatacttgctcacattgataacaacatggtagcattgcttctaaaagaaattttgtgatactgtatcttaaattccatatttttcatgagatagctgtcagtttacagacaaatctaagtgataattttgagccccatttttacaagtcatctcaataagtaactattaagtaacatatgttaataagtaaaaatgtaaaagcatttggttgtagttttattgatatgtttgcacattgcagaaattcaggaacaaattttatgaatacttatgttgctatttttaaacaatatctgagattattcattcaactaaaacttattaagcatttaatatctgtctggcattcttcaggcaccaaggatatttcgttgaacaaaacaaaatctttgtcactatggagtttacgttttgtggtggcattggagtgaagagctagggaataaaaaaacaagtcaatatgtagtatgccacttggtggtaagtcatttggagaatgatgtagtagggaaagaggaaaagggtgtagcatcatgggctagtgggtaagggtttatctatttcatatgtagtgtgctcaggaaaattcttcaataaattgatttgtgagcaaaaacctgaagcaagtgaaggagcaagctatgctgataccagatagaaaagcattccaggtacaaagaacagtagttgcaaaggacctgagataggaacataattagtgtattctagaaacagcaaggaggccactgtggctggagcagagtatggagagagaagaattttaaggtacatgatcagtagtggaacaggagaggcagaaaatgatactaaaaaattaggatctcatagagaccattgaaaaatccttaatttttattctcagaggaatagggggagccattgcaggcctttgtcaggataaattgtgaaccactttgaagtggacaaaaaatgacaaatgggtgtcctgtctagctcagccattgagtttatctctgtctcattttgtgggcagggtcgggggggtggggaggctttcttttttttttttttaagagtactggaacttaacagaaaacttcttaaaaatgcaattgaatcataaacattgatgtaaaaatcctcaacaaaaccaaattcagcagcatatcagtgggattatatactatgatcaagtgcgtcttattcctggaatgcagggatggttcaacatatgaaaattgttcaatgtaatatacacattaaaagaatgaatgggagaaaaccacatgattgtgtcaattgatgcagaaaaaacatttgacaaaattcagcattctttcatgatttaaaaaaacactaaaactagaagtaaaaggagccaggtgcagtggttcatgtctgtaattttagcactttgaggaggctgaggtgggtgagtcacttgagatcaggagtttgataccagcctggccaacatggtgaaaccccatctctactaaaaatgtaaaaattagctgggcatagtggtgcgcacctgtaattccaattactcaggaggctgaggcaggagaatcacttgaacccgggaggagggggttgcagtgagccgagatcatgccactgcattccagcctgggtgacagcaagactccatctcggaaaaaaaattaataataaataaataaataaaaggaaactatttcaacgtagtaaaagccatatatgaaaaatacagtgaatgtcatattcagtggtgaaagactgaaaagattttcctctaagatcaggaacaaggcaagaattcccactttcaccaattctattaaatatcatactggatattccatccagagcaattaggcaagaaaaagaaaaggcatccaaattggaaagaagtaaagtggtctctgtttatagatgatatgatcctgtacatagaaaaccctgaagagtcagcattttcatctaacaacaatatgaaaaagaaattaagaaaacaatttcatttacaatagcatcaaaaagaataaaatacaaataaccaaagaagtgaaagatttttacaatgaaaactatgaaacattgctcaaagaaattaaataaatgaaaaacatctgattttcatggattggaagtcttcatattgttaagatgtgaatactaaaaataatctacagaatcatgccattcctatcaaaaccacaatgatgagttttgcaaaattagaaacgcccattctgcaattcatatggaatatcaagggactctcaatagctaaaacaatcttgaaaaagaagaagaaagctggtgactcacacttcctgatttaaaaacttaactacaaagctacagtaatcaaacagcatggtattggcataaatttaggcagacatatagcccaatggaatagagcagagaacccagaaatagaccgatgttgtggctcacacctgtaatcccagcactttgggaggccaaggtgggtgaatcatgaggtcaggagttcaagaccagcctggccaacatgttgaaaccctgtctctactaaaaatacaaaagattagctgggtgtggtggcagacgcctgtaatctcagctattcgagaggctgagcaggagaattgcttgaacccaggagatggaggttgcagtgagctgagatcgtgccactgcactccagcctgggcgacagtgtgagaccctgtctcaaaaaaaaaaaaaaaaaaaaaacaaaaacaaaaacccagaaataaacacttgcatatatggtcaaataatttttgacaagggtgccaagactattcaatgggaaaggaacagtctcttcaacaagtgatgctggagaaactggatatctacatacaaaataatggagttggatcttcacctagcaccatatacaaaaattaacttaaaatgaatcaaaagtatacaactcttgtaaggaaatgtagggcgaatgcttcatgacattggatttggcagtggtatcttggatgtaacaccaaaggcacagacaatacaagaaaaaacttctgaaactcaaaaccaaaaactaatttaaaaatgggccaaggacttgaatagacattacaccaaagaagatatacaaaggccagtaagcatatgaaaagatgtttaacatcaccaattattagaaaaatgcaaatcagaaatacagtgagatactaccctcacactcattaggatggctacttttttttttggagacagagtctcgctgtattgctcaggctggagcgcagtggtgtgatctcggctcactgcaacctccccctcccagattcaagtgattcttacgtctcagcctcccaagtagctgggactataggtgtgcaccaccacacctggctaatttttgtatttttattagaggcagggttttgctatgttacctgggctggtcttgaactcctggcctcaagtgatctgctcaccttggcctcccaaagtgctgggattacaagcatgtgacaccatgcccggctaatttttgtattttgagtagagatggggttttaccctgttgtccaggctggtcttgaactcctatcctcaagtttcacctggttcagcctcccaaagtgctgggattacaggtgtgagccactgcacctggccaaggatggctactattttttaaaaaatagaaagtaacaaatgttggtgaggacgtggaaaaattggaaaccttatgcactgtcggtgagaatataaaatggtacagtttctgtggaaaagagtatggctgtttctcaaaaaattaaaaacagaattaccatatgatgcagcaattcaacttctgagtatacccaaaagaactgaaggcagggtcttgaggtatttgtacacccatatctatttgtacaaagtagccgaaggtggaagcaacccaagtgttcattgacagatgaatggataagtaaaatgtggtatatacatgcagtggaatattattcagccttaaaaaggaaggaaattctgtaatatgctacaacatggatgaaccttgaagacattatgcaaagtgaaataagccagtcacacaaagacaaatgctatgtgattctacttatgtgaaggaggtagtatagtcaaaatcagagagaaagtagaatggttttgtcaggggatagggggaggagggagttactgtttaacggccgtggagtttcagttttacaagatgaaaagaagcctaggcaacatagtgagacctcgcctctacaaaacattaaaaagttaactgcacgtggtgggatgtacctgtggtcctagctaattgagaggctgagatgagagaatcccttgagcctaggatgtcaaggctgcaggtgagctatggtcacatcactgccctcctgcctagttgacagagtgagaccctgtctcaaaaagaaaaaaagaattacgagatggatgatggatagttaagatggtaaattttatgtgtattttaccacaataaaaaagtagaaaatgcaattaaatcttattcatagaaataaatataaattatacccagtggaatgcagttgattactgccctgtgaatatgcctgttttgcatctatttgtaaatttctttcagaactccttattccctgtgtatgtgtagttcttggaatgttccgaaccagttgtaacatcttactaattccattattaatgagttaaattgtatctttgacatatgtttgttttactgttttttcagagtcatgaattttaccatttttagaaaaatgtatccattaatacttttttttttttttttttttttttttgtgagtcagggtcttgctttctcacccaggctagagtacaatggcacagtcatggctcacacagcctctgacttctgggctcaagggatccttccatctcagcctcctaataaataagtagctaggactacaggtgcataccaccacatctggctaagttttttttattattattttttagagatgggttcttgcgatgttgcccaggctggtcttaaactcctggccccaagtgatctacccaccttagcctcccgagttgctgaaattacaggcgtaagccactgcaccaagctcctgtattaatactttttaacagaattaatctggttgctgtgttgataaaagactagagcaggacaatcagaggcaaagaccaattagaaggctgttggaaaaattcataaagaaatgttggtaacttggaccagagaagtaatagtttcgaaatggtaagcagtagttgaacttggatatattttgaagatacatctgaaaggattgatggattggatatgggatgtgagagagtaaggtgtgaaggatgactgcaagatttttggatattaatcttaatgaaatgtgtaagtaattccttctcaaacatttttaggttggtaacttttatttttgattcttaggagtttagttggtttgactaagaaatgtaaaagctgttgatcgtggttcttttctcataaggtatcttttccactgattatagtgtaatatataattactgtattgaaaacatcagtaacagctgcttaaatcagggttctggcaggaaccctgtaatggaaaagaatttaataaagggattagttacacattatgggcaggttaagggaaatcagcaagtgatattggccaggtttgctgggaacaccaggctgttaggaacagctcttaacactcctaggtgtccaaaaggggacagagagaagaagtggttacctgaatcagcaagagctataagtatgtgagagagctgcctaacaggggccattactagaacctcagtaaggaagggaaccacagccaatctggtctgctggtgcctccatgcaggtgaggctcctagggtgcagagtagagtagagaaggtaagagagtggctttggagggtcaaatggaaaatatacagcattacagataacttttaagccctaccttaaaacaaacaaatacacttatgtgcttcaagtttaaaaatagagaaatgaagaacataattatttagtggtagaaagttataaaaactcagttgggtaggttttaatgacattaaacagaattagtacagctaaaaatcaaccataaaatttcgtgaagtctttagaggttttatatcatattaaatgttttactttggacttacaaagttaaaaatgctttttatcttttttatgtgttttacttagaattaattgaatataatattttataacttcagaaataataacttaagaaatatgctttatatttaagtatttaaaagctgttttgttgtgtctttttgttccctttaatgtaaagtagttcagatttagtttagtccttgaaatttatttcaattgaaaaaaaagctcaaatcatcacgtctaactttgttgtggttaattttgcgtatttaattcattttgtttttagagacaacatcacacttcttaaccagtaatggactctactgaaacactgtcagtgattgggaactcagcatttaaagggaactcagttctttgttgggcagatagaagtttgttccatttgcatagacttctgtggtttggtctgtctcctatttcaggagcaaatcaagcctattattccataagatggaaatttgaagacaattgtctgtctctgttctgctcttccatattgctaaatattttcttctccacactggtttctacagtcttaccttattgattcaacagtgttctttctgtcccatctcaccttgcctcagtcttcccctaggcttctgtgataccacactcttgggggttgtcctcttgtttcttggagagtgaatgtccagtctccttgtgggcttttttcacaattcctttagatgttggtgtttctgagctgctgtaggtcttacttttcttcacactgggcagtctcatctgtccgtatgcttggatccgtaagttgatggctcccaaatctctctcccatctccacacctgtatttctatttgttgagcatctccatttggatgtctcacagacatcaaagtacattcaaaactgagcttatgtttttctaaatcttgtgtccttcctatgttccctggctcaatgtatgtactgtcaacctcaactaaaaatgtattttccttgactcctgctttccttcccagtctaatcaatcatcaggtgttattaaggctagcacttaagtatcactctaatccatccttttatttttttccatcttcattgtttagtaacttaattcagtcctcatagttattgcatgcaacaaccacttccaaacctgcaaaaaccatatgaagtgtagggagtgttggtaggaaatatttttaactcaacctgtgaggaaatacagattcagagaagttaagtaagaactcagatctctctagtgtcttacatattttaactaagtctaaaatgaaaggctttgtttttagcattctaaatttctccagaagacattatctccaataataccagcctgggcggtggagcaagacctgtctcaaaacatacaataccaccaaagcctttcattttaaattctaatgtagtgtttaaagtacatttagatagcagagatattgtatgccatttgtcaattacatgaggattaaaacctcacctgagccatactgcactttctatttagaaggatgaatcatttctgggaatacagttttgtaatttacatgtggaaaatttaaaactttaaggcttcaacatgagtattttatgtacataattataggaaaccaatattctttgtagctgttgaattaagttcaaagacctttcaaagataattctaagtctttttaaaaagattatttaaagtacacagcttttcagccagtattggtgaagaaacattttgagagtatgacggaataaaacatcttcttagaaatttcagctgttttttgttgagatttgttctcttcacatgtgtctttaaaaaaaagaaaaaagaaaggaagaaagaaatattctcaaagttgctttcaaatcccagcactttgggaggccgaggcaggagtattgcctgaggccgggagttctagaccccttgggcaacattgtgagaccttgtctctacaaaacatttaaaaaattagctgggtgtggtggtatacgcctgtagtcctaactactttgggaggctgattcgggaggatcacttgagcccaagaggttaaggctgcagtgagctttgatcgccccactacactgcagcctgggcaatggagcgagaccctgtctcaaaacaaacaaacaaacaaacccaactaccaaattatatgttattgtaagttgttttcagagggatgagctcaagtgtagttatgaatgtggctcttcagaattaccttcaccatggaagattgatatatgtttaaattaagatccagataaatatgaaggaaagcagaccatgaaacctttagaggaaggatgcatattggctttgttaatgtggtagagaggaaaactgaacattctaaatttggcttctagtaaaattttgattgatttcttcaccttcatttccctattgaaaaatggggaaaatagttcccagcagtctgcattatgagattgttttttagatcagtatttaagaagggctcaaaagaacatcacatcagtcgtggatgctctggaatcctaccacttgatagtaactatcttcaacatctgggaaggagtaaagaaaagatggtccaaacaacttttcatttctgttatttgtaatgtgttgatagttctttcattgactgtatggcatgttttatggatcctaagaaacattttccaattttattcactaaaatttgggtgtgtcttacaattagtggcatattacagttaaattgactttttttctttctcagtggtatataaaatatcagtcttaaaatcaatcatctctggccgggcacggtggctcatgcctgtaatcccagcactttaggaggccaaggcgggcagatcacctgatgtcaggagttcgagaccagcctcaacatggagaaaccccgtctctactaaaaatacaaaattatccgggcatggtggtgcatgcctgtaatcccagctactcgggaggctgaggcaggagaattgcttgaacctgggaggcggaggttgcagtgagccaagatcatgccattgcattccagcctgggcaacaagagcgaaactccgtctcaaaaaaaaaaaaaaaaaaaaaaaaaaatcatgtctcagctttgattaaaaacaggatatatgtctattaatattcaaaataacaacaataacagtacagtgaccaccatacctgaggatcacttttttggtaggtagcctctactttcttaaacacaaccaagaactggaaagtaagaaacaaaggcttctgatgcttaaaatcactgttacagaactcatgaagtaaaggccaggtacttaaacttacaagatccctttgcctctgagtgtagtgtcttattttgtagttcattaagttaatcctaggtatcttattacagagtccacagggattcaaaagagtaaactatgggaggctgaggtgggcagatctgaggtcaggagttcaagaccagcctggacaacatagtgcaaccctgtctctactaaaaatacaaaacttagctgggcgtggtggcgcatgcctgtaattccagctacttgagaggctgaggcaggagaattgcttgaacccagggggcagaggttgcagtgagccaagatcgcactgttgcgctccagcctgggtgacagagcgagactccatctcaaaaaaaaaaaaagtaaactaaaaaggaatgcatataaatgtttattaagtggtggttctaggacttactgtactttgtgctgagaatgagtgacccataaacaaataattaaaaattattttttaaaaataacacaaaactcagaacaggccacttagagctatttttgtttttgtttttgtttttgtttttagacggagtctcagtctcactctgttgcccaggctggagtgcagtggcacaatctcggctcactgcaacctccgcctcccaggtacacaagattctcctgcctcagcctcccgagtagttgggattacaggcgcccacctccacgcccggctaattttttgtatttttagtagagacggggtttcactgtgttagccaggatggtctcgaactgctcacctcatgatccgcctgcctcagcctcccaaagtgctgggattacaggcatgagccactgcgcctggcccacttggagctattttaggaggagcttgcaacctatgtcagttacgctgattacagcttagaagaaatttcttatcaaaatgtaatctgattccactagcactttctttaagggacaatatgattgtacctttaaattttgattggagaatattgttgattaaattttcccttcttatggcttaatggaattactagaacgtatttttccttgaaagtatcaggaaaaaaaaaaacaacttttgggaggcatctgttacacatctgaaataggatttgattctgtaattccagtggtctctagacctagataattctacccatgttgctagatggcaccagggtgccatttttaggccttagggctaaggaatgggcgtaggtggtagggaggtgttaggaaagaagtagggaagaaaaactttgggaacatattgtggtactgaagactgtctctaggagttctcagtgggcagttgcataccaggtgtccagctgcattatttatgtttgaagtaaacccaggctgtgtgtctccatgaattcatagtattgggggcttttcaagacattcattcccctaagatgtgaattttgagcatagcttgttggcctcaggcactttaacctgagagtagatgttaagttctgcttgttggcaggtttccagcatttactcattagagtttccctacttaaatgctcctggcagtttcccttggccactgtgttcttcacagtctgcccaaacgtgttttgtatgtagtctgcttttgggctctgcttagacacttacagcttttgtttctaaagaacccttcagtaagtattgatttgtattttctttagttaataattcattgattataaaagctattcaaacactagaaaacataaaaagaaaaaatccttttcattctaccaccaaattaatcagtgttaacattttagggtgtgttcatctagtctctttttgtgggtttatgtattttatgtggaggtaggggagagaaaaataggtgtaaaacattattttgtaaaaatgcaaatcctctcaagtttgctactgggtgtgaagagcaacttttaaaataaaattttgtagaataattttagaatgttaagttgcaaagatagtacagagattcccatatacccttcacctagcttcccctaatgttaacatcttacataaccgtgacatatttgtcaaaactaagaaattaatactagtacaatactattaactaaactacagactatttacatttcttctgtttttctaatgttctttttctgttccaggatccaacctagggatacatattgcatttagtggtttgttgttgttttgagacagtgtcttacactgttgcccaggctagagtgcagtggcatgatcacagctcactgcactgttggcctcctgggctcaagcgatcctctcacctcagcctccccagtagctgggattacaggcattcgccaccacgcccagctaactttttttttttttttttgtagagacaggatctcactaagttgcccaggctgatcttgaattcctgggctcaagcagtcctccctacttggcctcctaaagtgctgggattgtaggtgtgaaccacgtgctcagcccagctttattttttttaataatatttttttttaccttttttcgtttttcttttttttgagacggagtctcactgtcacccaggctggagtgcagtggcgcaatctcagctcactgcaacttctgcctcccaggctcaaacaattctcctgactcagcctcccgagtagctgggattacaggcatgtgccaccatgcctggctaatttttgtatttttagtagagatgggggtttcatcatgttggccaggctggtctcaaactcctaaccttaggtgatctgcccgcctcagcctcccaaagtgctggattacaggcatgagccactgtgcccagcccttttttcttatacttaattttatatcatgaacattttgtctttgtcattaaatagcttttgaacaatacttattttaagagctctataaaagttaatcacagggatagatgtgctcggatgcaaacttttctggtaaactttttgttgttggcatttcatgagggggaatgttacaaaacgtatatacaattgaccctttaacaacacagggtttgaaccgtatggatccacttatagatggattttgtcaaccagaaagtatttgtgggatgcgaaatttccatatacaaagggctgacttttcatacacacagattccacagggatgactgtggcacttgagtgtgcacgtgttttggtccatacagaggcactggaaccaatacccagatacaccaagggatgactatacagaacaaacatttttattagtgggatacttgaatcgggtgtgttagattgtaacagttattttgagtgcactgctctagaagtagagaataaataggcaaatttagttttctttgagaatatatttaacaatattttaggttgatttaaatgcagaaacatttaaatgagctatttgtgaaacagtttgttttgggggttatagttgcttggcatttggcatagcttcttttgatcagtgtgtgtgtggcgggggggggggcggtgtacacatggtatacacatttcatgtgcacatagtcaatattagactttaaaaaaaaattagagatgatgtcctgctatgttgcacaggctggtctcaaagtcctggcctcaagcaatcctcctgcctcagtcttccaaagtactgggattacaggcgtaagccagcacacctggcccatatttagacttttaatattagtctagtaacatcatatccaactgagtttggaaatacagatttatagtaaattgtgcttatacatttctatattcagttttgaaaaatatcttttaatttacttttctttctttctttctttctttttttttttaagtctcactctgttaccaagcctggagtgcaatggcgagatctcagctcactgcagcctccacctcccagggtcaagcgattcacatgtctcagtcccctgagtagctgggactacaggcatgtaccatcgcacccggctaatttttgtatagagacggggtttcattgtgttggccaaactggtcttgaacttctgacctcaagtgatctgcctgccttggccaaagtgctgggattacaggcgtgagccatcgtgaccagcttttgcttacttttctgttatccaacattaatgtttatttagttctaggttaaagtatcatatataaaaagtgaagatgcctagggattttcttacgtgtcttttagtgttttattgatgtttatggtttgaataatattagttcgtgtatttaacatgaatcttgaaattagagtgacttggatttaaattttgttgttttaaaaaataaagccatgaagccaaatgctttttaagaactattaggtataccatattaaggaaaatattataaaattcgtactgtggttttacctcctacagttgctcagtttagtaaaaacttcattgtctataaacatgagtgtaatagaaaaaactgaattgattttaagttactcagtgattacattaagaacaacttggcatttatttgggaaataacaattcctttgaatttcacagtattttttagtaaatgggtattgggttaaagattttatatatgtgtttttcataagttaagtatttattatgctagagttctgtccctgctaagggattagtgtttattagtaaatttctaaactagaggtttattatgaaggttaagtgaccctttattaatttgacacagttgtaagattaatacatagaaattatcactgagctaaagaataaaaacatggaattttgatctacaatgtttacagaaaactgaatgcactgactctatgagatcaaatctattcattcagattttcagagttaatgataatcgttttctagagagtacctctactttcttactgctaccttaaaagcacacacctttgctttctgtggtgcgatctgtgaatttttagtggagagagctgtgtgattgctcatatagaatgttcatccttttggtgttgctagaggatggtatttgatttccctgtatatgtttttatactaaactaagagtttctttgagagttctgaaggttgattgtgtgtgtgtgtgtgtgtgtgtgcgcgcgcgcgcgcgcgcaggtgcatgcacgctaggattgttgcccttggtactaatgaccttattgaattagctaagacagagtgactcatctgctggatttgcacatatcttagggcagacattatgggcgctccaatttaattgtctaaatttcatcaccagtgtttcttcctatagatacgtaccaagattaacaatgactccaggatagagttatgaccaacactactaaaggtagagatagtattttgtatcatcttccattttagctttttctttttttaaaaagctagttttttagcaaactattttagtaacattttcttagtatttgccaaatacccacacaaaattgttttatatatatgtgtgtgtgtgttgttttacacacaaacaaatgaatctctatatatatattgttggatttctgttcctaaaaaacaaaatacatgattaaaagggactttgtcagattcactgtgagatatggggttaaagtgtgtgagttttctgggtctagaagggaagagggaatctgacgttcaggtcattgtacagtgacactgcaagtccagttgctgtcgggggaatgtttataaatggatgttgtgccttgaaggttagactttggacatcacagacagtaaaacactattaattgttttcttaccaatgttaagttaaattcttcttgtatgtaatctcaattttctgcctccatgggaaagtattctggtaggacattagtggtttatgtaagattttaaggggaaatgtgaattaccctcagtagtacgaactgacccttggtgaaatggccatgtgccttctttcctacctatctcctaatattttcccatgaacaccctacattccagctctaaggaactacctggttctcctggaggaggccgtgttgttttaggtttggggggttttgcatgctttcttcttaatctggattgcccctgccctagctaactcccatccacctttcaggactcagtatagggaccagctttcccagggagacttttttgatgctatttctgtctttccttctgttctgtattgaatgttttgatagcaccagcacatgggtctgcaattctgccacatactcattttcttgtctgtctctcccactagacagtaagctccttggagtcagggaatgtgtcctttatctttatttctagcacttaactcagtgcctgacacacagaataggtgctcagaaaatacgtggtagaatgcctcagtgtatggatagggaaatgaattaattcattgtttaattttctctttaatgttgatagttgcttaaaaatcatttttatctactaagtaaccttttgttagcttaattcaagcaactatgcctgaaataaagaaatgccactttaggctgggcaaagtggctcacacctgtaatcccagcactttgggaggctgaagtgggaggattgcttgagcccagaagttcgagaccagcccgggcaacatagacccatcttaaaagaaatgccactttattaatattttagatttatccacagaaaagtgaattgatgacagtttaaatatacataagcatatgcttaatctttcttgatcatactggttttacttatgttttatagagaaatgagaggaatctggtttaaactgcagttcagggaattttgattagatataattgccagaaattaaggtaccagatattgaagtgatttgtaagtaatgtaattgatttttttcaagagttaaaaagagggggtgagtggagggttatgaattatgaagcagttcatcaacattgccctcagattaaaaaaaaactaaagaaagatctgtttaggaatgtgcaaatacaaccatattcatggatggatgcttaaaaatagtcacgtacctttgtagttttgtgtataggtgtgtgctttaaattttcacctaacaagggaactgttgcagatgtccttgcttttgacataatggctctgatttaaggcaactagcagactgtactgagaatctcccctccttagctttttttcttaactcttctttttcagaataatataaataattcagaaatctttgtcagtgttaagaattaacaggaaattaatgtgtatattaaaagacctacccaatggtttaaaaaaaaaaaaacaaccagaccgtggacacaacacagtttttgaatgccatcctcttgattgttttaatataataaaacatggcagttttctgtgcccaaaatttagttatgttgctatgcttctaactatagacattctttcctggttgtatttgaacaaaattactgtagtataagccaaattccccctcattgctagtgaaccaaaagagcacatataccttcctaagcaccaaatttataatcatacttgtgaatagagttcagtgttctctttccatgtcattctgcaagaatcatatttggaataatttaggacagctttactaaatttattaatgtaatacttgttataaggatgtgcttaagttctagattttctgtgcttacagtgcaaacgtgttctttgtgaaataagagacagaattttacctgtaatggtgatataataatgccttgtcttttaaaatgctattaattttcgaaatatctttatatccagagttttttttggttttcatagtagctctgtgaagtgggtgtcctaatcttacaaatgagggaatgtaggcacagaaaggttgactgacggtcaaaggcatgcagcattgtaaaataacaaagtattgttgttttcacagctaacatgtactagtgcttactatatgttaaacactgttttaagatttttgcgtgtattaattcataagtgattgggctttggtgtcagatcaaaatttaagtctagcccttctgataagttcttgaccttgggaaagctacctaacccttttaagccttggtttccttatttggaacacagaaataatggtagtatgtacctgattggttgtttggattaaatgagataatccaaatgactctatgtgtggcatacagtaaggtaaattagtttgctatagaaaaatagggtggtggtagacagcatttagtgtaatttttagcctcttggtaaaattgttttcttttttactaagtatcatagtcaatgcagttatatataatgtttttaagagcttaatgagttggtacactgattctttaatatgtttaacttcatttcaaagcttatgacttttcattgatagttaataggtagatcactatcatttctcttaattttatgtgcagtcattaaattcattgcaggataagggttgcagaatgcttataagtggaatgaagaatgagaggaatagagatatttctgacttaattggccaaagtcccctagaatacattttaaaagagtcgggcaaagagagtatatattcacctaaaagaagtggtttatggtagaattagttcagccctgggcagttttccaagccagagataaagcatggcgtatatttgagctcctggagaaaagaaagggttaataaagaagagggacaggattgccacccaccttaaagtgagatgtagcagcatctcacaaggagtgtaagccaacacctggcatgctgattttatatataaaattgaagttcagagttgaaattgttgcatttgaagttcagagttgaaattgttgactgtgggtacatggttttggaaatgttcattttggctatcaatcatattctctagttaatatgtagattaaaatgagactattcccataacccctaataaaatgcctggtacagagtaggttttcagtaaattttagtgtccctgtttgagtgagtttgagtttttttgtgctgtgaagggtaaataaattgaccagaaatttttcaaaaatacattgaaatctcttgtaactctggactgtaatttatcactgtaatgtcactgttctgtgattctgtggcatgcttgttcatactgttgattttctgatttactgatttttctgaactggttttggaggggtcttgtggaataggaagatatgggggatggattttgaagacagtcagctcttcaagaggaattatggtgagtgaggtttaggaaatgtcactggggatggagaattagtctgctactggccaaaatgggtttttagaggtggaatggaaccttagaggtggtttaatctaacccctcattttacagctatggagataagtatagagaagtgagttgtgcaagtattatcgctgtagtagagaagccagaaacatcatagaacttagactatcacatttttactttttcttctgaaaaagaatgataacatgtgcatattatattactttttaaaattgatgttatatgttaaatactttttattcaatcttttagacttttgagtttgtttaaatagattaactgaactaactgtgctgccagaaagctcataaggaatattattctttagaaatgagaaattctcaatgtttttcttctgtttttaggttaaatcagcaaacaaagaaaacatggtattttgaaatatgattaaactcctgatgctgcagcagaggctaagaatattaatggccagatctaggtaagttgaagtttatttatgttttacatcactaagcctacatttacaattattttttatttttattttaaatacagatgaagtcctgttatgttgcccaggcggtttctaactcttgagctcaagcgattctccacctcagcttcccaaagtgttaggattacaggcgtgagccaccactcctggcctataattttttaatgagagaatttaataatgttttcttgaactgcaaccatttttcttcctgattgctgacaccacccccctgctcccaaaggatgaagataaatggctttaattaactaagacatgtttactaatttaaagtattcagcaaacttgttatagcattgctcttcccaaacaaaagctaccttttattttatttgtatttttaatttaatttaattttaattttattttattttttgagacagagccttgctttgtcgcccaggcttggagtgcagtggcatatcatagctcactgcagcctcgaccacctgggtttaagtgatcctcccacctcaacctcccaagtagctgggactacaggtgtgtgccactgtgcccagctaattttctattttttgtggagacagagtctcactgtgttgcccaggctggtcttgaactcctgggcttaattaagcagtcctcccacgacagcctcccaaagtgctgggattacaggtgtgagccaccacacccggcctaccttttgttcttaaatgtaccctacttacttttgtatgttgctgtcttgagtgagcataataaaatcatttgtgtttttgctgagttacaaacctggaggagtgtatgcaaatgagatcacatggttgttcctcaagtgtttacaatattaatgcatattattaggtgtcacatagctcagatgtagtcttcaaatattaatctggtggtcataaatgcagaatatctagtatctagccttttcccttgcctcagagtttgtggtttaggagaaagaatcagatatgtggatgaaaacttcacattaaagaagtttcctttcaggaattggaagattggccacaactgcccatgttccagctgtgtctatccctcactcatgctaagcctgttctttagccttactgaggccacctgtttttttgttttgttttggggttttgccccattttgtattttgttagctctcttctttctttacttctttcctgactggatgtcatgatctgtcacttcaaacccctgtattgccaacatactttagtatccttgccctcttaccctctgaccgtgggtcagttgaactgtctatcctgtggactgctgagcactgctagcaaaacagcataatcttgcctctgcagcctctgctgagttctcatctcagcctacttaataatcctgctctcttttcttgggtagctccttggtgactaatcctgccattctcaagtccctcattctacaagccttgcgttctcttttacaaaggaaatgcagggtgataaatattacctacttcagcctcttttctatattcgacccacccttatgtctttcctctctcctcagagaatgaagcattcctccttctctgggtaaacctctcaatctgggccctggaactcatctctactatccccctctgtcttgatccatcaattagcccttctcttttctttgtttttcctatgtttttaaactttcttgacctactgattataagcctgcataaatctatgtcatcttaaaatacgtaactcaagtaatgtattctcttttgaatatattcacaccgtagccctctctattctttattttctcaaccagttcttcaaagaccagtttccatcctctaggggttacctctttatcttccacttgctcattgtagtttggcatctgtctctgccatggatggtgccctcctgcttgatgcttacttttcttagtttgtactattctgatctttttttttttttaattccttcactggcttctctctactcctgtatttaaacacatttgtatttccccagaatttcaaccacagaccagtcttcatactatccttgagccagtgttcaagagcttaaaatgtgacatgtgttctaatgttttaccttctccctcaaacacatacttatgtacttaactattgcacttggacatttccctgggctctcagtttaacatatctgaacaaatcattatcacttcctcttgaagactacagttttttgtatctcaggtaatagacccctggcaccctttgtctgccatgctggaaactgcctctgttttccattatgtcaagtcagttctttggtgccactgacttttcctcttaaatgttccttaaatttattcttttcttcttcattcctaccattgctgctcttgttttaggtttttatcatatttcattttttaataatctcaaactgattttctttcctctgagctaaactcctacttaaatttatcatacatatgtttatttaaaatgcacttctgaccgtctcacttttctacttaaaatacatcagtggttttccatcatgtgtaggataaattcctttctctttggcatggcatacaaggctttcatatcacatattaggcatttcattaattattgttgtattgaactcaaacattcagtgtggatagagtccccaagtaggttgcactgccactcatatatcacttaatggtggagattccttctgagaaatgtgtcattagacagtttcgtcactgcgcaaacgtcatagagtgtacttacacaaacctaaatggtatagcctactatacacctaggatatatggtatagcctatagctcctactcaacaaatctgagcaacatcactgtactgaatactataggcagttgtaacacaatggtaagtatctgcatttctaaacatagaaaaggtacagtaagaaaactataaaagagaaaaaatggtacacttgtataaggcacttgccgtggatggaggttacagaactggaagttgctcttgggtgagttggttagtgggtggtgagtgaatgtgaaggcctagaatgttatcgtacactactgtaggctttataaaactgtactcttaggctacgctgtttgtttaaataattttttcttcagtaataaattagcttactataacttttttactttataaccttttaattttttgaaactttttgactctcttataatatttagcttaaaacacacacattctacagcagtacagaagtatttttttatatcctttaagatttttttctgtttttaaaatttttaatttttttttaacctttaaaacttctgttaaaaactaagacaaagacacaaacacacacattagcatgggcctatacagggtgaaaatcatccatatcacggtcttctcctcctacatgttgtcccactggaaagtcttcaggggcaataacatggagctgtcatctaggaaaactgcaccttcttctggaatacctcctgaaggacttgcctgaggctgttttacagttaattttttttttaataagtagaaggagtatactctgatataatagtaagatacatagtatagtaaatacataaaccaattacatagtcatttatcattatcaagtattacgtactatacataattgaatgtgctatagttttatacactggcagtgcagtaggtttttttttataccagcattatctcaaacacatgaataatgtgttgcactgtgatgctgtgatagctatagtgtcagtagctgacaggaatttttcagctcccttgtaatctcagggaaccactgtcatatatgtagtctgttgccaaccaaacatttgttatgtggctcatgactgtatatccctgccagcacgagaggttctaccttaacaggtagcttatgaagatgccaagtggaaggatgattttcctgctccttttgagaaaaaaaaaagtttaaaaacattcctttggagcatcatcttttgaagcaaaagccatactgtagtaatcttttagctcttcatatttcacaaggaggtcggggagaacaaatatgtactttcaagaagacttttaaaaaatgtctctatcaattatccctttacttaaaatttcttatattactcatcctataatttattaatattaaacatttactattttttaaaaaattaaatgtttatagaatatgtgccatgtctgaggcaggagaatctcttgaacctggggggcggatattgcagtgagccgagatcacgccatagcactccagcctgagcaacaagagcgaaattccgtcttgggggatttaaaaaaaaaaagaatatgtgccatgtaagttggtatgcttagtgccctggaaaatgaacaagacaagatttcctgtctttaaagagatcacagcaaagtggatggtgcagaaagataaacattgcagtagagtacgataaaggccacaatagagttatgccattctattgtgggaacactagaggcaggctatcttcgagttaactggaagatcaagtctcaaatctagggaacatgtccctagcttgttcaggctgctttatggttgggccccatttgtcttccagtctaccctgtagtccagtcatactgaacgcctcactttctcctgaatgtggtgtgacacttcatgacttttgtctgtctcaggtgcttatttctctttattttgcttagcatgttgtttctgctcttcttttaaatcccagctcaattagtgcttcctgtcctgcctaacccagaaagttagttgttccctttcatgtgcccacagtactctgctcatatcctaatataaggtttatcgcagtgcattatctatttacatctctctctctctctttctctctctcccccttgatactcacagctcttcaaagacaaagatggtgacttatgtgtccttgtactatgatacttagctggcatattagttaaagcaaaaataccaaatatcatgagtcttaattaactttactattatatgttatcatatacactcttggtttatacgctagtacactttttcattttcttaatacttatacctgctagggatccttcacatttgtttaatacagtccatttaaatcacaggtcctatagcaccttctgtatgctaggtatcgtgttaggtactaggaatgtaaaaatgagtaaggttcatccttgctgacaaggggctcacaatggaggagaaaagacagataaacagatacctgccacaatttctactcagtacaaagtgtgatagatgctatgatactaggaagcccagggtgctttgggttagcatatgcatgacggtcatacataatagtataacttgcctagttgcttggagtcagggaaagcatcctagaggaactgcactttgagttgaatcttgagaaaggaaagaagcagaaagggagcagcttggaaggatgtgagagaccaggatgctctggggaaactgcagcttgtttattctgacaggactaagaatagggcttgaaacagaaagcagggagagtctagactggatctgttagacagggattacattgtatctgatcggatctatcatactgaagagtttatactgttaaactgaagatagtggagagccactgaataattttcaacaagcttcaatcaaatttatgtttgtaatgttttgtagcttctgtgcttccttccctcctcctttttcatatattgtcatattctatctgattatttcccttgtttgtaagtgatgctttggagttttctttgtctgctcagttggagtgttcttaaacactcaatgtcaggtatataaccacttacctctaaccttctatgggaaaggagtattaaatagacatgctatatcagttttgccagtattctgtgtgttactttactgcttaattttgagttgtctttctctcttaccaatgcactattcgaaatttgattttgttttaattaccaatgaactcttgtcttgtggagacataaaagatactacaatgagtaacaacagtcaaaatacctgccaagccagaagttcaccatccctttggtgattttttatttaaagaacaagccaggtctggtagtcctgtagtcccagctactcaggaggctgaggcaggaggatcacttgagcccaggagtttgagcccagccttgggcaacataatgtctgcctgcctgcctgcctgcctgcctgtctctgtgtctctggctgtctctctctctctctctctgtctctctctctctgtccctctctgtctctctctctctctttaaagaaggacatgaaattcctgataagccacaaagggttaatttcattattaactcttgaacaaaaattaattatttaggtaatattatatatgagaccttaagttggttttttttttagatgattttagaataggtgacctttgcaaatttaactagaaatttgagatttgtttgacattattaatgcctcacaaaatttattctcattattactgagtaaaatcaactagctagttgtataaaatctagctgcagccatataccttgttggacttaattttctgcatcagaataatgtttgtgttagatgatttctaaagtctttttctgtttacagtttttgtatccttcatctaataaatttttccaaattatttttcatgtagtgcacacatggtcttctgaagaagccatgggtagctgttgtagctgtccagataaagacactgtcccagataaccatcggaacaagtttaaggtcagtaaaactggttgagttatatatcttactgcctagttgggtgttcttcttttatttcacttaacatatcttatttctggcttttatcaccaaacctttctatttccctttctttccaccctgtctttcttgatttaataaatgatgacaacattttcttacagtatggaattttttttagttttccttcggtcctctgtatctaattagccataccgttctggtaatactgtttttaaaatgccattttacggggtgccttttcaatctcatcactatctgtctttcagttattattttcatgtgtgcctgtgtgatttcttaactggactctacctcaagtcaccctctgattcatcctgtagtcaccatcaaattaatcttcttctctcatcattcactaacctctttgctaaaattgtgtggtgttattttacctgtaggctaaatgctgctatagctgttttgtgtctgataatttgacctcgatctgttacaaagaatagccttgatcacacaaacctaggtgtaagtctgtcactttataagctttgtgaccttgggcaggttacgttattactgagtcttaattccatttttgtacagtgtagtctaggattgttatgagggttaaatacatgtaaagctcttttcctactcccaggggaatagtaacttctccctaaatgttacctactgctcttagtctttggatgttttctgaagctcagcagtacaaagcctttcctcatatgaactctgtgccaatctattttggtgtctttgaaaggtactttttttgttctgctttaacattgtgtctttatgatgtccctttatctcctgacccactagatttcccctctgattttattttctgcgtaaatttatttatactagcggtccagctaaaggccctcctcctcttaaatgaaggtgtctcaacaaccttagaccacacttcctgccttctgcagcctctgttgcattcatttgtcaattaatcatacacttttgtggtattgactttgtgtttctacattttgtttccccagtgggaatgtaaatttcttacagatctgaactgggtgttacacggctacgtagtccatgcctgatacacacattggttgatgaatgaactaacaaattacaaataactaattagcaacaatgcattttcctgacgaattggtgacatatttgcatgactgtcaccttctttttttaggtcattaatgtggatgatgatgggaatgagttaggttctggcataatggaacttacagacacagaactgattttatacacccgcaaacgtgactcagtaaaatggcactacctctgcctgcgacgctatggctatgactcgaatctcttttcttttgaaagtggtcgaaggtgtcaaactggacaaggtagaacctttgttttttttcccaaatattgtatttgaaattgttttttcagctattctgtatacaaagattaaattaatatttttcttctgaaaaaaatcccaaaataaacagattgttaaggaaagatatagtatactgtgtattaatttatcaactgtttattaagcacattgtctatgtgagaaattttggctcatgtcaactttaagatttttcagtaaatgattgggtcagctaaattgactaagtgtctttatcattgatttttttactacctactacttgaatggccttgacaagttacaggacttccattgaatgttaaatttcttctctataaaagggaaatggtaatacctatcttttaattattgtaataattaaacaagataacaattggaaaacacctagggactttccaaggggcctgttacatggcaaatgatcaccttggaatagtgagttgggctccccctgctgttaagaaacagactagcgtaagtgcgcaggtcttgatttcattagctttattttgggccatctcccttagatgaatgaaaattattctgtgaacttttggcgggggtttgttttgaaacagagaataatcattaatttatcagatatttatttaaaagggatttctgactcggtgcgtagaatgcttactttacaattctgctgtttgtcaagtgttcctatagttttttttaaaggtatgttaactatttttcccttttggtttatatttgtaggaatctttgcctttaagtgtgcccgtgcagaagaattatttaacatgttgcaagagattatgcaaaataatagtataaatgtggtggaagagccagttgtagaaagaaataatcatcagacagaattggaagtccctagaacacctcgaacacctacaagtaagtaccccttttccctttcacattttgaataacagacgtttagttgtaagctatagattgtgggtatttaatcaataacacactagaaatcaccactggataacagaagtataatggttgtcagtttttaaaaacagctgtaggccgggcgcagtggctcacgcctgtaatcccagcactttgggaggctgaggcgggcagatcactaggtcaggagatcgagaccatcttggctaacactgtgaacctccatctctactaaaaaaatacaaaaaaattagccgggcgtggtggtgggcacctgtaatcccagctactcgggaggctgaggcaggagaatagcatgaacccgggaggtggagcttgcagtgaactgagatcatgccactgcattccagcctgggcgacatagcaagactccgtctcaaaaacaaaacaaaacaaaacagaacaaaaaaacacagccgtagttctaagtacttcaaatatttaaaaaatgaaaacattcagtatttcatattaggtaaaatatggagttgggggtaatactatttgtgctctgatttctgctgtcttggcagaaagacctcctataatcctcagtacagattcgattcttactcatttttattctctctgccccgccccccttttccttaaaccaataaacaaaaactcagctccaggatttgctgctcagaacttacctaatggatatccccgatatccctcatttggagatgcttcatcccatccgtcaagcagacatccttctgtgggaagtgctcgcctgccttcagtaggggaagaatctacacatcctttgcttgtggctgaggaacaagtaagcatgtgctactgtgtaacagcaataatgattgttcagagttagggtatcactgtgctaatactggaagattttattcagcttgaagtttaactttatctgtttgtaaattacttttgtagtgaacaatcagaggagatagcatatatttgctggtttatgctcaaatatatgcgggtattcaggggaacttaccattacagtagcttgtgggttcacagaagaggtacatctatagattaagaaaggcataactaatggtcagttcccattataagaatgtccaatggattaagagtttatgctgcttttcatattttagccattatagtcagtgaactacgagtaggaaggtagattttgctgttaatgttatggagttatttagtgttcccgagtatgctagttttcatgtgtggaatgaagtatctggttggaacctctgtattaattagttatacttatgttttgtaaaccatatgtcacattaaaaagtttttagtgtttttaaaatcagtttctttgtgttctttacataatgagttgttatattatttactgtaattacatgagtcttggtctgtcgcccaggctggagtgcagtggcatgatctcagctcactgcaacctccacctcccgggttcaagcagctctcctgcctcagcctcccaggtagctgggattacaggcgcaggccaccacatccagctaattgtttcatatttttagtagagaccgggtttcaccatgttggccaggctggttttgaactcctgacctcaagtgatctgcctgccccggcctcccaaagtgttgggattacaggcgtgagccactgtgcccgacccttgtaaatatttttatattatctccccaaaatactattaagcttttctaaatagtgataatttcttacttggtggcatttattttatatatatgcattttacagaactcttattaaatctagtggagttaatcttcttatacattcagatcatcagtaaataaggataaacttatctcttttcaaagtcgttatttatttctggatcatgttttaatgctttgagaacctctaaaacagcagcaaaatgataatccctattttgttcctgatttttattttttacataatatttatcatgtttaacaatcaaatataatgttgcatgttattttattttattttttgagatggagcctcactctgttgcccaggctgataatgtaatggtgtaatctcggctcactgcaacctctgcctcccgggttcaaatgattcatgtgcctcagcctccagagtagctaggattacaggcgctcaccaccatgcccagctaatttttgtatttttagtagggacggggtttcaccatgttggccaggatggtctcgaactcctaccctcaagtgatccacccgcttcagtgtcccagagtgctgggattacaggcatgggccactgcgcccagcctgcgtgttattttgaagtcgttattcttttatcaaattaggaagacatttctacatttctccttctctttccacctttttattaataaaaaaacaggtgcaaaagttttgaagtaagagtacatttggagagaaagttaatacagttaactgttgtcaataaaattaactgatgtggtcaggctttttttcagttttgtttttttaagtaagttaactaattcactttctgttttgttttaggtacatacctatgtcaacactacaggtgtgcaagaagagcggaaaaaccgcacaagtgtgcatgttccattggaggcgagggtttctaacgctgaaagcagcacaccaaaagaagaaccaagtagtattgaggacagggatcctcagattcttcttgaacctgaaggagtcaaatttgttttagggccaacccctgttcaaaagcagttaatggaaaaagagaaactggagcaacttggaagagatcaagttagtggaagtggagcaaataacacagaatgggacactggctatgacagtgatgaacgaagagatgcaccctctgttaacaaactggtgtatgaaaatataaatgggctatctatccctagtgcctcaggggtcaggagaggtcgtctgacatccaccagtacctcagatacccagaatatcaacaactcagctcagagaagaactgcattattaaactatgaaaatctaccatctttgcctcctgtttgggaagcccgcaagctaagtagggatgaagatgacaatttaggaccaaagaccccatctctaaatggctaccataataatctagatccaatgcataactatgtaaatacagagaatgtaacagtgccagcaagtgctcacaaaatagaatattcaaggcgtcgggactgtacaccaacagtctttaactttgatatcagacgcccaagtttagaacacaggcagcttaattacatacaggttgacttggaaggtggcagtgactctgacaaccctcagactccaaaaacgcctacaactccccttccacaaacccctaccaggcgcacagagctgtatgccgtgatagacatcgagagaactgctgctatgtcaaatttgcagaaagcactgccacgagatgatggtacatctaggaaaactagacacaatagtactgatctgcccatgtgagcctggaaagcattgtgttgtttgcacctttgtgaagtttttaaaaatgaagatgcaagtgcttcattttcatttctaaacactaactccttttatagactgataaaatttttttctgaatatttcatgtgcatctttaactaaagggaattaatgtagagcaggtactccttaaagaacactaatttcattatatactactcgttgtacagcagcattcccgttttcacagtgcctatttaaaatgagagttgaagtaaatgacatgctggttgatttttatcaatattctggacttaacgcatacctttcatgtctaagtcatggttggcttttaaaactttttataaagcctcttgacaatgtacattgctaacaggtaactataggctttgaaagtaatgctcgtagattcagtgttcacagtatgtggcctccagcatgtaacatgaggaatcctttatttcattaattaatggctttttgacttgagccaaaacatatgtaaaggaaacagaagtaccgcacctcctcttacaccagtcagctcctttgccttcagtgttactagaaagcggcctgtgtccatgagtgtgctttgctgttggtgcactgaaaggcaggaaggagacaagattttctatttactcatctcatgatgtcatttgaagggcatgtccagatatcttaaaattataataggctcaagaatcagtctcaggtcactttacccaaaaacatttgaaaatctgaaccacaatctcctgaaagtttttctcctatagattgttgacaacacattgttttctggaggcatttgtgccattaggtttccatttatcttcagtttttttctttggtgtttgggatgtcttattttgttgccttatgtccttttcaatttaaaatgtttgagtttgtatatagttttgaaattggattatgtgttcattgttgtttagtttgcatttttgtcaaattatggttttgaaggttcatttggaacttactgttagtctgtaacagggttgcccttgtccagtatttatttataagctgtttacttttcaagttgataaaaacattctccaattctaaatttgcttgtgtccataggtgatctctttagcaaactgagaaaaaaaggaagctacttttaacatgcaaagttccctcaaggtgtaccgtgttgtctctgtgggcactcttccccagcactttagcagtaattcccccagctacacgctgcagttgtactctgcccactctagtgttcctcagctctgctgtccttttacttgtagctggatctttgattatccttcgatttccatgaaatattaatattgttgccagcatagcaggtacagtggaagtcttgtagcagtgagattgtatcataatttaggatttaaaatgaattaaagtttatataaactgaagagtctccatatgtcaaactcttggaaaatcaaagatgttccaatttcctaaacactagagaatacgagagaaggtagagtggaaaaggttaggtaaccttgcaaaatattttactattttctctaaatatgaggaagtttgagattatgatctggatctaccagatataactaaggttaatttagcatgaaaaagttttagtcatattggcatccaacctattcagtaaccgaatcataggacaatgatggattaggagaacaatagagtgggatcattataaagaaaataaattattaaaggtgtctttatcgttttagtgccatttttagtgtctttactataaatcaatatcagtgtattttatcattctatgtgcatagcagaattttcttttctcccttttgttcccctgtgaacttggtgcttattaaagtgctcactgttctcttaaaagagagcagtggtataggtgtgcagtttccatgatgcaggttccatttttaatatattgttccacttatcctttcttctgagtaaattgctaattgtgccaaatttatgtaatagtttttgtaatgtggaataagaattatgatggaaccattgcacatttttttctgaaacagccagtcaaggcagaacattaatctccaaatgcaagggctgatctatttattcattttggaggttgggtactttattctttctttccgtcatccttttcattgtttcccccggattctaattagtttttattttttttagataactccaatataatcattacagtttatgctttaaatactatgtgctttaaaaaggaaaatgggaccaatttgtctgctaagaatttgattttaggtactataagagtattaggaaaatatatacaactggtgttaatttctagatattttctagaaatcacttgtgttcctatttaataaaaggtaatttagaatactacttgtcctttgcagtagtttagtaatgggcattaagctgtgtcctcgaaggatgtacctattactaggtgcattttagaatgaaatattgatattttattagcatataattgtggccatatatctcagattttctgaggcagatctaattttagataattctgttggtagaccatgtgatccttctttttggttttggaaatataatcattgttaatgttttccctccaaatagaatactgttttatccatacaaatcataacagcatctatcccatgctagggttggaaactgatattggtattacttgtgttttttcttagtgtgttttatttcccagtttcatcttcttctaaaaatgaaaatatggtgccttccctccctccaggaagactggcaaatatttccttttatttactgctgctgtggagtgatgagatatgcactttactctttaagattcagcaaaaagcttttcacttctcagtatatccagaatacatcatatctgggacttaggaaaatttgccaagcaatctttgtttttatagatactaatgttgaccctctccagcgttcaatgttataaatagaacaagtcaagctagtgtttatctcctccccctccccaaaactgtggcacagcatataaaaatgtacctcaataatgttctattaaaaatgggacaggggccttatgttttcataatttcccaacaatgtgccgccatatttttgcctcaaggtaaaggttttaacagatgaaaaagtacttcccaattcccccgtgctattcctaacctataatgcccaaatgttttgtgcaatgtgtagtgtgtgtgtataaatacatatattcttgaaatagacataccatcagagacatcattcacaagtaactgatgtattggcatctcattcatatttctgatgtgtgaggtatatggtactaattaccttttccttgatgtttgccaaatttgaataaaggcattggtacgaaattacagaatgtaaagaaaatgtttttggcttgaaaaattaacatattttatgacgtaccacagtatactctgcccaaaccagcaccctatctatctttcctgttctttacatccctgttccccatccctacttcctcatttttggtataacacagttcttttgtagcatcattataattgcagttctatggcaattggacagttatagcatggaaacagactggtataaatagtacagtagtcaccagtgtgccacatttgcattagtaatgcaaaatatacattttataaaggacaaactttgtgttatgttttattttcattacattgtataatattgtaagactattgtatgtcctaatttgcattataaatgtttttttcctacgtaaaggcataaatatagcaactttgtataaaggtagcttattagatttttaattttttcttttataaaaaattgtccaacagtgggactaccattgccaaattgtatatgaaatatgaattttacccccatggttaatttcttttataaacattccatatttctctaataaaaagacataagtgatactgtactatgcatacattgtatcttaatgctgtttcagatcagcattttaaattttggtttgcatttttaatattggcaaaacgtaaccactgttaattaaaataaaaccttgttgtatatgtaacaacataattttccctctatcccttcccaccctttgttctctatttctccctatcagtgccaacttcatacattttgtagcatggcaataaaatataacttttacactgaggccgagtgtggctttttggaggaagtggggatgggacgattgccctctagttgtcctttgcatatgactgttttttgccatataagccatgtcatcaggcatgaaaagttttctcatatatgatgtaaacttgcttttaaggacaagtgtgaatgtgctttttaagcttaatttttgtcatgacaactaattttttttatctttggagaagtcagagttctttacaatcaaacgtttattaactggagtacttagaataagctagtaattgaatttagttcaagggctaagcaacacatttttaaatccttatttattgtagagtattagtatactgtcctacaaattatgtaaaatatggtttaatattagatgactttggattttgcaatgccttactgttgtcattctagcataaatatccataatgaggtactcaagttgatactggaagctgagctgatcatacactgacctgaagcattcatgaaaagctgctttattgaataaagtctgattggagttcttttcatgctcactttccccttattgctgaaagtagattgcaataaaaccccaataaaacgtttggtcggatatctacttaaaagttttattgtatttatatttcacatactacttgaaactttgtgacattttctttcctagtctcatatcactgcctccattttcaaaatgaagatatcaaaatgaaattgtaactatatgacaggctttctcacagttttagctgtgtgatcattccaaatagtagttctcagctctgggacttcaaacctgtttttagccactgagtgacattgcaaagccttagttgagtacaggtcaagatggaaattatttaaacaatgaaggagatggacatgtccacaagtgattgatgtaactggcatgataaagacacacacaaaggaagggcatccaactcagcctaggggtggaggttttcaagcaaagcttcttagagggggtgatccctgaggtggtttgttgaaagtctttgtagcttagagaggatgtcttagggagaagggatagcatgtgcaaaggcacagaggtatagaaagatcatgacattcagtggttgcaagaggttccaaatgactaagcgcatggagagcaaaggcagggttgggggatacagaagaaaggagaaatgagaaacagatcacagaatcctaaggagcttttgtttaaattaggtgagagaacttgaaggattttaaacaccagaaaaataatagtttagaaagatttctctgacaacatggatacgtgaagggcgcagtatttttttttttttttttttttttttttttgagacggagtctctccctgttgcccaggctggatggagtgcagtggcgccatctcggctcactgcaagctccccctcccaggttcatgccattctcctggctctgcctcccaagtagctggccctacggtattttaataaagcagggagactggttgagaggctttttcagaaatggagccagatctgataaatccgtattcaaaggcattgttaaaggactgtttagattgtttactgctgtgcaacaaaccaccctaaaagttagtggcttaaagcagcaatcatttaatgtctcaagttgctatagatcgagatgggcagggcacagcagagatggctcatctcacatgatgtctggaggcctggcttcctcatatgctttgtgcctatgctagtatgattcaagcagctgagggctggctggaccagttccactaggttatgtctggaacttaaagctctcagctgtgttccttagttttcttccatgaagtcttgggtctttcttcatgtggtcttcttacatggcagcttagggttcccaagagcacaaaagtagatgctgctaggctttcttgaggcctaagcccagaactggcacaatgtcaattctgttgtattttgttgaattacagtggctcatataaaagcatgaacatcaaaagtgtagtttattcagggccaccaatgtaatagagggcctaaaggaggaagaattaacacctctgattgataaggggaatgacagaaatggaggggtcaaggatgacccccagttatctggtttgggtgactgagatggttgatggtgtcagttcattgagatttaagatatatttgggggctgggcatggtggctcatgcccgtaatcccagcactttgggaggctgtggagggtggatcacttcagcccagaagtttgagaccagcctgggcaacatggtgaaaacctgtttctatgaaaaaatacaaaaatcaactggcgtggtggtgtgtgcttgtagtcccagctactcaagagactgaggcaggaggatagattaagcctgggaggttgaggctgcaatgaactgtgatcctgccactgtggtccagcctgggcaacataatgagaccctgttttttttttttttaaagtgctcctctaagtgtgctccacagactgattcctgtgtacaaactatcacggtctgcaacaggagaaatatcaagtcttctaaccttctccctactacccaaacagtaggtgtctgggtggacccaacttaatgtgactgtggactcctggtcctttatttggtttccttccccaggtattctaactgttcctgaggaatgttgacaagtcccataactctgttctggtggttgtttgccacttcgccagttatttcactccagttaatgaatctacccttgctcccaaatcacctctagccatcaaataatgatatgctacagtgctttcctacttccataacatgccaagcatatccaacctcggctactatatttataaagcctattagaagacttgggatataatgataacaatagctaagctaaacaggcactgttctaagctatttaatctgtgataattatctccattttacacaaagggaaattgaggcacagagagattatataactggaagctgaccagttaacaaaaagccaattcactgaaagccaaattataccaaggggaagagagaggaggacacagggtcatagagaggagagggtcacaaagactttgagggaggaggaagggttaactaagagaagccaagaccaagggacttgagagtagaggacagaagatgagccaggagaaagtcacacaacgtgtttaatcacagaaacatggattcccaaggtctcactatctccataggccctgtaacctatctaatacaaattacgataaaatgtataaatagatgggcacagtggcttctgcctgtaattccagcactttgggaggccaaggtgggcagatcgcatgaattcaggagttcaagaccagcctgagaaacatggcaaaatcccgtctccaccaaaaatacaaaaaattagctggtgtggtggcgcatgcctgtatttccagctactcgggagacaggtcggaggatcgcttgaagtcaggaggcagaggttgcagtgagtggagatcacaccactgcactcctgcctgggtgacagagtaagaccctgtctcaattaaaaaatatatatataggtgtggtggctcatgcctgtaatcccagcactttgggagactgaggtgggcagattgcttgaggtcagaagttcgagaccaccctggccaacatggttaaaccctgtctctactaaaaatacaaaaattagccagctgtggtggtgcatgcctgtagtcccagctatttgggaggctgaggcaggagaattgcttgaacccgggaggcggaggttgcagtgagttgagatcataccactgcactccagcccgagcgacagagtgaaactctgtttcaacaacaacaacaacaacaaaaaagtataaacagctaaaagagacagtttttggtaaaccagcacattgatcacgctctgaatggccttcaatgaactgatttaaagagcctgtgaaacccacccaagactacaaagctagtacgtaaaatggttgaaattcaaactcatatagtctgggtctagaagctgagtgtttagcctctaggtgtagaggtgtcatcaaaggagggggaagtaggaaagaaggaagggtcaaaagatgcaatggagaaaggacacatttccaagggtcccatcatagagtctcttcctggctgcctctagcctcagttccacaaggtggcagggcctgcctccttctccccatccaaatgcctctggctacattcaaagcccagcagggagcagtcattggtttccccatcacacacagtctcaggcttgcctaccagaggacataataaatatctccaggtatgtaattttgcccacaataaaaacaacctttttcaatattgtgcaggcatcttagttttttattgtgaatcttctcattccagaatgcgatttgggatctgcctaggaaagtacatttcctgaaagaagaccaaattttcctacaaagaagagaaaactcttgggagatttaaaataacaatttgtccagcctgaactccccttttcatgttggacctgaggaatactgtaaaccagggtcagcaaactttttctgtaaagaattagataatacatgttttaggttttgtgggcccattcaacctgtcatgactactcaactctgccacataactctgctatcgtattgtgacagagtaaatatgtatgggtatgcccatggattccaatgaagctttatggacactgaaatattaatttcacaggattttcatgtgtcaggaaatttttgatttctttcaaccacttaaaaatgtaaaaactattcttagctctcaggccatacaaaaaacaactggcaggctgggtttgactcctcacagcttgccaacccctggtggaaatcaacccacttagaggaaatctgaagggtagaaacaactaaaaaattgaaaattcctgttaatgttagcaatgtcaaaaatccaggagaccccagctactcaggagaccaaggcaggaagattgcttgagcccaggagttccaggccagcctgggcaacatagaagaccccatctctaaaaaaaacaaaacagaaaaagaaaaatccaggagcttgttttgttttgtttttgttttgagacagagtctcgctctgttgcccaggctggagtgcagcggcgtgatctcggctcactgaaacctctgcctcccgggttcaagcaattatcctgcctcagcctcctgagtagctgggattacgggcatgcacaccacgcccggctaatttttgtattttcagtagagacagggtttcaccatgttggccaggctggtctccaactcctgacctcaggtgatccgcccacctcggcctcccaaagtgctgggattacaggggtgagccaccgcgccctgccgaggagcttaagcgatcagttagtcaaagggagaaaagagggtatcagtagatgacagaaaaattttttagagaacaaatttttagacatccgtcaacttagagaaagtagaaaactgtctataataaactgaaatatttgggactgatcttgatgtctgccaaggttttggcagacatcaagatcagtcccaaatatttcagtttattataaacaaagactaataagtcgtctctactattggaggaaaaaaaaaaaaaagaccgaaatgcaaaaattcctgaaaatgagtaaatagggcaaagataaaatactataaatgtctctctcagttcacaagaccttatcctgggcagtcaacgtccagttagaaataacgtctgaaaattcagtaagagaaaaggaagtcttcttctgtaatactcagtaaataatgtttaaaattaacatagcaataatattatctgggaatatgatagtaaatagcccctccaaaaaactgaaaaagttgaaagcagttttcctggagacaggaagtggtgaggcagataaattatgtttttccttattggtatataacactttaaactgtgtacatgtgtgactttaatagaagtgtttaaagattaaatttaagaaaataaaaagtgtgagcaagaactccatttctatggcaacccgcgcggcagccgcctctttgttctggagcggcggccacgccccctccagtgtgaaaggctgcgtttccggcccgtggggctccaatcaaaatgggacgcctgctggcggtaacgacaggccggggccccgccccccgaagtagggcgtgtggcgtcacttccggcttccttcagtccgctggtcccgagcacgagctgtgaggggattcacttgtgtgcggaactcctcggaaccatggtgagcctgactcccctgcctcttgccctacccctgctccgccgtgctcttgccaccccactgcttcctctgtcctgctagggtcgtaggctccgtttctgtctccccggccctccgcacatggtgcgagccatgcgcggggcgtgcggcctgcgccaggccagccggtggagctcaccacgagggggaggggtggaccgcaaagccagcgtctccttgtgcctaggtctttgcatagtcccggcagcccaggtccgcgcctcacccggagcgaagaaatttctagtgtgggacccgctccgccctccttctaggggcggagcctggagcgacggggtctgagccatcagagggtggaggggccgcagccttccgagggtggaagatggaggccgcgttccctcgcccgcccggcaggcgtcaccttgatggcctgcaacccctccctgcctcattcttagttcaagatcgtctttagtctcgctgtacgtaactgtcaatctcgctggtgtataatttatactcccgggggccttgtaaatccgaaaagccatgtcgctctcctacaagtccctctctcccacttaaatgctttctccgatgatggaagcttcatttgattgaaaacattgttgtaaatgagttttctcttagatgtccacttgtaagactagtggaaggcacctcagtgtatgtgttagagtattggtacttaaacggaatacctcttggttttccttttcaggcgtccctttcccttgcacctgttaacatctttaaggcaggagctgatgaagagagagcagagacagctcgtctggtaagccttgttctaagcattgttttaaagataaaactggaggccaggcgcggtggcttactcctgtaatcccagtactttgggaggccgaggtaggcggatgaactgaggtcaggagttcgagaccagcctggccaacatggtaaaaccccgtttctactagaaatacaaaaattagccgggcgtggtgatgggcacctgtaatcccagctactcgggaggctgaggcaggaggatcgcttgaacccaggaggcggaggttgcagtgagctgagatcgcgccattgcactccagcctgggcgacagagcgacactctgcctcaaaaaaaaaaaaaagtaaataaagataaaactgtacttgaagactgtaaagttgattctgataatctccttggtttttactccagacttcttttattggtgccatcgccattggagacttggtaaagagcaccttgggacccaaaggcatggtaagaaaaatagaaaagttttatattttaatattgttttagagcgcttggtggaaatataataacaagcgtattaaaatgctttttaatctttaaaacgtttaattataaaagacaagtatgttctccttagtaaaaatcagagtccccagaatcaccatccccaatcccatgcccctccccaatgacaagtactgttatcatttgcacgtacatcttctaatattctgtttatgtagaagtatgtgtacttcattatgtattttatactcatgtaacatactgttttataaaacagatactatttatcaatacttttttgtagcttgctcttttaaattcctttcagtgtaagtagataacactgcccctttaactgtcaaatattatcctgtaccttaattattttataatttaattatggctgtattgatagtttctttccattgtttttgcagttacggtgttgaaacaaaaactagtgtctacctgtgcttctagtgtttctaggggtagatacatggtttggttacgtggtgtatgtattgaaaacatttgatgaatggataccacaaaatagctatccagagtgtttatacactagcactgtgtgagaatactgattgatccatgcattcttcaagatgtgcttatgtcttaacttgaaccaattatgttccctttaggacaaaattcttctaagcagtggacgagatgcctctcttatggtaaccaatgatggtgccactattctaaaaaacattggtgttgacaatccagcagctaaagttttagttggtaagtctgaatatactttttcaccaacctaataatactgtttgttaacatttttgaaataactttataaataggctgtgttgaccaatcgtactgtcaattgatgtccactagttgttaattatcgttgttaaaatacaagcttcaggagtgcccgtatgttggtggtaaaactgttgcatttcagacctcagagttccaaataatttgttgaatgaggaaccctggtaagtttagattggtagtgaatatttttggagaatttagtaagcaaagaagcaattttgagttaataactaatttctttttctagatatgtcaagggttcaagatgatgaagttggtgatggcactacctctgttaccgttttagcagcagaattattaagggtaagagcaactaagcaactcttttttcctactgtgtttttgagtatcagaggtaatctagtccttacttcctctatctttactattgaggagtgcttaataattttctatttataacttttgttttataactttattaataggaagcagaatctttaattgcaaaaaagattcatccacagaccatcatagcgggttggagagaagccacgaaggctgcaagagaggcgctgttgagttctgcagttgatcatgggtttgtatagcaaagtactactgttctaaacatttagtgttctttcataacatgcttaatgcaagaaatctataggacactgaaaagcatacacaaagatcatcttgctgcctcaccccactccaacagtcaaacctacatcagcctccagagatagccactaaagttaagtttgggtttttagtctttttgtatatatcatcaaaatatacaaataaagcaaatagtataatactgtatagagaatttgttagcctctttttaacctagttaaatattaagcacatttttggatgtcaattttctgtgcagtattttaatagagttacacatttgaatatttggctagaatgactgtattaacctatctgtagggggagatttgtgtatttgatgatttttagcattataaaataactttgtgacgttgcgacatagcccaaaggtttctagaagtgtaattgttgggtccaaaggtaagtgtgtgtgttttaaggcacccccaaacctgggctgcacagcaggtgagcagcaggtggaaaaattgtcttcccatgaaaccagtccctggtgccaaaaaggtccgggaccactgttttaaggcacttctatttatttgcccattcacaactgtataataatacttgtttttcacgtccttttatttatttatttattttgagacggagtctcgctcttagagttgcccagaatggagtgcagtggcacgacttcggctgactgcaacctctgcctcccgggttcaagcgattctcttgcctcagcctcccaagtagcagggactacaggcatgtgccatcatagccagctaattttgtatttttagtgtagatggggtttcaccatgttgctcaggctggtcttgaactgacctcaagtgatccatcctcctcagtctcccaaagtgctaggattacaggcgtgagccactgtgcccggccatttctcacattcttgccaacattagacttttgcatgcttgtgtggcccccacccctcttttttttttggcattttgccagtttggtggggaaaataacatctttaatttgtgtttcttgattactgctgaggtttaattcttttcatatagcttacagacttgatcagttagggtaaaattatctattgacatgaatatctagataaattttgaaaagtaaagtagggttaatatgtatatttggttggttttatttagttccgatgaagttaaattccgtcaagatttaatgaatattgcgggcacaacattatcctcaaaacttcttactcatcacaaagaccactttacaaagttagctgtagaagcagttctcagactgaaaggctctggcaacctggaggcaattcatattatcaagaagctaggaggaagtttggcagattcctatttagatgaaggtatgtatgaatgtcagatacaagaagctttgattagatgctgagggctgaatactgagtgaattctgttttgagaccagtgaccctttacaaagcca

SEQ ID NO: 2619 - DNA, 6629 bp, Homo sapiens
tgcttttccaggattcgggccggagagaggccttgtaggcacagcggctgagactcgatctgctccaagtaggggctccagcgcgggtcggagtctgggggttcgcgcccgccgacccgcgccctgctccctctcagcacctgggcggacggttaaatcagcaaacaaagaaaacatggtattttgaaatatgattaaactcctgatgctgcagcagaggctaagaatattaatggccagatctagtgcacacatggtcttctgaagaagccatgggtagctgttgtagctgtccagataaagacactgtcccagataaccatcggaacaagtttaaggtcattaatgtggatgatgatgggaatgagttaggttctggcataatggaacttacagacacagaactgattttatacacccgcaaacgtgactcagtaaaatggcactacctctgcctgcgacgctatggctatgactcgaatctcttttcttttgaaagtggtcgaaggtgtcaaactggacaaggaatctttgcctttaagtgtgcccgtgcagaagaattatttaacatgttgcaagagattatgcaaaataatagtataaatgtggtggaagagccagttgtagaaagaaataatcatcagacagaattggaagtccctagaacacctcgaacacctacaactccaggatttgctgctcagaacttacctaatggatatccccgatatccctcatttggagatgcttcatcccatccgtcaagcagacatccttctgtgggaagtgctcgcctgccttcagtaggggaagaatctacacatcctttgcttgtggctgaggaacaagtacatacctatgtcaacactacaggtgtgcaagaagagcggaaaaaccgcacaagtgtgcatgttccattggaggcgagggtttctaacgctgaaagcagcacaccaaaagaagaaccaagtagtattgaggacagggatcctcagattcttcttgaacctgaaggagtcaaatttgttttagggccaacccctgttcaaaagcagttaatggaaaaagagaaactggagcaacttggaagagatcaagttagtggaagtggagcaaataacacagaatgggacactggctatgacagtgatgaacgaagagatgcaccctctgttaacaaactggtgtatgaaaatataaatgggctatctatccctagtgcctcaggggtcaggagaggtcgtctgacatccaccagtacctcagatacccagaatatcaacaactcagctcagagaagaactgcattattaaactatgaaaatctaccatctttgcctcctgtttgggaagcccgcaagctaagtagggatgaagatgacaatttaggaccaaagaccccatctctaaatggctaccataataatctagatccaatgcataactatgtaaatacagagaatgtaacagtgccagcaagtgctcacaaaatagaatattcaaggcgtcgggactgtacaccaacagtctttaactttgatatcagacgcccaagtttagaacacaggcagcttaattacatacaggttgacttggaaggtggcagtgactctgacaaccctcagactccaaaaacgcctacaactccccttccacaaacccctaccaggcgcacagagctgtatgccgtgatagacatcgagagaactgctgctatgtcaaatttgcagaaagcactgccacgagatgatggtacatctaggaaaactagacacaatagtactgatctgcccatgtgagcctggaaagcattgtgttgtttgcacctttgtgaagtttttaaaaatgaagatgcaagtgcttcattttcatttctaaacactaactccttttatagactgataaaatttttttctgaatatttcatgtgcatctttaactaaagggaattaatgtagagcaggtactccttaaagaacactaatttcattatatactactcgttgtacagcagcattcccgttttcacagtgcctatttaaaatgagagttgaagtaaatgacatgctggttgatttttatcaatattctggacttaacgcatacctttcatgtctaagtcatggttggcttttaaaactttttataaagcctcttgacaatgtacattgctaacaggtaactataggctttgaaagtaatgctcgtagattcagtgttcacagtatgtggcctccagcatgtaacatgaggaatcctttatttcattaattaatggctttttgacttgagccaaaacatatgtaaaggaaacagaagtaccgcacctcctcttacaccagtcagctcctttgccttcagtgttactagaaagcggcctgtgtccatgagtgtgctttgctgttggtgcactgaaaggcaggaaggagacaagattttctatttactcatctcatgatgtcatttgaagggcatgtccagatatcttaaaattataataggctcaagaatcagtctcaggtcactttacccaaaaacatttgaaaatctgaaccacaatctcctgaaagtttttctcctatagattgttgacaacacattgttttctggaggcatttgtgccattaggtttccatttatcttcagtttttttctttggtgtttgggatgtcttattttgttgccttatgtccttttcaatttaaaatgtttgagtttgtatatagttttgaaattggattatgtgttcattgttgtttagtttgcatttttgtcaaattatggttttgaaggttcatttggaacttactgttagtctgtaacagggttgcccttgtccagtatttatttataagctgtttacttttcaagttgataaaaacattctccaattctaaatttgcttgtgtccataggtgatctctttagcaaactgagaaaaaaaggaagctacttttaacatgcaaagttccctcaaggtgtaccgtgttgtctctgtgggcactcttccccagcactttagcagtaattcccccagctacacgctgcagttgtactctgcccactctagtgttcctcagctctgctgtccttttacttgtagctggatctttgattatccttcgatttccatgaaatattaatattgttgccagcatagcaggtacagtggaagtcttgtagcagtgagattgtatcataatttaggatttaaaatgaattaaagtttatataaactgaagagtctccatatgtcaaactcttggaaaatcaaagatgttccaatttcctaaacactagagaatacgagagaaggtagagtggaaaaggttaggtaaccttgcaaaatattttactattttctctaaatatgaggaagtttgagattatgatctggatctaccagatataactaaggttaatttagcatgaaaaagttttagtcatattggcatccaacctattcagtaaccgaatcataggacaatgatggattaggagaacaatagagtgggatcattataaagaaaataaattattaaaggtgtctttatcgttttagtgccatttttagtgtctttactataaatcaatatcagtgtattttatcattctatgtgcatagcagaattttcttttctcccttttgttcccctgtgaacttggtgcttattaaagtgctcactgttctcttaaaagagagcagtggtataggtgtgcagtttccatgatgcaggttccatttttaatatattgttccacttatcctttcttctgagtaaattgctaattgtgccaaatttatgtaatagtttttgtaatgtggaataagaattatgatggaaccattgcacatttttttctgaaacagccagtcaaggcagaacattaatctccaaatgcaagggctgatctatttattcattttggaggttgggtactttattctttctttccgtcatccttttcattgtttcccccggattctaattagtttttattttttttagataactccaatataatcattacagtttatgctttaaatactatgtgctttaaaaaggaaaatgggaccaatttgtctgctaagaatttgattttaggtactataagagtattaggaaaatatatacaactggtgttaatttctagatattttctagaaatcacttgtgttcctatttaataaaaggtaatttagaatactacttgtcctttgcagtagtttagtaatgggcattaagctgtgtcctcgaaggatgtacctattactaggtgcattttagaatgaaatattgatattttattagcatataattgtggccatatatctcagattttctgaggcagatctaattttagataattctgttggtagaccatgtgatccttctttttggttttggaaatataatcattgttaatgttttccctccaaatagaatactgttttatccatacaaatcataacagcatctatcccatgctagggttggaaactgatattggtattacttgtgttttttcttagtgtgttttatttcccagtttcatcttcttctaaaaatgaaaatatggtgccttccctccctccaggaagactggcaaatatttccttttatttactgctgctgtggagtgatgagatatgcactttactctttaagattcagcaaaaagcttttcacttctcagtatatccagaatacatcatatctgggacttaggaaaatttgccaagcaatctttgtttttatagatactaatgttgaccctctccagcgttcaatgttataaatagaacaagtcaagctagtgtttatctcctccccctccccaaaactgtggcacagcatataaaaatgtacctcaataatgttctattaaaaatgggacaggggccttatgttttcataatttcccaacaatgtgccgccatatttttgcctcaaggtaaaggttttaacagatgaaaaagtacttcccaattcccccgtgctattcctaacctataatgcccaaatgttttgtgcaatgtgtagtgtgtgtgtataaatacatatattcttgaaatagacataccatcagagacatcattcacaagtaactgatgtattggcatctcattcatatttctgatgtgtgaggtatatggtactaattaccttttccttgatgtttgccaaatttgaataaaggcattggtacgaaattacagaatgtaaagaaaatgtttttggcttgaaaaattaacatattttatgacgtaccacagtatactctgcccaaaccagcaccctatctatctttcctgttctttacatccctgttccccatccctacttcctcatttttggtataacacagttcttttgtagcatcattataattgcagttctatggcaattggacagttatagcatggaaacagactggtataaatagtacagtagtcaccagtgtgccacatttgcattagtaatgcaaaatatacattttataaaggacaaactttgtgttatgttttattttcattacattgtataatattgtaagactattgtatgtcctaatttgcattataaatgtttttttcctacgtaaaggcataaatatagcaactttgtataaaggtagcttattagatttttaattttttcttttataaaaaattgtccaacagtgggactaccattgccaaattgtatatgaaatatgaattttacccccatggttaatttcttttataaacattccatatttctctaataaaaagacataagtgatactgtactatgcatacattgtatcttaatgctgtttcagatcagcattttaaattttggtttgcatttttaatattggcaaaacgtaaccactgttaattaaaataaaaccttgttgtatatgtaacaacataattttccctctatcccttcccaccctttgttctctatttctccctatcagtgccaacttcatacattttgtagcatggcaataaaatataacttttacactgaggccgagtgtggctttttggaggaagtggggatgggacgattgccctctagttgtcctttgcatatgactgttttttgccatataagccatgtcatcaggcatgaaaagttttctcatatatgatgtaaacttgcttttaaggacaagtgtgaatgtgctttttaagcttaatttttgtcatgacaactaattttttttatctttggagaagtcagagttctttacaatcaaacgtttattaactggagtacttagaataagctagtaattgaatttagttcaagggctaagcaacacatttttaaatccttatttattgtagagtattagtatactgtcctacaaattatgtaaaatatggtttaatattagatgactttggattttgcaatgccttactgttgtcattctagcataaatatccataatgaggtactcaagttgatactggaagctgagctgatcatacactgacctgaagcattcatgaaaagctgctttattgaataaagtctgattggagttcttttcatgctcactttccccttattgctgaaagtagattgcaataaaaccccaataaaacgtttggtcggatatct

SEQ ID NO: 2620 - protein, 508 aa, Homo sapiens
MGSCCSCPDKDTVPDNHRNKFKVINVDDDGNELGSGIMELTDTELILYTRKRDSVKWHYLCLRRYGYDSNLFSFESGRRCQTGQGIFAFKCARAEELFNMLQEIMQNNSINVVEEPVVERNNHQTELEVPRTPRTPTTPGFAAQNLPNGYPRYPSFGDASSHPSSRHPSVGSARLPSVGEESTHPLLVAEEQVHTYVNTTGVQEERKNRTSVHVPLEARVSNAESSTPKEEPSSIEDRDPQILLEPEGVKFVLGPTPVQKQLMEKEKLEQLGRDQVSGSGANNTEWDTGYDSDERRDAPSVNKLVYENINGLSIPSASGVRRGRLTSTSTSDTQNINNSAQRRTALLNYENLPSLPPVWEARKLSRDEDDNLGPKTPSLNGYHNNLDPMHNYVNTENVTVPASAHKIEYSRRRDCTPTVFNFDIRRPSLEHRQLNYIQVDLEGGSDSDNPQTPKTPTTPLPQTPTRRTELYAVIDIERTAAMSNLQKALPRDDGTSRKTRHNSTDLPM

SEQ ID NO: 2621 - DNA, 988 bp, Homo sapiens
aggccttgtaggcacagcggctgagactcgatctgctccaagtaggggctccagcgcgggtcggagtctgggggttcgcgcccgccgacccgcgccctgctccctctcagcacctgggcggacgattgaaggtttgtggcaaccctgtattcagaattctgtatcagtgccatttttccagccagcgtgtgcttacttcatgtctctgggtcacattttgaaatgaccattaagaagtagatgcccagatgcaaaagtgatgaaacagtccatttgtcataaagtaagatgcagctgtggcatgtcaaccagcttggaacaaaattgtatctgtttttctcagaagagaattccacaaggagattttcttctttctaccatcatcaagatcaagcaggcaagtttacttgctgtcatcttctgcaagtgtgggctgtgcatgcctttcttccaagaagtacagtacttccaagaagtgcagaagagttcggggagaagtaacttcacagtggagaaacctgacagccaggtaggttgtcaggggtaacatcaacagtgataagtcatgttgatagtgtgtttcaagggctatgttgtgataaaagtggcactttatctctgtgatcctcctgtccaaatcccatactcccagtctaattatgagaaaagcatcaaattccaagagaggagaggcattctacaaaatactttacaggtgctcctgaaaatggtcaggattatcaaaaacaagaaaaatctgaaaaaccattactgccaagaggatccttaagagacatgatgactaaatgtaatgaagtttgtttttttaaaaaaccacaaaactgagtccctcaagaatttttttaaacctagaagtcacatactttgcaacttttattagattttagatcgcatcccactcttgaatgcatatttccccgggagcaacccatgttttaaaaaatttagtaaaggaggatatcagata

SEQ ID NO: 2622 - protein, 95 aa, Homo sapiens [sequence omitted]

SEQ ID NO: 2623 - DNA, 6837 bp, Homo sapiens
aggccttgtaggcacagcggctgagactcgatctgctccaagtaggggctccagcgcgggtcggagtctgggggttcgcgcccgccgacccgcgccctgctccctctcagcacctgggcggacgattgaaggtttgtggcaaccctgtattcagaattctgtatcagtgccatttttccagccagcgtgtgcttacttcatgtctctgggtcacattttgaaatgaccattaagaagtagatgcccagatgcaaaagtgatgaaacagtccatttgtcataaagtaagatgcagctgtggcatgtcaaccagcttggaacaaaattgtatctgtttttctcagaagagaattccacaaggttaaatcagcaaacaaagaaaacatggtattttgaaatatgattaaactcctgatgctgcagcagaggctaagaatattaatggccagatctagtgcacacatggtcttctgaagaagccatgggtagctgttgtagctgtccagataaagacactgtcccagataaccatcggaacaagtttaaggtcattaatgtggatgatgatgggaatgagttaggttctggcataatggaacttacagacacagaactgattttatacacccgcaaacgtgactcagtaaaatggcactacctctgcctgcgacgctatggctatgactcgaatctcttttcttttgaaagtggtcgaaggtgtcaaactggacaaggaatctttgcctttaagtgtgcccgtgcagaagaattatttaacatgttgcaagagattatgcaaaataatagtataaatgtggtggaagagccagttgtagaaagaaataatcatcagacagaattggaagtccctagaacacctcgaacacctacaactccaggatttgctgctcagaacttacctaatggatatccccgatatccctcatttggagatgcttcatcccatccgtcaagcagacatccttctgtgggaagtgctcgcctgccttcagtaggggaagaatctacacatcctttgcttgtggctgaggaacaagtacatacctatgtcaacactacaggtgtgcaagaagagcggaaaaaccgcacaagtgtgcatgttccattggaggcgagggtttctaacgctgaaagcagcacaccaaaagaagaaccaagtagtattgaggacagggatcctcagattcttcttgaacctgaaggagtcaaatttgttttagggccaacccctgttcaaaagcagttaatggaaaaagagaaactggagcaacttggaagagatcaagttagtggaagtggagcaaataacacagaatgggacactggctatgacagtgatgaacgaagagatgcaccctctgttaacaaactggtgtatgaaaatataaatgggctatctatccctagtgcctcaggggtcaggagaggtcgtctgacatccaccagtacctcagatacccagaatatcaacaactcagctcagagaagaactgcattattaaactatgaaaatctaccatctttgcctcctgtttgggaagcccgcaagctaagtagggatgaagatgacaatttaggaccaaagaccccatctctaaatggctaccataataatctagatccaatgcataactatgtaaatacagagaatgtaacagtgccagcaagtgctcacaaaatagaatattcaaggcgtcgggactgtacaccaacagtctttaactttgatatcagacgcccaagtttagaacacaggcagcttaattacatacaggttgacttggaaggtggcagtgactctgacaaccctcagactccaaaaacgcctacaactccccttccacaaacccctaccaggcgcacagagctgtatgccgtgatagacatcgagagaactgctgctatgtcaaatttgcagaaagcactgccacgagatgatggtacatctaggaaaactagacacaatagtactgatctgcccatgtgagcctggaaagcattgtgttgtttgcacctttgtgaagtttttaaaaatgaagatgcaagtgcttcattttcatttctaaacactaactccttttatagactgataaaatttttttctgaatatttcatgtgcatctttaactaaagggaattaatgtagagcaggtactccttaaagaacactaatttcattatatactactcgttgtacagcagcattcccgttttcacagtgcctatttaaaatgagagttgaagtaaatgacatgctggttgatttttatcaatattctggacttaacgcatacctttcatgtctaagtcatggttggcttttaaaactttttataaagcctcttgacaatgtacattgctaacaggtaactataggctttgaaagtaatgctcgtagattcagtgttcacagtatgtggcctccagcatgtaacatgaggaatcctttatttcattaattaatggctttttgacttgagccaaaacatatgtaaaggaaacagaagtaccgcacctcctcttacaccagtcagctcctttgccttcagtgttactagaaagcggcctgtgtccatgagtgtgctttgctgttggtgcactgaaaggcaggaaggagacaagattttctatttactcatctcatgatgtcatttgaagggcatgtccagatatcttaaaattataataggctcaagaatcagtctcaggtcactttacccaaaaacatttgaaaatctgaaccacaatctcctgaaagtttttctcctatagattgttgacaacacattgttttctggaggcatttgtgccattaggtttccatttatcttcagtttttttctttggtgtttgggatgtcttattttgttgccttatgtccttttcaatttaaaatgtttgagtttgtatatagttttgaaattggattatgtgttcattgttgtttagtttgcatttttgtcaaattatggttttgaaggttcatttggaacttactgttagtctgtaacagggttgcccttgtccagtatttatttataagctgtttacttttcaagttgataaaaacattctccaattctaaatttgcttgtgtccataggtgatctctttagcaaactgagaaaaaaaggaagctacttttaacatgcaaagttccctcaaggtgtaccgtgttgtctctgtgggcactcttccccagcactttagcagtaattcccccagctacacgctgcagttgtactctgcccactctagtgttcctcagctctgctgtccttttacttgtagctggatctttgattatccttcgatttccatgaaatattaatattgttgccagcatagcaggtacagtggaagtcttgtagcagtgagattgtatcataatttaggatttaaaatgaattaaagtttatataaactgaagagtctccatatgtcaaactcttggaaaatcaaagatgttccaatttcctaaacactagagaatacgagagaaggtagagtggaaaaggttaggtaaccttgcaaaatattttactattttctctaaatatgaggaagtttgagattatgatctggatctaccagatataactaaggttaatttagcatgaaaaagttttagtcatattggcatccaacctattcagtaaccgaatcataggacaatgatggattaggagaacaatagagtgggatcattataaagaaaataaattattaaaggtgtctttatcgttttagtgccatttttagtgtctttactataaatcaatatcagtgtattttatcattctatgtgcatagcagaattttcttttctcccttttgttcccctgtgaacttggtgcttattaaagtgctcactgttctcttaaaagagagcagtggtataggtgtgcagtttccatgatgcaggttccatttttaatatattgttccacttatcctttcttctgagtaaattgctaattgtgccaaatttatgtaatagtttttgtaatgtggaataagaattatgatggaaccattgcacatttttttctgaaacagccagtcaaggcagaacattaatctccaaatgcaagggctgatctatttattcattttggaggttgggtactttattctttctttccgtcatccttttcattgtttcccccggattctaattagtttttattttttttagataactccaatataatcattacagtttatgctttaaatactatgtgctttaaaaaggaaaatgggaccaatttgtctgctaagaatttgattttaggtactataagagtattaggaaaatatatacaactggtgttaatttctagatattttctagaaatcacttgtgttcctatttaataaaaggtaatttagaatactacttgtcctttgcagtagtttagtaatgggcattaagctgtgtcctcgaaggatgtacctattactaggtgcattttagaatgaaatattgatattttattagcatataattgtggccatatatctcagattttctgaggcagatctaattttagataattctgttggtagaccatgtgatccttctttttggttttggaaatataatcattgttaatgttttccctccaaatagaatactgttttatccatacaaatcataacagcatctatcccatgctagggttggaaactgatattggtattacttgtgttttttcttagtgtgttttatttcccagtttcatcttcttctaaaaatgaaaatatggtgccttccctccctccaggaagactggcaaatatttccttttatttactgctgctgtggagtgatgagatatgcactttactctttaagattcagcaaaaagcttttcacttctcagtatatccagaatacatcatatctgggacttaggaaaatttgccaagcaatctttgtttttatagatactaatgttgaccctctccagcgttcaatgttataaatagaacaagtcaagctagtgtttatctcctccccctccccaaaactgtggcacagcatataaaaatgtacctcaataatgttctattaaaaatgggacaggggccttatgttttcataatttcccaacaatgtgccgccatatttttgcctcaaggtaaaggttttaacagatgaaaaagtacttcccaattcccccgtgctattcctaacctataatgcccaaatgttttgtgcaatgtgtagtgtgtgtgtataaatacatatattcttgaaatagacataccatcagagacatcattcacaagtaactgatgtattggcatctcattcatatttctgatgtgtgaggtatatggtactaattaccttttccttgatgtttgccaaatttgaataaaggcattggtacgaaattacagaatgtaaagaaaatgtttttggcttgaaaaattaacatattttatgacgtaccacagtatactctgcccaaaccagcaccctatctatctttcctgttctttacatccctgttccccatccctacttcctcatttttggtataacacagttcttttgtagcatcattataattgcagttctatggcaattggacagttatagcatggaaacagactggtataaatagtacagtagtcaccagtgtgccacatttgcattagtaatgcaaaatatacattttataaaggacaaactttgtgttatgttttattttcattacattgtataatattgtaagactattgtatgtcctaatttgcattataaatgtttttttcctacgtaaaggcataaatatagcaactttgtataaaggtagcttattagatttttaattttttcttttataaaaaattgtccaacagtgggactaccattgccaaattgtatatgaaatatgaattttacccccatggttaatttcttttataaacattccatatttctctaataaaaagacataagtgatactgtactatgcatacattgtatcttaatgctgtttcagatcagcattttaaattttggtttgcatttttaatattggcaaaacgtaaccactgttaattaaaataaaaccttgttgtatatgtaacaacataattttccctctatcccttcccaccctttgttctctatttctccctatcagtgccaacttcatacattttgtagcatggcaataaaatataacttttacactgaggccgagtgtggctttttggaggaagtggggatgggacgattgccctctagttgtcctttgcatatgactgttttttgccatataagccatgtcatcaggcatgaaaagttttctcatatatgatgtaaacttgcttttaaggacaagtgtgaatgtgctttttaagcttaatttttgtcatgacaactaattttttttatctttggagaagtcagagttctttacaatcaaacgtttattaactggagtacttagaataagctagtaattgaatttagttcaagggctaagcaacacatttttaaatccttatttattgtagagtattagtatactgtcctacaaattatgtaaaatatggtttaatattagatgactttggattttgcaatgccttactgttgtcattctagcataaatatccataatgaggtactcaagttgatactggaagctgagctgatcatacactgacctgaagcattcatgaaaagctgctttattgaataaagtctgattggagttcttttcatgctcactttccccttattgctgaaagtagattgcaataaaaccccaataaaacgtttggtcggatatct

SEQ ID NO: 2624 - protein, 508 aa, Homo sapiens; identical to SEQ ID NO: 2620

SEQ ID NO: 2625 - DNA, 26447 bp, Mus musculus
ccacacacatacaggcatacaataaaagcaccaaaaagaaaaccagacatctgtccacttctggaggtcttcagtttagccttttattgacacaaaggagaaaggactggatcagtttagcctttgagtccaagaccctgcccaccttcctcccctcagattagcaccaagtgcaggttctcgaaacccttgggcctgagcaggctttcctcttacacaacctttcattttagagggaacttcttaagatgagagacctgaccccggtggcttgggaggagaagagtgagaatggtgggcagctggagccaccccttcctgaggagcagagctgaggcagaagaacgcaggctctcgtcactcagattcatgcccctgcagagctgccatgacagaggggacggggacaggcggggacagggagatgggacaggacagtacaaataaagggcacgtctgggaaagtgaaggaccaagaagctcacccttgccgtgcctagtgacgtgagatgggaggatgggtgtgtggggttcgcgatggccctaaccaaatctcagtgcctcctccctgaactggatctgtcacaagaaccttaaggaagaggcttagggttggacgagaaaaacacagatgtctgtgctgagaactgaaagccacggcccatgcgtgggaagaccacagtagtctccactgatatccagtgactcccagagttattccccctgacggatcggggggctgttagcaggccagctccatgcccactgccccccagccgaggggcctttgtgtctgaggtcaggcctgacactctggccctcagagctcctcatggacccgctcctggtcctcatctgacttcagcttgagctcctcagctgtgatcttgccatcctggttccggtcctggttctgaaacatgtcactgatggttttgtctgggtcttgcccaggcatgaggcgtcctttgccttcattcacttgagccttgatgaaggaagagaactgggggaggggagagcagaggagggtgaggtggtgaggctcatggtcaacagctgcggatggccttgggaaggggccccaggtgctggcccacattgttcccaccccccagcctggtacccagaggatttgggtctgagatggagggtggtaggaggaggacaggctgcatgcacagtgtgcaggagggaatgcatggagctcagcagaggggagcaaagtaggcagccagagggcagtgagcatgctggcttctgggttggggttgtgactgagttcctgacccacctcttctgggggcacctctccatctttattgagatccatgtcttcaaaaaggctagtggaaggatcctggtaccacacaaacaggtagcctgtgggcaggccatcctctcgggataccagctccacctcaaatagcagcacagcactgccagggacaccccgggctggagagatggagggcaaagagaacagaattccagtgaggtttgaagctgagccctaacgcaggcctccgttttctcttatggaaggggcacggggtgtttaaccatcctaaaagtttccctggtcccacccaccagtggccaaggcctgagatggataggggcaaaccatgggaatagacttagaatctgggtctctgtctctcacctccattctccccgtgggccaggtgtgggggcacaatgagctgcctcctctctcctacacacatgccctgcaggcccctgtccagaccttcgatcactttgttggctccgagggtgatctcttgaggggcctcatagtcgtggctgtggggagagtggatttccaggtcagcagcaggggtgactgaaggctcgtctctttcagtatctctatcattctagaatggcagttctcacttcctccagctttacaccctcatttctctgcatttcacacccatagctccccgaggctcagtgagacaggaagtaagagactgtgagacccagagagaggagaagaagcctggcaagctcacccacacctaaacccaccatcagcccagccctggccctgcccaagaacccacgacgagaagagcctggtgccgtccagcagagaacagttgtagtggtagcgaatgaagtccccgattttggatgtctcattgcagttctcaggaggccgggacagcgtcttgatttccacagggtccgaagggttgtggaagtcgatgacgtgcacatcgaagatgagcacagccgagccagggatcttgtctcctgaggccagatggggcacagttagctgagggctctgggtgggggcttctcactatctccgtggggcccaggctggatacctcctcccaatctcaagaaaccatgcgaggtcagatggcatgttccagaatgagtgcttcccactacctacatcttgctgttgaaggaaagggacaaggaacaggaaaacccttttccacccaacaacttgcaggctcccagtaacaccctgccatgagtgatgtgcagtgcattagtgaagagccggaggctcccaaaatctgtaatacaagacctctttgctcagtggggctagactctgtgtccttaactattctgtccccaaactcaggcttgctgtccttgttcactattgggggttggggcctgccttggaggaacagcatagagtctccctggtagggatccagtgggtgaccgagtttaagcttcacatgtttgggcaacaagagggacagcaatctcaggggtacacttcagaggagcataagggtagcctggggaccaaaccctacctgtcccattctccccgtaggcaaggtgagggggcacagtaatcctccttcgctcccctatgcatgcgccttgcagcccctggtccatcccagggatgatgtaaccctgcccgacataggtattgtaggtgtggtttcgggagtagctgtaatacaggggaaagggtggggaggggggtcaaaggggccccaccccttccaggcagttcagagtgcccctcagtctccaccctcccacctcaggacaccccctgacctggaatcaaagagggtaccatccatcaaagagccattgtagtggtaacgcatgaagtcccccgccacagctcgccggacacagccctggggcagctccagcgtctccagctggaccgtgtccttcgggttgtggacatccagcagcaggacatagaagaccagggaggcctgcgggggtatcacagtccctgggggaaggcacagggcttgaaccatacaagtggggagcaagcccaggcacagcaaggggcctcatgcaaaaggaccaactctgttgcctattctcctcctttgggttgtcctcagagccgtcgccaacctgtcaccaacccgtactgagcctctatgtgaatcagaataaagccatcctgtctagggaggggaatttcatctctgcttgcctccctggctggctggctgcccttcgacagtatacaacctgcacacttccatgtggagcctggcttttcctctttcagaggattcccttaccatagcctttctccccataagccaggaagggagggataatgatcttccttttctctccagggcacatgcccagcagcccctggtccatgcctttgatcagccaaccagagccgatgtaggtgtcataagtgcctcccctactgtagctgcagagaataaggcagagatcctgtggttagaagccagagaggcagggcacaccagggctcccttctcttgctcccagttcccagcccttaggacggcccctagcttctacctgttgtcaaaggcagtgccatccagcagagtgccattgtagtgatagcgcacaaagtcactgttctgcaccattcgggggcagtagggagggcgcaggaggatagttgactgcaccgtgtctgctttgttccacacgtccagcaggaccacgtcaaaatagagggtggcatcaggggggatgaggcccgctgtggggaagcagcagaggtggggtttacacaagtccacagcccagctggaggtccccataccactacttagatgtgggactcctactctatctgctgtacctctggctccagctaccctctctcctaaccaagcggtgactcctgtacctctacacaggactctgtatccatccaactcttctcattccagagcaaactgatggccacagctcccaccaatcagatggtgaacagtatgaccttggcctagtcactcagaacctttgagcttcagcatcttgtctatccctgcctcctgcccccatgctcacataccttatacccgtcccctggcctccttacccacaccgatgctgccgtagcccaggtggggaggcacaatgaggcggcggcgctcgttgacacacatgcccatgagaccccggtccatgccggtgatgaggcggcctacgcccacaacgatggccaccagggtgctacggtcatagctggaggaggaaacgggacagataagcatgcatgcagtcacacaatgcccgccgctcagtctcctacacacacaggacacgatgcggacacaggcattcctaactttctcttttttcccctccaactctcttgtctgggctagcccttatgcccctcttaggataacaggctggctgggtatggtagctcacacttttaatcccagcagcctggtggcagaggtgggtagatctctgtgagtttgtgaccagtctggtctaaatagggagttgcaatcagagttacatagagaaaccctgtctaaaaatatatattaatagtaacattaatattaatattaataataggctattagaagaaggaagtcccagaggaggccaggagcatttactccccagcaagagggtggagtggagcagaccgaactgtgtgctacctattgctacttctgatagcatagctcgggacttactgtatgtgaaattaagctcttggcactttgcattcatcatttcactgaatttttctccccgtgggggtgggtattgtggttttcagttttctttcccttttctttattctgatactgggaagagaatctagggtctcccatatatgccaggccagccccaggctgctgagctcgactccagctgttctgtttggctttgcggactcatcacaccaactcaggtcacagctcctctgtttctccttctgagcatcctttctccaaggaagcagaagtgggcgggccccggcgaggcagagaacagccttcctcggaagaaagcccatcctaaacttaccctggcttttgtctgttttcttttttttttttttaaagatttatttatttattatatgtaagtacattgtagctgtcttcagacacgccagaagagggagtcagatctcattatggatggttgtgagccaccatgtggttgctgggatttgaactctggaccttcggaagagcagtcgggtgctcttacccactgagccatctcaccagcccttgtctgttttcacaagtcaagagagagttcttttctttaaaggaaagagagatttgtatatgtgcgtatgtctgtgagtgtgtgcacacctgtgtgtgcacccatgtgtgcatgcagaggcacccaaagggcactggatgtcctcatccatcactctatggctcgtcgttggaggcaggttatctccttgactcagtgtgcacaggatgcccaggttctcatgattgtacacagcaagtgcccttaaccattacactatcgttccagtcactcccatccctgctcttggagtcaggtgtcatttgtagtactagctgtcctggaactttctatgtagccaaggatgaccctaaacttaggttcttcctgcctctgcctcctgggtgctgggattacaactgggatgctggaactacacttccagccccaagaatgggatattaatccttttaaaaagatgtatgtcgggctggaaagatggctcagcggttaagagcactgactgttcttctgaaggtcctgagttcaaatcccagcaaccatatggtggctcacaatcatccgtaatgggatctgactccctcttctggtgtgtctgaaaacagctacagtgtgcttatatataataataattaaatctttgggccggagtgagcagggctagagggagtagggccgaccggagtgagcagaggtcctgaattcaattcccagcaaccacatgatggctcacaaccatctgtacagctacagtgtactcatatacataaaataaataaatattttaaaatatgtatgtgtgtatgtatgtatgtatgtatatgagtgttttgtctgtatgtctctgcaccatgtgcatgccatgtctggtgcctaagaagggcagaagagggagtcagatcccctggaactggagttacagattgttacaagccaccataagagttttcagaacaggggctggtgagatggctcagtgggtaagagcacccgactgctcttccgaaagtccgaagttcaaatcccagcaaccacatggtggcttacaaccattcgtaatgagatctgactccctcttctggagtatctgaggatagctacagtgtacttacatgtaataaataaataaatcttaaaaacaaacaaacaaacaaacaaacaaaaaaaaaaaacaaaaagagttttcagaacaaaaaccaggtcctctgcaagaacaagtggtgagccatctctccaaggctgggagattctattttggttgaagatatccaaggactaaaaaagttttccagtttcaacatttagaaactgtgcccaagacaggcttaagaagtccccaccaggtaagatacccccagctcccatctcactattgctggaaggctgagcatggtggtacacgcctttaatctttttttttttttttttttttttttttttggttttggttttttcaagacagggtttctctgtgtagccctggctgtccctttgtagaccaagctggcctcgaactcagaaatccacctgtctctgcctcccaagtgctgggattaaaggcgtgcaccaccaccacccggcccacacctttaatcttagcttgggagacaggtatgccaatctctgtaaactgggaccagcctgttctacatagtgattctcagggcagccagggcatcctgtctcaaatagggaggctggaggatgtctcagagtttagagcacttgtcacacttggcagaatatgtgagttcaagtcacagcaccaacatggtggctcacagccatccagccctcttctgacttcctccaacatgaggcatgcccccagtatgcatacctacatttaggcaaaagattcatagacataagataaatctcttccaaaggctacttactgggctgtgctcccagctctcttcctcatctgcccacagggcaggctttatgtctggtctatttcctttacagcgctatataaaagccaatggtactggatggtggtggtgcacacctttaatcccagcacttgggggcagaggcaagtggatcttcgtgagttcaaggtcagcatgagtttcctaacagtcagggctacacagagaaaccttgtcatgatccactcctccacccccttaacaaaacaaaacaaaaaaccaatgctgagcacaaagtttctatgagttaaacaccatcagacttatggttgtgccagagtctacgccaattatgtcctgaacccactggaggcctggaggtcctgtggaagtcactgtcattcattgtcaccattcaaacctgaggatgtaggtagtgttcccatcccatgtttcagacaagggaagttaagactcctcctctgtcacagcccgaatttaaacccagggccttacaaatatggagatggcattcttatccactgtaccaaaaaatctccctccagagtcatgaccactaattgcctgtgggctgaactgtctatttcagagaggagaccgaaaggcaacttgtctttgtggtgtagagtttcaagtgtgatagggcctgaagtataccttgtagcctggaaagaggctgccacacagctctgatctgccccccaaaaccaacgggtatctgtctggccgaccaaggtcctggatcagaatggaagatgctggtcccgtcaagccaaggctggcattggagcgtggtgttggctgctaaagctaagatggaggaactgagttcccagaggcttggagaaggaggcactaagagtccccaggatggcatgtcagactttgtgacacgtggacagtttggtcacggcaccagctatggtctacccccaaattataatgcccactctgcttaagaccctccctagctgctctagggccctacaccctcaaggaaatgttatttctccagtctccaaccacaaaggcatagaaaactggagagagaaatagacagggagccagagtgtgtgcaaagggaggcggcaccaggcagaccatccatccactcacttcagggtttacgtgtagtaggcacagtctctttgccctctaagattgcgtgccagggtaccatttgtgtttaagttatggtaagtatatgtggcgcttcacctgagcatcaaatattccagggggctaggagggggtcgtgggcgggggcgggaatattttaggaattgaaaatttggtattgaagataggaggcatcctttgaggtgctctccccaggatgctgtttgtggcaaaggattatgaaagcactacaggaatgcaaaccttagaaggggcaacattctctggaagctcaggaaagtggtgctgagtccgggagtgcccaagctcttacctggagtcaaactttttcccgtcttcgaaagtgccattgtagtggtaacgcacaaaatcccccatctgcacttctcggggacaggcccgagggatgtggtatctctcgatgaccacatcttccaagggggctccggccgggctggcacggcccagtcccctctccaaggtctgtagaagcaacagcaacggcagtatgcggagccgatggagggtgtggctggaggaccccacaaggaacatggtgcccagaccagggacgccggcagtgagagcggacgccagccgctagcctccttccccctcctctcagagctgactcccccccttcctgtcctctctccccaccccgccctggcgggtccacgtggaatgggggctggggagaatgagctggccgggcagggtgatgttttatggtgaactaggaggtgggggccaggttgagagtctctggagtccaaggaatttgccacaaagatctctgagtctccctcccccaaaactccatccgggactgagacccggggcctggcccagagggaggttcgggaaagatgagaagttggagtggacttccaaaatgaaaaagttttttccagagtctctgggtcctaaagcctgttggaggaatctctagctttccctggcaccccaaatctaggccccttctggtgcaggtgaggctgtaatctgagggctatttcagttctacacacacacacacacacacacacacacacacacacacccgccccaactctcctcccgcgaaaggttagaggaaaggggggttagggagaatgttctctaggtgaaaggttgttttgtcctgcaaaagcctggctgcactgaagacacaggaatcttgctccggcgggaggctgatggtgtcagtgctaggtgtgcggggtaacaagaggtgtgtacgcctcgacgtcagcgcgggtgtttaccgggccacctagggggagcagaggagactcgaggagaaaaagaccagattatgtgacttcgtccactttgcctacgcaaaggacagaggtggcacttaaggggggggggggggacgacactgctgtggggaggggctttctgggcgtgaaacgtagccccacccacccgtgtctgccagggagggccagtggtggtgtaagcattgctagtggtcgagggccagcccacgtagtggactcgagcgtcaactgacggtcctagagaggcattccagcctcccggctctagcctagggcccggcgctaagacccagcaggagctccgggggttgggggtgggctgggctggagcccgagctggctggagcccgacggtcgccggctgctccgtaagcctccgggcgcggtgcgggcatggctcgcggggcgtgggggctgctgtggctgctgctgggcagcgccggggcccagtacgagaaatacagcttccgaggattccctccggaggacctgatgccactggccacggcctacggccacgctctggagcaatacgaaggcgaaagctggcgcgagagcgcgcgctacctggaggcggcgctgcggctgcaccggctgctgcgcgacagcgaggccttctgccacgccaactgtagtggccccgccacctctcagcctcggcccgcgtccggcccggacggcgaccacgacggcgatggcgaggactgggctcgcgagctgcggctcttcggtcacgtcctggagcgcgccgcctgcctgcggcgctgcaagaagacgctgcccgcctttcaagtcccttacccaccgcggcagctgctgcgcgacttccagagccgcctgccctatcagtacctgcactacgcgcacttcaaggtgggcgcggccggggccgccgtcgagtttccctagaacgtgaggcccgcggtgcgtccgaggcccccactgacccactccccacgctcctcaccaggcgaaccgactggagaaggcggtggctgcggcctacaccttcctccagaggaaccccaagcacgagctgaccgccaagtatctcaactactacagggggatgctggatattggagatgagtccctcaccgacctggaggcccagccctacgaggtgtggagagagtgggagggatggctagccttggtacaccttcctacaacctcttcacccaacacacacacacacacacacacacacacacacaccttatgagccttcggggtcttcttgactacccccgccatgcacctctccaggctgtgttcctccgggctgtgaaactttacaacagcggggactttcgcagcagcacagaagacatggagcgggccctggctgaatatatgacggtctttgctcggtgtctagctggctgtgagggggcccacgagcaggtagacttcaaggacttctacccagcgatagcaggtatataccattcagaccactgtgaggtatccctcacccacagtgccctggcttcccaggccttctaaggcctcttaatgcgtggctatgtccggtgaccgcattcaacaggtctagcaaagtgctccaaagctacacacgagtcaggccttttctgtctccagtctgatgagagaaatgctggtatacatagcaaattctgggtcagctatatagagaaatagattgcctcaaaaaacaaaagaacagggcacggtggcacaggcctttaatcccagcactcaggaggcagaagtagactgatctctgtgagtccaatgccagcctggtctacagagtgagttcctgggcaactgaagctttatagaccttgtctcgaacaacaacggagatgaggaattgactccaggcaggtgtgtgcagaaagcagggctgggtggaggaaccacagctagtctttggatccgtgaccacaaggcccttcaagggaggtagcggtgaggcagaaagaactattatcaggacccctattctcccagaacacacactctctctctctctctgtctctctctctctctctcatgtcagacagggattcggttacggggcagtaggaaacaagtgcttctttgcctgcacaatatactgtgtgacaagcatttcatacatgttaacccaggaactctggacaaggaaagcaggctccatagcagatcttggtctccaccagggatcagggttagcacacatcgcttcctaacggctgcatccttcctagatctcttcgcagaatccctgcagtgcaaggtggactgtgagaccaatctcacccccaacgtaggtggcttctttgtggacaagtttgtggccaccatgtatcactacctgcagtttgcctactacaaacgtgagcttccgggatgggctgggtaaaggggtgacactagtgggtaggagaggacagtacacggcgggggtggggggatggctcccagaagcatgaaaatgtgcctctcagatgaaagactccggagaaggggaggagaggctaagggtggtggcgacatgggaaggaacccaggcaggtgagaggcctcaagaaagagtcagaggcccctctcggtagactaggtcggcgacactgctcagcactgccccactagcatcatgccaaggacattcctagacccattcttcagattaaactgaggtttctaaaggacaagagactactagccccgtgactagggattcacagggaggtcctgccatcacctggggttaggctgggacaatccagagttcctacaactcagagatgtaacacttcaagggctaagagctgtgagtagaggggccgaggtcagggaccaggaaactcttcctgaagactggcaaagatgctgagggcctgtaattccccccaacagccgtctctctcttcagcagtatcgccacaagcagtttatctaatccccctgtgcttccaatcctttgtctataaaacccaactgattgagagtgtcagtgactcacactgcctggtacgagggcaacacccagggcctgctgggttatgttcgcttgggcggggtgaggagccagcacatattctgagaggcgtctggggggttggtagaggctgtgggtttaggttggaaggtggggtggggtgagtggattgcctttaaaggaaaacatcagggtcaccccttcctctctcctgccttcagtgaatgatgtacgccaggctgcccgcagtgctgctagctacatgctctttgaccccaaggacagcgttatgcagcagaacctggtatattaccgcttccaccgggctcgctggggccttgaagacgaggactttcaaccccgggaggtgggcattggtctcatgtgcagttttgtggtttggtttaaaaaaaaaaaaaaaaatcaaaaaaaccttggcttccttgaaaggctggagaggaaggggaaaaaatgaatatggtctgtggctagagtctaggcttcagcatgtctgggatgtggaagggatgccaataggtgcccacacatgcctgcttccacctcagtactgtcctttgagtccccaccccaccccaccccaccccaccccaaccccaggagtctgttaatgaacgaatgagaaaaccccatgggaggttagagcaaggctggcaaatacggaccccatggtaccatccctgcctcccatgcctgtggcagacattactaatgtattgatgcactcttcctcctggaatccgcagaatccttcttaatccagtgttccgagtagctaggattattctatgagctgatccattttcccctgatccttgagccctgtcttcctgctgtctggcagcagggtccaccttaccctgtccttccctcttcctaggaagctatgctctaccacaaccagacctctgagctccgggagttgctagacttcacacacatgtaccttcagtcagacgatgaggtgagtggcttcctgtgagaggctggaccatgatggggacatgttaggcttttttcctgaggccactgtgtgtgacagctccaggctgtggtgaagcaggagtttcccgatccccatctgtatcccgctgtaccttagtgttcctacggctctttctctgcctgtcccaggcctacaacacttcctggtcccccacctccctgctcaaatgttagctcctctagggagcccttgctggatgtcctggctttcttctgggcctacactggcttccccgcctgcctggccacctggcctgagacctggagttactcatagtcctcgaccattttgccttggccagctgacctcctaaacaactacatcccaggataggagactaaattatccccagctacaacatctggcttttcctcatgctcagaaactgaggttgaaccagtggacgaatgaataaatgaatgatactgtggagagccaattcagagtgagggtttggcagcctgggtatattattattattattattattattattattattattattattaccaagcattggtgttttgcctgcatgtatgcctgtgtgaggatgttggatcccctggaactgcagttacagacagttgtaagctgccgtgtgggtgctcggaattgaactcaggccatctctccatcccatgacctgggcttcttaagggattgctgtgtggtttatttattcagtacttaccttcagtgaacttgggagcagacttcatcgtcacacatggctgccttagatgtttgtcctcccagttctgtcatttgccagccgtttggccttagcgtctccatcttaagtaacatagcaaaaccctgctttttatgagaagaatgccctttgacttttattatggtgacaattaaatgagattatttaaagctcatagtacgtgcagctggcactccgaagatgctcagaacctgcagtgacggtgatgactgtcactctgggtctgctgtttgccagatgtcaggcttgggttgcagtaagtggctgagagaaacagtctcccagaggttctcatgaggggggcacagctacagaggccagcatgggcaccagtgagggtgatgcttgaaggcctcagtctggagtggacatgtggctttggtggaatccacgggcccatccaggtcagggctgccaaggcattcctggcaggagaggaagagccagaagacaaaatgcacagactagcagtgttctcactgggtgtggggctgaaggtggggctgaggtacaggcggtgctgacgctagcaccctgcctgcctctgctggttgagccccaagtgtcactcagggaagcagtttcagaatgggacccagcaggagaaaccctgacatcctgttagatgctgacactggggaggggaggggaggggaggggagggtcatctggggcctgcctgcccaactcccgccaggaccacaccaggaaacctgctaaagtgggtgggggctgaaagatgggggcgggagtagagggtgttctgatctgaaggggagcctatttgcatgtgggtttgctgtgactcagtttctcccccatccccgggctgctctagatggaactggaggagacagaatcactcccagagcctgaagaacctctatctgatgctgagttcgaaggcgagggcgactatgaggaaggtctctatgctgactggtggcaagagccagaagccaagggtgacgaggccgaggccggtcagtactggattgtgccgaagggataggaacacagcttgggatgggcactggggacagggttctctccctgggctatagtgccaggggaatgcaggtgggtgctgtcacccttctcaagggtgcagcctgttagtgatctatgctcctgctagggtggtattcagacacctgttgcaataggcaggactaactcttgctctctctttccttttcagagccagagcctgaactgacataaggcggtgacatggcgcactcttcaagctcaggacacctggctgggggcaagaactatttattaaaacttaaaatagccaggtgtggtggcacacacccttaaccctggcacccgggggaggcagaagcaggcagatctcgggaccagcccagcctacacagtgagatcctggccaggccaggctacataatgagattttgtttcaaaacaaaaacaactgagtgtggcatcacatgcctttaattgcagcagctgggatgcaggggcaggtggattgcggtgagtttcaggctagcctgtagtgagttctaggccagtagaggctctgttgtaagaccctgtctcaaaataaaacaaaaggaaaaaccttaaaagggacacagttgacctagtttccactcagcctccaccttagctctctctctctctcttgtgtctttgaaccgcagactggtagccatattgctggttgggaagtgagctcttgggggtctctgtctccctttctgctcctgcggaagttttcagcttccggcttgagtctcacaggaccaaggccagccaggtggcggttgtgtctgagctgcagagtgggttgtgaagaacattgggcttagagctctgctgctcaataaatgtttattgttgaaatgaatcataacacctgaggccagtctgcaaggtggaggtgtctgggtacaggccctcgcctccctctctctgccaatcttcccttctctgtgtaatgccagttggtgtaccctatggccttggcaggtcctttactcccctgacatctgatagagagctggggatccccgtgagctgtaaggaacctcagacctgccaccagggggcatgaagacacagtattccagggagcctttggaggacggtggtttcgggtttctaatcggggatgtctgtatttttctagtcccaggccactcttcttggtgtttagagggatatgaagaggggattaaagacattcactacacgtttttctttcctggaatttccctagaattagagcatgcattcctagtctggccattgtgggaatgaaccccagctcactagccagagggtgggatagccagaattcacttgtccaaccttgcattggttcggggtgggggtggggcaggagtctggaggagtggggggcaaagatgctgttctagtaactactgcccccactgccattccattgcagagttagggacagaggggcactttcaagtgtcaagaaggtgacagtttgccgggcggtggtgatgcatgcctttaatcccagcacttggaaggcagaggcaggcagatttctgagttcgaggccagcctggtctacaaagtgagttccaggacagcccagggctacacagagaaaccctgtcccaaaaaaccaaaaaaaccaaaaacaaaaacaaaaacaaaaaaaatgaaagaaagaaaaaaaaagaaggtgacagttctgtcttattactctacaccttgacaactcttatggagcagaggcctctacaatgaagattggagctgacccagggaagggcatgacgttctcattaccaccccttgctcccaggtgccagatggccaatcctgggactcacgaacttctgtgtcctagaggactgatgtcccatctgtctctctctctctcctaggctctgctccaagtctattggcctttagaggtagaactgtgttccagataggtagctctcctgtaacctccatctctgttataagagagtctagactggtttcctgacagcttccacgtaccaggatggctctgcctacccttcccatcccaggctgtcgcactgtcagcatctagtggcctacctcctgctccagggagaggctgccctccaggtctggcagcacatgctgcagggagcaggatgtgcttgaacatgtctgcacagatgtgtgctgctgtgagcaccagctctggaatctagactgctgggtgtgggtctgaaaagtgcctgtgggtcagagtgcaaagaagtttgtgtctgtgtctgtgcctaatgtgcatgcacttgtgtgcacaggtgtgagggtgcccagaatctctttcagcgtgtatgtcctgtccatatacatgtgtacccaaatgtgtttggggaaggctccattgatccacacatgtattgagtgcctttcacataccaggcatgctgcaggttgctgggcacaagatcatgagcaaagtaggccaatcatcccgccctctcagaattctgtttcactggaggcaggtggtgagcaatagatcttagataaattgttagtatcccaggactcaggaggcagaagaagtcttaccacaagttccaggccagccagggctacataggaagaccccatctaaaagacaaaaattgaattatgctagatatatcagataagaaaaatagagccggctaagagggatccagaatgctgaagggtctcagatgacgtgtgtaactatgtttgagtatgcatatgaatgtgcatgtgttgtgactgagtgtgcatccaaacatgtgtgtgtgtatgtgtgcttgtgcgcgtgcgtacatgcctattagttacacctaggaatcctgttcaggctcttggccagtccagtatgcctcactcagctcccctttctcagggagctggcagcccctcccatcccattgccaggccagctgactccccaaaccggtgagacagaatcccagccagtctccgcgtgggccctccagcccattctcccagccgcaccctgtccaaatgctctcacctcacctcaccaccccaccagctctcccattctcaacagtatgctgggtggaggtgtgggatgggcaaaacactgggctgtgacctcacccaatcagaccaaactcaagagatgccacaggagtgttctggatccagaaactggatcccacctgtctaaaagcagaactctgtagtgcagggtgcccctcgggtaccagcctggatcattgttaccctcaaaactgctccccttattctgggtgtgctggagttgatgttcagagaagggaaagggaagtgttatgatctgaaggaaggtcaggtggaagggaaaggccctgggcttggggttgtccgctggggccaaggagaagaatgcacccttactgtgtttagcctacgaggaatttgaaaagtgagagtggagaagggaagaggggaagaaaagaaggttggaaagacaaagagaagggaaaggaacagagtcctggtgtcaggcccatgggatggaggtctcatgttgggggccctgggacagacttgttggggtcatgtaggagagcagcttcctaacttctgcgagtgatggtcagcagaagaaagagtcccattagctctcccaaaccccactaacttcccgcctcagcttgaaatattttgagagatggagagatggctcagtggttaagagcaatgactgttcttccagaggtcctgagttcaattcccagcaaccacatagtggcttagaactgtctgtaatgcgatccgatgccctcttctggcgtgtctaaagacatctacagtatattcatataaataaaaaataaattaattaaaaataatttttttagccactcaaatttagtagttgggtgcggtttccacttttatggcattaatgttagtactcacaaacgactgtgatcagatcagccttgaaaagaacacttaagaaggctggagagatggtttaacagttaagagcaccggctgttcttccagaggacctgggtttgattcccagcacccatatggcagttctgtacactgtacctccagttccaggggacctgataccccattttgtcatttgtaggtactacacacatggggtacacagacagacatacttgcacacaaaacacccaaacatataatacaacttttaaatctaaaaatcaaaaaaaagttagaatccttaacgcctcatctgatgttgcctgcctctgagaatagtctttctgggaacaaagaaggggcccttctccatgtcagatggtcctctcaagctggctctggagcaaataactttacctaacaaagatctggtgaccacagggcccagggccatcatccttgtctcctaactctggccttcctccagggcctcttttatagtgtctctccaaggtcagtcctggaaaatggccctgatttcatggatagagaaactgaggccccaagaatctaggctggactccaggtccggacctaactctgatctggactagaacacagctctggctgcttccctttatgatcaagttccaagatgactggggatgcacgggagtctgctgggagccacagcaagcagccccagctgaaacaaaaatcccaggcccaacctatggtctgatcacctcataatcactacctccctgggtctcagctggcgccaaggactcctggatagcatctcttttgtcccctgaaacagcccttggtatagaagcacctattctgcccatgactcaggtggggaaactgaggcaaggttgtgcttacttgcctgccttcctcccacatacatacacttgaccccttgactacctggaagagctctctaaagtcataagaaaagcagaggccaaaggaacttgacattttccatttgaggtcatcacttccatctttcctttaaaaagaaagaaatttaccaggctgggggtctgcctcagagactttgcccatcttgcatggagctcttcagttccattctcagtactgtgtaaaccaggtatgatgatacagaactgtaaagccagcactccagagatagaggcaggagttcaagatcaccctcaactacattgcaacttcaaggccagcctgggctttgcgaaatccctctggagaaagagggacgactgccatgttccttggatgaagtcagaggtgaccatgcctgagttccttctttgccccttaaccacttggctaaattcctagggtcttcctggaggaggaggaggctggtaaggggtgggttcaaccagtccaagtgggaagtctagcttgtctccccggtttgcccaagtgtggagtaggtggggttatttgagggcctcccggtcaacacagaaccattacattgttttgctatctcggaatgagattaggcgctccaccacaggcctagggtcaggcctggaagtcagaagacgcttgtctgatgactttaacctcttgtagcatctccatcactgtgctgtttattgatttttaatgccttggtatcctcaaacatggaagagtctcatggtgttgggagctcctgctcccagacctctcacacactcccatccagctggcttctctccttcactcttatctacagcttggccctgcctcccccccccccatgccctcccccctcactacttccaggttctctgttgggatcataaattatccatgagcggtaagttggctgctgcttcaaccggagctgaagtgctgatgaaatattcaaggacctcgactctcacattccccaggggcctggccctagattctgagtgctgccccaattcctactgagtcactgagaccttggaggtgtgcgtggtggtctctttgcttcatccccgcaccatggctctgtttgctgggtaccgttggtggtgacctagaggaaataaggtccaggtcctggtttagagcccagtagggtgccctaggcatctgcagccatgcagcagccttccaccctggctatctaagcccccaaatgttcctcaagtcttacttcagatgacagaagtgggttgaaaagcgaggttgcttgggacctgacccagtggacaggaaacaaaggttctgtttccaactcttctatgcatttgctgttcatggggcccctctcctggctcaaacctcagttttctcagatgtgcatgagagtgaagatccatttctttctgagaactccgaggtgggaaagaggggtgtgtgtgtatgtgtgtgtgtgtgtgtgtttgtgtgtgtgttcctgcaagcaggtgtgtgtgtgtttgtgtgtgtgttcctgcaagcaggtgtgagcacatgcacaggtgtaagcttgctcaggattgagggcctgcctgtctgtgggaagggctcctgattagcacaggcatttcccagggcttgtggaggggagggtggagggaggggcaggtaggctggcaggctggcagggcaggtggagccccacctgtgtcagcctgtgcttggagtcggtcgcccaagccaggagcaggaagctgggtgactcaggtggcaatgtctcccttgtccctcccttcccccctaaaactactcaagtggggtttgctggaggttgcttccagaagttctcaaaagacccacttcagagcatatccatgttataagcctgtcctgagacttcactggtggggggttggggcagaagggaactagctgttttgggacttcattctagaagggtcatagtagtgggtaagggggacagcccagaatagacattctctaaagagatccagggttcctctgggctgcacttcccccacctctggtatctggccctggcctgtactatttctgtttccctatctctgttttcttgtctccctgttttctttttggcattcgaccccgcccacatgccttgctgcgaagtgtcatgtctgtcgctagagctacctctgtaattaggagccttccttggctgggagcacactcacaggactagctgtgggcagcatctggtctcgaagctgctccagagaaccaagtggcacaaagaaggcatgagtgcacccacccctcctcgagagactcctccagctctagctgaagtgaggactcctccagcaggggatccagagacttccagggtcttcaggctgctagtgtctctacagatctggccttgaaggggtcatgccgaacaagcccctcccccaacatccgtgggcaggggctgaaggacctgcggaggttcacagataggctgcagatcgatatgaatttccgaatatgttaaaaaaaaaacaaaacgcaatcccaacataagagaacccccacagtggccaccaaggccaggaagggctttagaattcttgctctgtcagaacatgatagccccagggagatttgtccccagcttccagcccttgagacatctaccttccctcctgtctttgctcataacacaaagccacctctggctctacacatgcgtgaagacacaggagtttgcgtatccccagttgcatctttccttctccccaactgaacttgtgatttctttgacttaccacccagaagtgccagaaccttggggacagagggctgtagtgaaagattcataggctaagaagccccgatcatgctggacaaggaacaccggggtttcaggtacctggtctgcaaggagtgtgagttcttcgcagccttctcccctagttggccctgggtggagactcaaccccaggaaagttaggacagaaacgaaaagctggagcttttagaggataggactggggacagaaggcctcttcccggggccaaaggatggctctgtacctggaatgataggtaagcatgctcacgacaccattagattttaatagccagggcagaggcccctgcatgattcaaaggtgggtatttcttaggccacctaaggctaaaaggtctttgtatatgtgtctgtgtgtgtgtgtgtgtgtgtgtgtgtgtgtgtgtgtttattctataggtctaaatacagccatccatcagaagagctctccaccgcataaaagctaagttctaacgaagaacagaaacacaggctggagagatggctcagtgcgttgtaaaggtgttttctgtgcctgcctggcaacctgagttgaatctccagagcccacattagaaatgtaaggaattgccacaaagttgtcatatgaccttcacaggcaagctatggcacacccaccaccatcacacatacacgtgataattagaagaagaaagaacagaaactcctcgtctgcttccttatatggcccagaggcctatcaggaggcaagaggaagaaatgacataagcagaggaggcgctctgactgctttggacactatctgattgacggtcacctttgccttaaagaggttcttcaatgaacagtccctcatcttgatcactggcttctgtctctggggagcttgggatgggctagctggtgctctattactcccgactctcaggctccaaagggctgcaaggttgagttaatcagatacgtcttggtggcccaaagatttagtgcctactgagctccaggcaagagaaatgaggctaaactgcagggatacgagttgaagctagacatcagaagaaacccaccgctatcagaaaaaggagacaagggcatttgctataagggagaccgaagaatttcccttttttggagatttgtcaaatatgaaaattcttgcctttaaaggctgggaagcagaaggttgggttggatgcccttgtccctctccttcaagttcaagctgcaaaggagaccaatggtcacagcaatgctcagctctattcctatgtgtctccttccctccaggagaccaaatccccatgcaaaagaactgattccaggaacagctattttctgattcctttatgtatcctcagaagcaggcgaagccctggtgccttggcaggcacatagtaggagattaagaaacacacaggaagtgcatccatctgggaggaactggctctgttttctacattggaacctccacccggggggttttagctttggcctccgcaacgtgctgtggcttgttacatactaagacaagcagtggtgccttctgcggacacacagcgtttattcagaagctccaatccttcctctaattccacctaggcgactctagccttcccctgctgccaattggctgaagtgaggagaaaggcggcagagaaaccttcaaggggtttggaagggatgtgtgactgggtgggaggaatggatgaagatggaacccttgcagaggctgcagcttgggacggtgaagtcttcctgaggcctgggctgatcactgtggagtgtggcaagtaggcaggtgggctcatggatgagatagagataaagatccccaggtaagctagcaggggtgggagtcagggaaacagtggaggggagcggtcctggcaacttgccatgtgcacctacaactggattagggatgctgctatcttcctctcccttccaggaagacttattggcgggaagacaacaagttaggcctcgttcctttctctactgggggaatgtggtcaaagatactgttaggatatcttcatctggaattattttagcccgtaagctctggtgcatgtgtgtgcgtgcctgcgtgtgtgtgtgtgtgtgtgtgtgtttgtgtgtgtgtgtgtgtgtgtgtgcgtgtatgtgtgcgcgctttcaggaagtccttttctaaacagccactcccccaactcccacccacacaagctgtttcctcttgtcactctgtacgctctctgagagttaggatactttaaattttctgtgcagccaaggtctaggctggcacccagcatacagttggtactcagtaccttggttcatgccttgggttcatgttacagccgcaacagcagtcatcaaccacaggaagaaatacccacggctccttaggccacctactgagttcttttggatggctcaacagccttgtctactctgaaggggcttgctgcctcgctttggtttagacctctgctccctttctttccatctaatgtctgattttcccccaaatccgtcaaagtttccttacatcattatttaatctcctttgtctgtttctccctggagcagtatccagcccccccccgccccacccccaaaacacactgacccttctgctctgggacttgaaagaaggtgtcggcccaggcgtggtggcgcacgcctttaatcccagcactcgggaggcagaggcaggtggatttctgggttcgaggccagcctggtctacaaagtgagttccaggatagccagggctatacagagaaactctgtctggaaaaacaaaaacaaaaacaaaaacaaaaaaaaaaaaaaaagaaagaaggtgtcggagtttagagtgtaccatatttcctagtcttgtgatctctttggagcgtagttttaaaatcgcattacattttatttacttttatgtgtgtggcacttgtgccaaggcgggagatcagaggacagaggacaacctgtgagacttggctgttgtctccctccatgaggtatcagactcgggtggtcacatctgcacaactgaggcaccacacaagcccattaaaaatattcttttaacatggatcatttcgatcccactttgaagaccaggctggcctcttaactcacagagatctgcctgcctctgcctcctcgagtgccaccactgcctggctgctccagcactttttaagaactgtctcgaactgagacagtttaaatactgacattcctcagctgtttaagtgctactacaaagcttatttcatttaatctctccaacctaagatagataaagctaatgaacccacttt

SEQ ID NO: 2626 - DNA, 2234 bp, Mus musculus
agggagggccagtggtggtgtaagcattgctagtggtcgagggccagcccacgtagtggactcgagcgtcaactgacggtcctagagaggcattccagcctcccggctctagcctagggcccggcgctaagacccagcaggagctccgggggttgggggtgggctgggctggagcccgagctggctggagcccgacggtcgccggctgctccgtaagcctccgggcgcggtgcgggcatggctcgcggggcgtgggggctgctgtggctgctgctgggcagcgccggggcccagtacgagaaatacagcttccgaggattccctccggaggacctgatgccactggccacggcctacggccacgctctggagcaatacgaaggcgaaagctggcgcgagagcgcgcgctacctggaggcggcgctgcggctgcaccggctgctgcgcgacagcgaggccttctgccacgccaactgtagtggccccgccacctctcagcctcggcccgcgtccggcccggacggcgaccacgacggcgatggcgaggactgggctcgcgagctgcggctcttcggtcacgtcctggagcgcgccgcctgcctgcggcgctgcaagaagacgctgcccgcctttcaagtcccttacccaccgcggcagctgctgcgcgacttccagagccgcctgccctatcagtacctgcactacgcgcacttcaaggcgaaccgactggagaaggcggtggctgcggcctacaccttcctccagaggaaccccaagcacgagctgaccgccaagtatctcaactactacagggggatgctggatattggagatgagtccctcaccgacctggaggcccagccctacgaggctgtgttcctccgggctgtgaaactttacaacagcggggactttcgcagcagcacagaagacatggagcgggccctggctgaatatatgacggtctttgctcggtgtctagctggctgtgagggggcccacgagcaggtagacttcaaggacttctacccagcgatagcagatctcttcgcagaatccctgcagtgcaaggtggactgtgagaccaatctcacccccaacgtaggtggcttctttgtggacaagtttgtggccaccatgtatcactacctgcagtttgcctactacaaactgaatgatgtacgccaggctgcccgcagtgctgctagctacatgctctttgaccccaaggacagcgttatgcagcagaacctggtatattaccgcttccaccgggctcgctggggccttgaagacgaggactttcaaccccgggaggaagctatgctctaccacaaccagacctctgagctccgggagttgctagacttcacacacatgtaccttcagtcagacgatgagatggaactggaggagacagaatcactcccagagcctgaagaacctctatctgatgctgagttcgaaggcgagggcgactatgaggaaggtctctatgctgactggtggcaagagccagaagccaagggtgacgaggccgaggccgagccagagcctgaactgacataaggcggtgacatggcgcactcttcaagctcaggacacctggctgggggcaagaactatttattaaaacttaaaatagccaggtgtggtggcacacacccttaaccctggcacccgggggaggcagaagcaggcagatctcgggaccagcccagcctacacagtgagatcctggccaggccaggctacataatgagattttgtttcaaaacaaaaacaactgagtgtggcatcacatgcctttaattgcagcagctgggatgcaggggcaggtggattgcggtgagtttcaggctagcctgtagtgagttctaggccagtagaggctctgttgtaagaccctgtctcaaaataaaacaaaaggaaaaaccttaaaagggacacagttgacctagtttccactcagcctccaccttagctctctctctctctcttgtgtctttgaaccgcagactggtagccatattgctggttgggaagtgagctcttgggggtctctgtctccctttctgctcctgcggaagttttcagcttccggcttgagtctcacaggaccaaggccagccaggtggcggttgtgtctgagctgcagagtgggttgtgaagaacattgggcttagagctctgctgctcaataaatgtttattgttgaaatgaatcataacacc

SEQ ID NO: 2627 - protein, 437 aa, Mus musculus
MRAWGLLWLLLGSAGAQYEKYSFRGFPPEDLMPLATAYGHALEQYEGESWRESARYLEAALRLHRLLRDSEAFCHANCSGPATSQPRPASGPDGDHDGDGEDWARELRLFGHVLERAACLRRCKKTLPAFQVPYPPRQLLRDFQSRLPYQYLHYAHFKANRLEKAVAAAYTFLQRNPKHELTAKYLNYYRGMLDIGDESLTDLEAQPYEAVFLRAVKLYNSGDFRSSTEDMERAEYMTVFARCLAGCEGAHEQVDFKDFYPAIADLFAESLQCKVDCETNLTPNVGGFFVDKFVATMYHYLQFAYYKLNDVRQAARSAASYMLFDPKDSVMQQNLVYYRFHRARWGLEDEDFQPREEAMLYHNQTSELRELLDFTHMYLQSDDEMELEETESLPEPEEPLSDAEFEGEGDYEEGADWWQEPEAKGDEAEAEPEPELT

SEQ ID NO: 2628 - DNA, 30690 bp, Homo sapiens
  misc_feature (1)...(30690): n = A, C, G or T/U
cacggtagaggtctgtgctgtggattttcatctagggtggtgggaacaccagagatgtctcctctgccattgttttagttggctcctggacctcatcccagcagagggagggtgactgtcagcaggtcagtcccaccgccactgtccccctcgcagtgggcctctgtgtctcaggcctggccaggctccctgcccctcagagctcctcgtggacccgctcctcgtcctcatctgacttcagcttgagctcgtcgactgtgatcttgccgtcctggttgcggtcctggttctggaacatgtctcctatggttttctcagggtcctgcccaggcatgaggcgtcctttgccctcactcacttgagccttgatgaaggtggagaactggggcaggggagagccgggggagcgggcagtgagggtcatggccttgggaggggcaggggccccgggtggaggccagtgagtgctttctttttcttcttttttcccaggctcccccgcaccctgtaactcaggaagggctgggaaaggcactggtgctggggtcctggtgggggctggggtggaggcgtggcatggggatagtctgtgactggtctcaggtagggaacagcctgcatgtgtgcccaggaaaaagcagggacaaggagcctgaggcgtgggactcagcgcaggcaggagcaccagggcgggtgggcagtccggacgggggacgtcttcttcctcgatgcttcctgggtgcggggattgcgtgggcatggctattaggactgaaccttcacccacctcctccggagggacctcgccatccttgttgaggtccatgtcttcaaacaggttggcaggagggtccttgtgccacacaaacaggtagcctgtgggcagcccatcctcccgggacaccagctccacctcaaacagcagcacagcactgcctgggactccccgggctggagggagggcaggagagaagggaggggtcctagtcaggccagggtctgggcctggcttcactgtttcccagcccacaggccagtttcccctcctggggctgggctggagagtggggcatgggatgtttaaggagccatcctgaaggcattcctgactcctcccaccagtcatcagacccacagtgggcaggagcaaaagggacagatgccagtcagattacggtctcgggccgagcgcagtggctcatgattataatcccagcactttgggaggccaaggcgggtggatcacctgaggtcaggagttcaagaccagcctgaccaacatggcaaaaccctgtctctactaaaaatacaaaaattagctgggcacggtggcaggtgcctgtaatcccagctactcgggaggctgaggcaggagaatcacttgaacctgggaagtggaggttgcagtgagctgagagcacaccactgcactccagcctgggtgacagagtcagactccatctcaaaaaaaaaaaaaaaaaaaaaaaaaaaaggattatggtctcagcccctcacctccactctccccgtgggccaggtgcgggggcacgatgagctgccgcctctctcccacacacatgccctgcaggcccgtgtccaggccttcgatcaccttgttggccccgagagtcgcctcctggggggccccgtagtcatgcctgggggagagcagatgcccaggtcagcagccaccctgtcccctgccagcgcacacccctctccctctgaggtgggcccagaacaagccctcagttccggagttactcccactggtgacttgggccacgcagcagagtgcaggggcccagctgtgcagacgtggggttcccttctcatcttgcctctgccccctaaagtgtggcctcgagggctcatggctccctgcgtcagtttcccctctgtgaaatagaaagagcagttctcccccaactgttggcttcaccttcccttcccctgcgaagcagagaatttcatctcctcgacatgctccgagatggggacttacagaaagcagcaagaggttgaatgctcccctggcgctcgaggaccaagagggaggagcaggcgtcgggggtgcactgaggaggactccccatgcctgtgcccacccacctgcccagtcccggcccccccccggacccacgaggtgaacagctgggtgccgtccagcaaagaacagttgtaatggtatcgaacaaagtccccaagcttggtggtctcattgcaggtctcagatggccgggacagtgtcctgatttccaccacatccgcagggttgtggaagtcaatgacatggacgttgaagattagcacggcagagccagggatcttgtctcctgaggccagaatgggggagtgtggtcagctcagagcactaggagaggctacttgaggtctctccatggaggtccccagacctgataccccttcccgaccctgaggatccaaaggaggatgggacgggatgtttgtccagagtcaattctaacaaactttcactggggcagggggcaggggaaggcagctttccagtaagaaagcccttttccactcaccgtcttgcaaactcccagtaacttaccctgcggatcagcatggcttgcccacttgacaggtgaggacactgaggctcccagcacagctgggtcctgggggtatgctggttctgtttttccataaccaccctccctccccaaacttggctgcccttctccactgcggaaggggcgaagtggggcgctgccctggaggaaaccgatggagtctgtgtggcaggaatcagatggggtgaccagatgtaagctgcatgcatgtttttgtgatgagaggggccgagcggtgcctggaatcccactgtgggagggggtggcctagacacaatgggcagttcggaggaggagctgaggtggtggctggggaacgcccctaccagttccattctccccataggcgaggtgcggggggatggtaattctccggcgttcccccatgcaggcaccctgcagcccctggtccatcccggggatgatgtaaccctgcccgatataggtattgtaggtgtggttgcgggagtagctgcaatacaaggcgggagggccaggaagggagtcaaaggggccctccccttccaggcagctcagagtgacccccagcttcgtccacgtttcacccagcccccgccctcccacctcaagaccctcctgacctggaatcgaagagggtgccgtccatcaaggagccattgtagtggtagcgcatgaagtccccggccccggctctgcggacacagccgggggggagctccagcgtctctagctggacagcgtccttcgggttgtgcacgtcaatcaggaggacgtgaaagaccagcgaggcctgtggggggatcactgtccctggggaagggatagggcttgaaccataaaattggggagcaagccgaggctccttcttgactcaggaaggcccagtgggcaccatgcaagacactagccccactctccagagccctttcccgcccatcagcagccctgcttcttgctcctccagtaagacctgagctgggttttccccagggccaccaccggctcatactgagccttcgtgtgaatcagaataaagcaccccttctttttttttttttttttttgagacagagtctcgctctgtcacccaggctggagtgcagtggcgcgatctcggctcactgcaagctccgcctcccgggttcacgtcattttcctgcctcagcctctccgagtagctgggactacaggcgcccccaccacgcccggctaatttttttgtatttttagtagagacggggtttcaccgtggtctcgatctcctgacctcgtgatcctcccgccttggcttcccaaagtgctgggattacaagcgtgagccaccacgcccggccaaagcaccccttcttagtagcaccaagggtagatttcatcccaccttgagtccttggttggatgccctcgtgcagtatacaacctgagcaactgtatgtggaggcctggtttttccctcttctgcggaatttccccttgtgtccttgcccaccctcaccatagcctttctcgccataggccaggaatggagggatgataatcttccttctctctccaggacacatgcccagcagcccctggtccatgcccttgatcagccaaccagagccgacgtaggtgtcataagtgccgcccttactgtagctgcagaaaatgaggtggaggtgggagaggcaggctgggccccggattcccgctccccatgccacagtccccagtgcctcagggctcccctccagcccctcacctggtgtcgaaggaggtgccgtccagcagggtgccattgtagtggtagcggacaaagtcgccgtcctggaccatgcgggggcagtggggcgggcgcagcaatgtgctcacctgcacggtgtcttccttgttccacacatccagcagaaccacatcgaagtagagggtggcatccggtggaatgagccccgctgtgagagcgcagcagcgtggaggtctcagagttctgctctgccaaccacgatcccagccagggccctgttattccccttcctctcatcccagcaccaagagacccaaaccagggacagagatgccactatttttgttttttttttttaagagatagggggccagacacagtggctcatgcctgttatcccagcactgtgggaggccaaggcaggtggatggcttgagcccaggagttcaagaccagcctgcgcaacatggcgaaaccccatctctactaaaaatacaaaaaattagccacgtgtggtggtgtgcacctgtagtcccagctatttgggaggctgagagggaggactgcttgagcccaggaggctgaggttgcagtgagccgagatcgcaccactaaactccagcctgtgcaacagagtgagatgctgtctcaaaaaaaaaaagaaaaagaaaaaaagaggggttttgctctgtcacacagggtggaattcagtggcatgatcatggctcactgcagcctcccggggtcaagcaatcctcccacctgagccttctgagtagttgggactacaggcacacaccaccacacctggataatttattttattttttgtagagacgaggtctcactatgttgcctaggctggtctggaactcctgggttcaagcaatcctcccacctcggcctcccaaagctctgggaccatatatgtcagctactgccccagccagagctgccactcttcatactgcgtgcacagtgtgacattgggcaagtcactcctcatctccgcacttcagttttctcaccccaggatccctgattctgcctcgtggtctcctccacccccggcctgtgccccagcccttctcacccaggccgatgctcccatagcccaggtggggaggcacaatgaggcgtcgccgctcgttgacacacatgcccatgaggcctcggtccatgccagtgatgaggcgccccacacccaccacgatggccaccaaggtgttgcgatcatagctggggggggagggacagatgggatacagtgacctcagacacacacacactgcccatggtggcacagatgcacaggtgtgcctgcacacacgcacacaatcccccctccctatagccaggtgtggatacgcacacacacttctcacctccttttcaagtccccctcctaggtcggccgtgacgcccaccttaagagaacggactgttgtgaaaggcaagtccctgaggaggacaagggctgctactgccctgggacggggttgggtgggatgcccgggcctgatggctgctactatttgctgacagcaagtggggagtggtacgtacagcacggaggggcagaggagcattactatatgggattaaatgcttggcattttacattccgtatcttctttgtctcccctgtgaggtgggcattcttgttctcatttttcttaatgagagcaatggagacttgagagactcagtgccttgcccaaggtcacacagctaatatgtagtcagctgagttctaaaatttgccattatactattggctctccaagaaaagacgggagagcagaggtggggtgggagctggtttcacattttgaaaaggcctattctacaatcctggctaacacagtgaaaccccgtctttactaaaaatacaaaacattagccaggtgtggtggcgggcgcctgtagtcccagttactcaggaggctgaggcaggagaatggcgtgaacccgggaggcggaggttgcaatgagccgaaatcgtgccactggactccagcctggcgacagagtgagactccctctcaaaaaaaaaaaaaaaaaaaaaagcctattctaaaagtgccatggcttttgtttgtttttagttatacacttttaattaatgtatttatttttacttatacatatgtatttttggagatggagtctcggctctgtcacccaggctggagtgcagtggtgcaatcagctcactgcaacctccacctcccgggtttaagcgattctcctgcctcagcctccgaagtagcagctgggatcacaggcatgcaccaccatatctggctaatttttgtatttttagtagagagggctttcgccatgttgcccaggctggtcactcttggcctcaagtgatctgcctgcctgggcctcccaaagtgctgggattacaggagtgagccactgtgcccagccaattatatacacttttaatttattttaagttttcagaagtaaagtgaggatgggagatttttttttttttaattgaaggggccatgggttaagaaagttttctggccgagcgcagtggctcacgcctgtaatcccagcactttgggaggccgaggcgggcagatcatgaggtcaggagatggagaccaccctggctaacatggtgaaaccccgtctctactaaaaatacaaaaaaaattgtggaggcgcctgtagtcccagctaatcgggaggctgaggcaggagaatggtgtgaacccaggaggcggagcttgcagtgagcagagatcgcgctactgcactccagcctgggggacagagcaagactctgtctcaaaaaaaaaaaaagttttctaagttgtgtgggcgcgggggctcacgcctgtaattctagcactttgggaggctgaggagggtggattgcctgagctcagaagtttgtgaccagcctgagcaacatggtgaaacgccatctctactaaaatatgaaaaattaaggctgggcgccgtggcttacgcctgtaatcccagcactttgggaggccgaggtgggcggatcacgaggctggggtggcatgtctgactgtgtgacacgtagacagacagggcctccgcagggagccatgccctacccccaggtccagctggctgtcttcttataatacccacccgcctttttcaagaccagtctggccaacatagtgaaacccctctctactaaaaatacaaaaaaattagccgggtgtggtggtgtgcacctgtaatcccagctactcgggaggctgaggcaggagaatcacgtgaacctgggaggcagaggcggaggttgcagtgagttgagattgctccattgcactccagcccaggcaacagtgtgagactgtgtctcaaaaaacaaaaacaaacaaacaaacaaaaattagctgggcgtggtggcatgcgcctgtaatcacagctacttgggaggctgaagcaggagaattgcttgaacccaggaggttgcagtgagctgagatggcaccactgcactccagcctgggcgacagagtgagcctccagctaaaaaacaaaaagttttccaagctcaacactcatgagctgggctcccagagtccccatcagggatgacatcccctaaatcccaacccctgcctcactcctagcagtcaagggctcagggctgcacttctggctactaccctatatctgaatttgcccaccaagcagacaggttttaagtctggactgtttccttctcagtgttgttatgaaggcttaagctctgcattaagtttctacaagttccacagcatcaggtcatatggttttcctcagggtcaatgttaatgtgtgctgaactggctggaggactgccaggccctgtgagaagcctacgttcattcatccatgtccttggagtcctaacatcagccttagcaagtaggtcctgtttttgtctccacttttcagataaggaaagtgatgcctaaagagacaaaattctctgtccatggtcatagcctggatttgaaccagggtcttgggactcttggagtttgtaggcttaccccaatatatgcctgcctctaaagtcatggccactaatttcctgtgggctgagttgtgtgtttcagaggagggtctaagaaacactgacttctttcagtgtgctgtggggtctgtgtgtaactgggaccctagatttacccctgaggctggcatacagccctgccctgtccccgctaacaaaagtggacttgctggggcagaccaaaggcctgggtcagaccaggaggccaccttacaaaccccaaggctggcaaaaatgggcggcctgtgcctctggcctggtgtacctaaaatggagagagatgagggttccaggagaaccagagagggaggaatgaaattcctccaaggagcccagggtggcatgtccgactgtgtgacacgtagacagggcctccgcagggagccacgcgctacccccaggtccagccggctgtcttcttataatacccaccagcctttttccctgcccaccagccgctgaaaactcccaccccctccaaaaaaaagttctattccctcttctctgaccacaaaggcactgaaaacagtggaaccagaaggggagtcagggtgggtggaaaggtacggggtccaggctgatagaccatcccagggttcttaagcagcagggaccacccccttccccccaacactgtagatcagaacacccctctccatcaggtcattacatacagccctggtaactacacaaggcagttcaccttgattatcgagtcctttccgggatgtggagagcttgtgagaaagaaatgggatcctttgagaagtgagggtttggaagtgggggcaggagggtatctttggggagatgggtgtctgggaggccccaggggtgctgtctagggttagagtattgggatgcagagcttaaaagaggcaacaaggaaacaggaccccgggttcaggggacggagtggtgaatccgggggcgcccaaccggggttaccttgaatcaaacttcttgccatcttcaaaagtgccgttgtagtggtagcgcacaaaatcccccatctgcacttcccggggacaggccctggggatgtggtacctctcgatgaccacatcttccagggggcccccggccgggctggcgcggcccagccccctccccacggcctgcaccaccagtagcagcaactgcagcagggggagccggaggaggctgtggctgggggggcccgcggggaacatggtgcctggagttgggaccgccggcagtgagggcgagcgagggagtcgccaccaacctccttccccccgcctcccagaactggctccccctcttcctgtcctctttccctacccccgccctggctggtccacgtggaatgggggctgggaagactgagctggcctggccgggaggagcgggggagggggttgcaataggaggagggggccaggctgagtgtgttagagtctgagggaggcactacaaagaactctaggttccccctccccccatctccatccctggctgcgagacctggggcctggccagggagagaggctcgggaaagatgagaactctgagtggacaccaaaggaaaaaaaaaaaaaaaagttcaatgactttttccggagcccccgggtcctaaagccgggcggagatgaaccttgcttctttcgcgggcacttcgaattctagtcccctccaggtgggtggtgaagccgcggagtgtgagaggcatctccgtgctcatccgtgaccccagctgtactccaagggaaggcatctccagggaagagcagcttggtcccgcaaaagctggactgaaagaaggactttgtgacttgggatgtgacgggcacggagatggagtggggggtggtggcagcgcaaggtgtgcaggtgacagcaggtgtgtgcctccgacgtgggcgggggagacactcggagggtgcaggagggcgcagcgacggaaggcccggctccagggcttccttctcgtatgggcagcgcagaggaggcggccctcactcagtgtcctgatctcaggcgggggcactgtttgcatggggaggggcttcctgggcttcccatctctggcgggaagcgctccccgacgcattctctacctaggggacacccccaaggcaggagcccgggccgacggagaggacttaacgacactatcggaccctctgggaaaagaggggagacgtcgtgacccaggccccgccccaccttgccgcctcgtgcccggcgctaagacccagcgggcgcgccgcccgcccggggcccggccctgtccccttccgtccgcggggcagccagctcagctccggagagccggcggcgcggcgggcatggctcgggtggcgtgggggctgctgtggttgctgctgggcagcgccggggcgcagtacgagaagtacagcttccggggcttcccgcccgaggacctgatgccgctggccgcggcgtacgggcacgctctggagcagtacgagggagagagctggcgcgagagcgcgcgctacctggaggcggcgctgcggctgcaccggctcctgcgcgacagcgaggccttctgccacgccaactgcagcggccccgcgcccgcggccaagcccgatcccgacggcggccgcgcagacgagtgggcctgcgagctgcggctcttcggccgcgtcctggagcgagccgcctgcctgcggcgctgcaagcggacgctgcccgccttccaggtgccctacccgccgcggcagctgctgcgtgacttccagagccgcctgccctaccagtacctgcactacgcgctgttcaaggtgggagcccgcccccacccggggacctgtctcgggctgggcgtcgtggctccccacagatcggtcgaaggagcgttatcttcacccaaggcacgaagcccgccgtgcgctcggggccgcgagctccggtcttgctgacccgctcccccaccccctaccccccgaccaggctaaccggctggagaaggcggtggcggcggcctacaccttcctccagaggaacccgaagcacgagctgaccgccaagtatctcaactactatcaggggatgctggacgtcgccgacgagtccctcacggacctagaggcccagccctacgaggtggggtggagggtcaggaggaggcttgtagaggagggctagtagaggaggggagatgttgggggcgccctgactccccctgccacgccccttccaggccgtgttcctccgggctgtgaagctctacaacagcggggatttccgcagcagcacggaggacatggagcgggccttgtcagagtacctggcagtctttgcccggtgcctggccggctgtgaaggggcccatgagcaggtggacttcaaggacttctacccggccatagcaggtatctgccacccagaccacggtgggcggtcctctcacccacagggcccggtaaggcagatgtccccttcatgcacgtggagcactgcgaatgcggaggagccagccgggaggaaggccttgtctgttgagaaagacgctgggtgcaggggccccagctgggagtgtccaaggggctggatcagtgagtagaggcagtgacatccctaaagggtttgggaagcttgggttcataggccttccaggcagagggcagtgcagatgcaaaggtgcagcggtgagaagtaacccagcagatgtgtgcagaaagcagttgataaccagaaattacacctagtcttgggatctctaaccctggggtccctcgagcaggggcagaaaggactgtacttggccaggtgtggtggctcacacctgtaatctcagcactctgggaggccgaggcaggcagatcacgaggtcaggagttcaagaccagcctgaccaacatggtgaaaccccgtctctactgaaagtacaaaaattagctggtcgtggtggcgggcacctgtaatcccagctactcgggaggctgaggcaggagaatcgcttgaacctgggaggcggaggttgcattgagcccagatcgcgccactgcactccagcctggtcgacagggcgagactctgtctcaaaaaaaaaaaaaaaaaaaaaagactgtcctttagcttctctgtttggacttctgccccatttctggacctcacctgctgctctcccagaatgccctggctccctctggcttggggtggtggttgagtggcaggggtggtgagtcagcccagcccacagtcatcttcctcaccatcacttgtcatatagtatgccaagcactttacagacattctctcctgtgattgcaacagcaacacattttctggacaagcagcttggcttagtaggcagagattggatttagagtcttctccactggggggacggagatgttcattgcaatgccagcctctcactgctgcctcccaccctcagatctctttgcagagtccctgcagtgcaaggtggactgtgaggccaatttgacccccaatgtgggtggctacttcgtggacaagttcgtggccaccatgtaccactacctgcagtttgcctactataagtgtgagccccctgggtgggctggcttgggcaggggacgaggtgataagggagaggactgtatgggagcctcccagagttgtggggagctttccttcagtattgaggaccctgggtgataggaggaaagtctaggggtggtgggaatatggggaaggcaccctgggagtctggggcaggtgagaggcttctgagtgagaacagacagcagcctcagggagaagaagagggtcttttgggcaaatgactagacaaccaacaactgcagagcacttgacagtttatttttatttttgaaacggagtttcactcttgcccaggctagagtgcaggggcacgatctcggctcactgcaaccgctgcctcccggattcaagtgattctcttagcctcctgagtagctgggattataggtgcctgccaccacacccagctagtttttgtatttttagtagagacggggtttcaccatgttggccaggctggtcttgaactcctgacctcaggtgatccactgcctcagcctcccaaagtgctgggattataggcatgagccaccatgaccggccaacacttgagagtttataagtcactttatcttatgtggtcctttcaccaacaccatgcagctggcattactggaccgatttttcagatggggaaactgaggcttatagggcaaggggctgttggtcttatgactaataaaaagtggcaccaggacttgtggctctcctcactggagagatcctggcatccactggggctggaatggacagcctccagtgttcctgcagctcggagatgccaagattcagacagagccaggagtcagagcagaggggctgagaacccaggggccaggagacccttcctgggtacacatagcagagaggctaagggcctctaattcactagagccatcattctccagctgtgtgagcttgagcaatttatctaacctctctgtgactcagatttcttgactgtaaaatggggatgacagtaataggtaggcatggctgggcacggtggttcacacttgtaatcccagcactttgggaggcccaggcaggcagatggcttgagcccaggagttcgagaccaacctgggcaacatgacaagaccccgtgtctacaaaaaatacaaaaagttagccaggcatggtggcgcgtgcctgtagtcccagctactggggagactgaggtgggaggattgcttgagcccaggaggcagaggctgtagtgagccgagatcacaccactgcactccaacctgggtgacagaacaagaccctgtctcaaaacaaacaaaaacatacaaaaaattagatgggtgtggtggtgcctgcttgtaatcccagctactcaggaggctgaggtgagaggatcacctaagcctgggagatcaagcttgaggtgaccataattgcaccactgcactctagccagggtgatagagtgagaccctgtttcaaaaacaataaaaagacaataacagtgaggcttagatgagttagtcagggcctggcatagggtaagtgcccactacatgctagctggcattatgcttgggtgggataaggagcccattaggtattctgggaggtggctgggtagcaggggtgctggactgaactggaagatggagttgactctgaaggggaagtgccagagcaattcctcacccctgtcctgctgcagtgaatgatgtgcgccaggctgcccgcagcgccgccagctacatgctcttcgaccccaaggacagcgtcatgcagcagaacctggtgtattaccggttccaccgggctcgctggggcctggaagaggaggacttccagccccgggaggtgggcactgctttctggggcacttgctggatatgcactttgtaaaaaatgaactcctggcggccgggcgcggtggctcatgcctgtaatcccagcactttgggaggctgaggcgggtggatcacgaggtcaggagatcaggaccatcctggctaacacggtgaaaccccgtctctactgaaaagaaaaaaaaattagccaggcatggtggtggacgcctgtagtaccaactactcgggaagctgaggcaggagaatggcgtgaacctgggaggcagagcttgcagtgagcggagatcgcgccactgcactccagtctgggtgacagagcgagactccgtctcaaaagaaaaataaataaataaataataaaaaataaactcctggcttccatggaaggcaggatgggaaatggaaagaaagaatatgagttgaggttagagtcctggcttcagagcccagccccactgctgtgtggtcctgggaagaccatggccctttcctaatctattgcctcacctgcaaaatggcagtgatactgccacctcaccagcagtgtccagacgagggaggtatgaaggtacacatccactcctacctgctcccctccctaccttcattaccctcactgctgacctttgtccctctttcccaggaacaccctaggtaaccaatggaggaaatctgttggagttgagggccaggctggcaaatatggggcacatggtgccactcctgccttccttgtcagtggcagacattgctaatcgattgagggactctttgtcaccaaactctcagaatccttaacccagtgttccaagcagccacgatgatctgatgagcttgtgagctgatacctattctctgatccttgagctagaagagggccagtgggcccagatcctaggagccctggcttcttgccatctggcaacagggtatggctcaccccccaccccgtccttccctccttccaggaggccatgctctaccacaaccagaccgccgagctgcgggagctgctggagttcacccacatgtacctgcagtcagatgatgaggtgagtgcctcctgctttccaggattgggctgtgatggggacaccttggaccttttcctggggccaccagtgtgccagaattcagccccagcccctggtggtcagctgtcgtgaagaagagaggtttgcctgttccttgtctagactgtccgttccttccccagccttagtattctcatgtcctccttttgtacatgtctcaatcctgttcctcccaggcccagctcacatggtgcctcctccaggaagcccttgctgcatgccctggctctttgttctgggctagcagtgcccactctgacctgtgtgcctccctggccacctgtggcctggacctgggtgattgcagccctcgtccatctcagccctgggccccttctccagccagtatccaggagaaccgcactgcaggacacagggccacattattccctgttctcccacatcctgcacagagcctgggctcagaaactgagtttgaatgaaccagtgaatgaatgaatgcaggacctcaggacagaaggaccgtattgtattacattgatttattttatttatttatttattttttttttttgagatggagtctcgctctgccgcccaggctggagtgcagtggtgtcatctcagctcactgaaacctctgcctcccgggttcacacgatgctcctgcctcagcctccggagtagctgggattacaggcgtgcaccaccacgcctggctaatttttgtatttttagtagagacagtgtttcaccatgttggtcaggctggtctcgacctcgtgacctcatgatctatctgcctcggtctcccaaagtgctgggattacaggcgtgagcagccgcacccggccctattaacattgatttcaagtgagggtttgacagccttaatttctctgaggtgttgctgctcagtgctcatttatgtatcctctcctttgttcatgcccccacgcccccacccatccaaccccagaggaggagggcagaatctacaccgtcagcacccaggatgaggaactagccagacctggctccattacttaccagttgggtggcctccaaacaagtgtcaggcaacctctcaagcttctgtttcttcatccattgaatggggagaatcatgcccatctcacattgttgtggtgagaataacacaagatctggccgggtatggtagctcatgcctgtaatcccagcaatttgggaggccgaggcagagggatcacctgagatcaggagttcaagacgagcctggccaacatagtgaaaccctgtctctattaaaaatacaaaaattactcaggtgtggtggtgggcacctgtaatcccagctactggggaggctgaggcannnnnnnnnnnnnnnnnnnnnnnnnnnnnnnnnnnnnnnnnnnnnnnnnnnnagaggcggaggttgcagtgagctgagatcacgccactgtactccagcctgggtgacagattgagactctgtctcgaaaaaagagaaagaattaagtgagatcaagtatgtttttttgtttgtttgtttttgagacagagtctcgctctgtcgcccatgctggagtgcagtggcgtgatctcagctcactgcaagctccgcctcccaggttctcacgccattctcctacctcagcctcccaagtagctgggaccacaggcgcctgccaccacgcccggctaattttttttgtatatttagtagagatggggtttcactatgttaccccgtatggtctcgatctcctgaccttgtgatccacccacctcggcctcccagagtgctgggattacaggtgtgagccaccacacccggcctcaagtatgcatttttcttttttttttcttggagacagaatctcactctgtcacccaggctggagtgcagtggtgcgatctctgctcactgcaacctccacctcttgggttgaagagatcctcctgtctcagcctccgagtagctgggattacagtcatgcgccaccatgtccagccaattttattttgtatttgtagtagagacagggtttcaccacgttggccaggctggtctcaaactcctgacctcaagtggtccgcttgcctcggcctcccaaagtgctaggtttacaggcgtgagccaccgctcctggctgagatcaagtatgtaaagcacttgataaagagccagtacctggtaggtgcacagtgaatgacagccgagtctcactctgtcatccaggctggagtgcagtggtgcagtctcagctcattgcaacttccgcctcccaggttcaagcgattctcctgcctcagcctcctgagtagctgggattacaggcgtgtgccaccatacccagctaatttttgtatttttagtagagacatggggtttcaccatgttgaccaggctggtcttgaactcctgacctcaaatgatccaccgacctcagcctcccaaagtgctgggattacaggtgtgagccaccacgcctggcgtatggcagccattttgacggctgtctcttatttcctgtggtttgccagacaccagactaggggctggagtaagttagtgaaagtcatggtcctggcggggcacggtggctcacacctgtaatcccagcactttgggaggccaaggcgggcggatcacgaggtcagaagattgagaccatcctggctaacacggtgaaacccggtctctactaaaaatgcaaaaaattagccaggagtggcggcatgcgcctatattcccagctgctggggaggctgaggcaggagaatggcgtgaacccaggaggcagagcttgcagtgagccgagatcatgccactgcactccagcctgggcaacagagcagactccgtctcaaaaaaaaaaaaaaaaaaggaagtcatggtccctttcacgtgccgctcacagtctagtgggggaagcacaaactgctgctggagagggcagcacacggcaccaggggaggtctccagcccagccagagtcaccagcaagggctcagcctggaactgatgcctggctttggagggattagtgcgggctacgcaggcacaggggacagcagtagttcctggcagggaaacagtatgagcaaatattatgcatggactagcaatattcttgccagggtctttatgcttaaaaggtggggctgtgcaggggcgatgtttatgctgacaccaaattctgcctggtggtgccctatgcagccactcagggaggggcagtttgggaaaaatcctcaggactgtctcattagatcttgagactggggagggggaggggctttggggaccgagagatgggatgggaagtcccattggccaggaagggagcccatatgggtttgggcgtactgtgacccggtttctcccacaaccgtggcgctactctagatggagctggaggagacagaaccgcccctggagcctgaggatgccctatctgacgccgagtttgagggggagggtgactacgaggagggcatgtatgctgactggtggcaggagccggatgccaagggtgacgaggccgaggctggtcagtgacacgagtccttggggggtggggatgcagcctgggatggaggttggggacagatgcattcacccgctgggctccggagcccagggtgtgtgtgggtgctggggcccatcctccaggggcctccagcctgttggcaacccctgtcccgcttgggggtggtggtgcagcatctcccctggagctgggaccagctgagacctgtccgggggagcctcaccccacctcccatcaggacagcacctggacacccattgggagtgggtgggggagcaaccccagtgctttctcctttccttttcagagccagagcctgaactcgcatgagaaggggacaccccacacccctcaagcttgggaagcctggtgccgatggccccaccctcaccagcctgggcagcagcaagaactatttattaaaaacttaagatgggccaggtgcggtggctcacacctgtaatcccagcattttgggaggccaaggtgggtggatcacttgaggccaggagttcaagaccagcctggccaacatgatgagacctccgtctctactaaaatacataaattagccgggtgtggtggcaggcgcctgaaatcccagctactcaagaggctgaggcaggagaatcgcttgaacctgggaggcaaaggttgcagtgaactgagattgcgccaccgcactccagcctgggcgacagagcgagactccatctttaaaaaaaaacaagacgggccggcacggtggctcacgcctgtaatcccagcactgagaggccgatcacttgaggtcaggagttcaagaccagcctggccaacatggtgaaaccccatctctactaaaaaatacaaaaattagccaggcatggtggcacacacctgtaatcgtagctgaggcaggagaatcgcctgaacccaggaggcggagcttgcagtgagccgagatcgtgccactgcactccagcctgggcgacagagtgagactccatctcaaaaaaaaaaaaaaaaaacttaagatggacacagctgactggacccccatcctgcctcacccatgggtgctgcaccccagacccatcctgccacttctatgtctctggaccacaggatggtggtggcattgcaggttggcaagtgggctgatggggtccgccctcctcactgctgagctcctcacctggacagtctcctggacgaggagtttccagctgctggctggagtctcaggccaaattgcagagggtcctccagggtcctgaagagcactggactaagagtctagtggttccagggccctgaccagtaggtgctcaataaatgtttgttgttgaatgagtcatagtacccgtggtcgtctccctggagctcagttgtaagggtacaggtccttccctccctctctccgcacctgtgtcccctcatctgtaaaatgtggggcggaggggcaccatctgggccctggctggtcctctgcacctggggctgaaggatgtgtgagagaggacgcagtgtgcagatctgccaccagggggcgggagaacacagtcctccccaggcgggaagacgatggtttcagatttctaagatgggaagtcctgtattttcctagttcaggatcacttccctcggggaatgtggcaagtgtgggagggggccaaggacatttgctcctagtgtttactttgtgggcatttactgacccagtttccttagagtcagagggagctggccctgccgctgccctctattcccacattccagagccgggttggggccccagcttagcaggcagaggagccccagggatgtggtttgattactttgggattcttggggtgcagtgggacagccagatccctcttgaccgattttacatgggctcccaggggcagtgggtcccggtgtgcagggtgtgcaggcaacgatggtgcctggtggctacctcctagcctgggactcaccgccaaaccccacccctattccacagcagggaggtgggggcaaagggggtctgtctgggaggaacccagggccaaggccagccaggtgacagttctgccccatatttccagcctcccgggggcagggcggcagagttgtcttcccacttgaaggtagagtcaaggctgggaagccaagttctcactgccccacccctactttctctccagatgtgccaggtgatctggcctgggccctgtccacctctgttcctaggaggactccctgtcccactccaagcccctcccctaggcctttgatcgggatgagagctgaaagggcagagtctgagtctggaaaaagggctgggtcaaggctgggggctcagtgacctcactccttcctcccataggtgggtcttccggggaagcacatctgcagtggtagcgtttcctgaccgcctccaggtgcagggtggccccgccccaccccacctctttcaagctgcagtgttgtcaggtccaccaaggcccagcccctgtttctgggaggggctggcccttcagagggtggggagcgggatgtgctgtggcgtgtctgcgcagacgtgaacctgccatgagcacaagctttggaatctggacggctgggtgtgggtctgaaagtgcccgtgtgcttgtgtgttgcgtgaatgtgcgggtctgggtgtgaatgtgtgcctgcctgcgtgcatgcatgaatgtggtttttttttttcttttctttttttttttttgagacagagtcttgctctgtcgcccaggctggagtgcagtagcgtgatctcagctcactacaacctctgcctcctgggttcaagctgttttctgcctcagcctcccaagtagctgggattacaggcacctgccaccacacctggctaattttttggggtttttttttgttctgttttgttttgtttttgttttgagacagtgtctcactctgttgcccaggctggagtgcagtggcatatcctcgctcactgcaacctccgcctcccagattcaagcaattctcctgcctcagcctcccaaatagctgggattacaggcatgcgccactgtgcccggctaatttttatatttttagtagagatggggtttcgccatgttggccaggctggtcttgaactcctgacctcaggcaatccactcgccttggcctcccaaagtactgagattataggcgtgagccaccccgcctggctagtttttgtatttttagtagagacggggtttcactatgttggccaggctggtctcaaactcctgacctcaggtgatccacccacctcggccttccaaagtactgggaataaatgtgtttttagagggattcattcactcaatcagcacatatttattgagcacctaccatgtgccaggcatgctgaggtgctgggcatagaaaaatgaacagatcaggccaaacgccggacccacatgggcttacattccagcagggaggcaggcagaaaacaataaatgtcagaatgtatgaattagataggtatggcatatatggaggtgggaaaaggatctgagagctgaggggttgcagttgaggtgtgttggtagctgtgcaagtgcgcatctgagagtggcgtctccgagtgtgtggtgaagcagtgtatgtattagggagcaggcccaccctctctaggcaccattcctgtgcagccctttagcccaggccactggctcagccttgcgttactcagctctcctttcccagggagccgccagcccctcccgcctcccctgatgccagcatctccccattgcccagccagctctgcaaaccggtgaaacctactcccagccagtcccagtgtgggccctctggggccctccagctcattctcctgactccacccatccagacagcttcacctcctccacacctctgtctcaggtagccacctccccacccgcccccacaccccacccagcacctcaccagtcctagaatcttggaataatgggtaggaggttagggatgaccgaaagggctctggggaggctggcctcatgcagcaggaccagactcagatgccgcgggaagaccccatcctaaagaaatcagagctactatgatgtcctaagtgcctgctgtgtgccaggcacttgggagcttattttttgcgacaggatcttgctctgtcacccaggctggagtgcagtgacaatcacggctcactgcagcctccaccttccaggctcaagccatactcccacctcagcctccggagtagcagtgaccacaggcacgtgccagcacacccagctaatttttttgatttttggtagagacagggtcttgctctgttgcctaggctggtctcaaactcctgggctcaagtgatcctcctgccttggcctcccaaagtgctgggattataggaatgagccaccaccaggcctcttgacaaattattgataaccctcaaaacagtcctgagatgtacatgtcagttcccctctgctccaggtggggctgaggagtgagaagcagtttgtccagggttccttgaggtggttggtgactgagctgggtttggatcttttctaactaaatcagtgctgctcagagaagagagagaatgccctggttgcaggggctggcctggtgtgtgtctgttcatttttgagacgtagtctcactccagcccaggctggagtgcagtggcgtgatctcggctcactgcaacctccaactccctggttcaagtgattctcctgcctcagcctcccaagtagctaggattacaggcacatgccactaggcctggctaatttatttttagtagagacacaccatgttggccaggatggtcttgatctactgacctcgcgatccgcctgcctcagcttcccaaagtgctgggattacaggagtgagccaccctgactggccagcctggttttgttaggctgtcagctggggacagggagaggagagggtgcgctgcaggatgtggagataaatcccctacagggccatgcgctgtggctaacacctgtaatccctgcactttaggaggccaagcaaggtgggtggatcagtagagcccaggatttcgacaccagcctggtcaacatggtgaaaccctgtctctaccaaaaaatacaaaaattaggccaggcatggtggttcacacctgtaatcccaacactttgggaggccgaagcgggcagatcacctgagattaggagttcgagaccagcctggccaacatggtgaaaccccgtctctactaaaaatacaaaattagccaggtgtggtggcacatgcctgtaatcccagctacttgggaggctgaggcaggaaaatctcttgaacctgggaggtagaggttgcagtgagcccagatcgcaccattgcactctggcctgggcaacgagagcaaaactctgtctcaaaagaaaaaaaaaaaagaaaattagctgggtgtggtggaacatgcctgtaatcccagctactcaggaggctgaggtaggaggatcacttgagcctgggaggcggaggttgcagtgagccaagatcaggccactggacttcagcctggagcctgggtgacagagtgagtacccccaaaaaaaaaaaaaatcccctgcaatgccatagctcagctctcgctgaaggaggcaaggagtgggaagggagggggaaggaaaaaaatgaaaggaagaaaggaggaggaagggagcaaagaaagaagaaatgaagggagggaggacagaaggaagaaatgaatgaagggaggcaggggggcctggggacagagttgctgggatcacttagactaacaacttcctgaatcctgagagtcatgttcagggaggtgggagggagtcccttgggctccccgcaaattcagtaaattccagccgaagaaattccactcttagatttgaaaagtagttcttgccaggcgcagctcatgtctgtaattccagcactttgggaggctgaggcaggtggatcacctgaggtcaggagtttgagaccagcctgctcaacatggtgaaaccctgtctctactcaaaatataaaaaattagctgggtgtggtggtgggctcctgtaatcccagctacttgggaggctgaggcaggagaatcgcttgaacccgggaagtggaggttgcagtgagccaggatcgtgccactgcgagactctgtcacaataaaaaaaaaaaaaaaaaaaaaaaaaaaggtcgggcgcgatggctctcgcttgtaatcccagcactttgggaggccgaggcgggcagatcacaaggtcaggagatcgagaccatcctggctaacacggtgaaacccgtctctactaaaagtacaaaaaattagccgggcatagtggtgggtgcctgtagttccagctactccggaggttgaggcaggagaattgcttgaacccgggaggcggagtttgcagtgagcggagattgcgccactgcactctagcctgggtgacagagcaagactccgtctcaaaaaacaaacaaacaaacaaacaaacaaacaaaaaagaaacaaagaaaaagaaaaaagaaaagtagttcttgaagtctcaacctggttctctgtctctaggagaatagaaactccccttgggaacaaagagtggcccttccccttgtcagaaggctgtggccagttgttgctagagccaatagctcaacatgactggggagatcctggcagccacaggactcaactcttagacagtttccccattctggggccttgctccaggccttctcttgtatcttgtctctaaggacaaccctggcagatagatggcttccattttgtggatggggaaacagaggcccagagagtctgggttgggcccccagggctgaggctcactctaagctaggctggcgcagccctgcccagctcccttcacaagttccaagatgacttgggaattagatgggagtgtgctgagggctggggacagccccctggtaccggccccatcccaaaccccaggtctgacctatggacacaccactgcataatcactgcctgcctgggtcccagctggcgccaacgttcctggatagcatctcttctgtcccgcaaacagcccttgggatgggaatacctcatgcctgtgactcaggtggggaaacagataacttggaggataaggttgtttacccttccctccacatgcatatactgtacagacagtccccagcttacaatgattcaacttaggattttttgactttaggatggtataaaagtgataagcattcagtagcaactgtacttcaagcacccaaacaaccatgctattttttcactttcagtatagtattcagtatattacatgagatagtcaccaagttcttctttttattttttgagacagagtctcactgttgttgcccaggctggagtgcagtggcgcaatctccgctcactgcaacctccgcctcccgggttcaagcaattctccagcctcagcctcctgagtagctgggattacaggcgcgcaccaccatgccaggctaattttttgtatttttagtagagacggggtttcaccatgttgcccaggctggtcttgaattcctgacctcaactgatccgcctgccttgggctcccaaagtgctgggattacaggcatgagccaccgtgcctggccaaaatattcaacaagttctcataaaataggcttcatgttaggcgattttgccccactgtaggctgaagtgttctgagcccatctgaggtaggctaaactaagccatgatgtaggttaggtgtattaagtacattttcttctttttttttaatttttaattttaattttttccccttgtctcctctcacaatcttctttttttttttttggagatagggtttcgaactgttgcccaggctagagtgcagtggcatgatctcggattactgcaacccccaccttccaggctcaagtgaaccttctgagcagctgagactacaggcatgtgccaccatgctcagctcattttttaacgttttgtacagatgggggctccctatattgcatttcaacttacaatgtctatgaggacataacccccctctgaagttgaggagcatctgcacttgatcctttcttttttcttttcttttcttttttttttttttttggagacagagtttcgctcttgttgcccaggctggagtgcaatggcgcgatctcggctcaccacaacctccacctctcgggttcaagcgattctcctgcctcagcctcctgagtagctgggattacaggtgcccgccaccaagcccagctaattttgtatttttagtagagacaaggtttctccatgttggtcaggctagtctcgagctctctacctcaggtgatctgcccacctcggcctcacaaagtgctgggattacaggcgtgagccacctcgctcagccttgatcctttcgctctccagaagaacttactaagtgaggtcatgtgcaaagaagaggccaagagaacttgacattttccatttgaggtcacccttttcacctttcttttcagaagaaaagtgtgatattgtgtttctggggtgaaataaggggtagctaagccaaattactttatttttccttgactactgggctaaatcctcctgaccttcctggaggaggaggctgggaaggggcaagtttcagccaatgtagctggagaatttggcctttcctccctggccccaggcagtagggggtcatttgagggcctcacagccctaaaaaaaaaaaagctcccattaaaattttttaccttatctccggatgaggttataaacccagtcacgagacaggggcaggactgaagtcagaaaaccctgtcatatgactttaaccttgcgtataattgttttgataactccattttgtttatttattttaaaatacatctgtatcctcaaacacggaaatgttcccggctttggagcccctttcccccagctcacacacactttggacccggcagccttcttctccatcaacccttattggcagcctggcccaagcttcaccctcccccatgcacccacccctccccctggctacttccaggttctctgttggggccataaatgctccaggagatgtaagttggctgctgcttccactggaggctgaagtgctgatgaaatattcaaggatctcaactctcaaattccctgggggccgtgggatgggactgggaaagatgggatgaaagtacaaggccaggggccgctgagtcctgtcccagttctcagccaggtggagtccagcgcttaaagacctgggaagcagagagggccggagggcgagaggcgggggtggggaagggtctgtttgcataattgatggctagaggctctaggtggtgccatccgctggtcggcttaggggaagtaaggcctgagtctcggaccacccagagccaccccctcccccagccctggctgtctaactccaaggttttcctggggtcacacctccgagctgacaaaatcaagctggcaaaattggttctcgtctcctccctgactgcagcccgtctttgccttccttggggtggaaagagacctacattggtgggggaggtgaactggctggcagaagaccaaggttcaagtcccagccctgccaggaattttcttgtgtgatcttggggaagtccctctcctggctccagccgcagtttcttcatagatgcagggaaaagggggctccgcttagactatgccttcttcctcttcccaaggctctccacaggtcagggagaaatggctgcctccagccgtgtgtgcgcgtgagagggatggcctctccgtgggaagcatgccttgtcagggcaggcatctctcctggcttgtggaaagagggaggagcggggcaggctggcagggcaggtggggccccagctgtgtcagcctgtgcgtggagtcgcccagaccaggagcaggaagcgggtgactcaggtcgcaaaggctcggctacccctccccactcaggaggagggtgttgcttagagagttggtgaaccagctctggagcccgatctagatgccaccggtcctggagtttcaacttgcggggcttggggtgaataaggaggggcagcctgggacaggcattctctggagaggtttcgacagaccctcctccagcctctccctccaccaccactggccgctgctatctcaccctggcctgtactatttctggcccgtcctatctctgttttcttgtctcctgttttccttctgacattccatccccacccacacgccttgcagtgaagtgtcgctggagctacatctgtaattaaaagacacacgcccacaggaccaggctgtgggcagcctctggcctcaaggcccctcccctggacacaaggcaggaaaaaaggcaggagtccatctccccacagcctccctccagagccctgcagcctcctgctcccttcccagcttctggccatgcttgggcccactccagccagcagagtttgggagcctgcaggctcttctgcagctgtgtcctccccgagccctgaagggggccttctgagtaagcccccacccccaaagccagtgggcagggccaagagcacaaatgaggcctacatgccatagatctaggtaagttacagagcacactcccaggccagttgtggtgactcacacctgtaatcccagcactttgggaggccgaggcgggtggatcacttggggtcaggagttcaagaccagcctggccaacatggtgaaaccccatctctactaaaaatacaaaaattggccgggcatggtggcacgtgcctgtaattccagctacttgggaggctgaggcatgataatcacttgaacctgggaggcggaggttgcagtgagccaagattgcaccactgcactccagcctgggcaacagagcaagactctgtctcaacaaaaacccaaaaaaacaaaaaatggagcatgctcctgaactgctaggtcagatataccttgacagttgcacccccgcgatgacctgaaagtccatgatggagtcccaagttctcactgtgtcagggcatggcagccccatggagaacggctcctccctggcccccagccagggcctggactatttccctttccttagcacctctggctctgcctgcgccacaaggtcctccagcccttgcatggagatttcctagcgcgcatccatgctgcctctatctccccaccccagcaataactgccctttgtcatgtccctagtttggcccaagtgtgtccatgcacagtagcactggtgccgctgctcctggggagaaggaccagagtcagcgacc

SEQ ID NO: 2629 - DNA, 2570 bp, Homo sapiens
ttctttcgcgggcacttcgaattctagtcccctccaggcaggagcccgggccgacggagaggacttaacgacactatcggaccctctgggaaaagaggggagacgtcgtgacccaggccccgccccaccttgccgcctcgtgcccggcgctaagacccagcgggcgcgccgcccgcccggggcccggccctgtccccttccgtccgcggggcagccagctcagctccggagagccggcggcgcggcgggcatggctcgggtggcgtgggggctgctgtggttgctgctgggcagcgccggggcgcagtacgagaagtacagcttccggggcttcccgcccgaggacctgatgccgctggccgcggcgtacgggcacgctctggagcagtacgagggagagagctggcgcgagagcgcgcgctacctggaggcggcgctgcggctgcaccggctcctgcgcgacagcgaggccttctgccacgccaactgcagcggccccgcgcccgcggccaagcccgatcccgacggcggccgcgcagacgagtgggcctgcgagctgcggctcttcggccgcgtcctggagcgagccgcctgcctgcggcgctgcaagcggacgctgcccgccttccaggtgccctacccgccgcggcagctgctgcgtgacttccagagccgcctgccctaccagtacctgcactacgcgctgttcaaggctaaccggctggagaaggcggtggcggcggcctacaccttcctccagaggaacccgaagcacgagctgaccgccaagtatctcaactactatcaggggatgctggacgtcgccgacgagtccctcacggacctagaggcccagccctacgaggccgtgttcctccgggctgtgaagctctacaacagcggggatttccgcagcagcacggaggacatggagcgggccttgtcagagtacctggcagtctttgcccggtgcctggccggctgtgaaggggcccatgagcaggtggacttcaaggacttctacccggccatagcagatctctttgcagagtccctgcagtgcaaggtggactgtgaggccaatttgacccccaatgtgggtggctacttcgtggacaagttcgtggccaccatgtaccactacctgcagtttgcctactataagttgaatgatgtgcgccaggctgcccgcagcgccgccagctacatgctcttcgaccccaaggacagcgtcatgcagcagaacctggtgtattaccggttccaccgggctcgctggggcctggaagaggaggacttccagccccgggaggaggccatgctctaccacaaccagaccgccgagctgcgggagctgctggagttcacccacatgtacctgcagtcagatgatgagatggagctggaggagacagaaccgcccctggagcctgaggatgccctatctgacgccgagtttgagggggagggtgactacgaggagggcatgtatgctgactggtggcaggagccggatgccaagggtgacgaggccgaggctgagccagagcctgaactcgcatgagaaggggacaccccacacccctcaagcttgggaagcctggtgccgatggccccaccctcaccagcctgggcagcagcaagaactatttattaaaaacttaagatgggccaggtgcggtggctcacacctgtaatcccagcattttgggaggccaaggtgggtggatcacttgaggccaggagttcaagaccagcctggccaacatgatgagacctccgtctctactaaaatacataaattagccgggtgtggtggcaggcgcctgaaatcccagctactcaagaggctgaggcaggagaatcgcttgaacctgggaggcaaaggttgcagtgaactgagattgcgccaccgcactccagcctgggcgacagagcgagactccatctttaaaaaaaaacaagacgggccggcacggtggctcacgcctgtaatcccagcactgagaggccgatcacttgaggtcaggagttcaagaccagcctggccaacatggtgaaaccccatctctactaaaaaatacaaaaattagccaggcatggtggcacacacctgtaatcgtagctgaggcaggagaatcgcctgaacccaggaggcggagcttgcagtgagccgagatcgtgccactgcactccagcctgggcgacagagtgagactccatctcaaaaaaaaaaaaaaaaaacttaagatggacacagctgactggacccccatcctgcctcacccatgggtgctgcaccccagacccatcctgccacttctatgtctctggaccacaggatggtggtggcattgcaggttggcaagtgggctgatggggtccgccctcctcactgctgagctcctcacctggacagtctcctggacgaggagtttccagctgctggctggagtctcaggccaaattgcagagggtcctccagggtcctgaagagcactggactaagagtctagtggttccagggccctgaccagtaggtgctcaataaatgtttgttgttgaatgag

SEQ ID NO: 2630 - protein, 437 aa, Homo sapiens
MARVAWGLLWLLLGSAGAQYEKYSFRGFPPEDLMPLAAAYGHALEQYEGESWRESARYLEAALRLHRLLRDSEAFCHANCSGPAPAAKPDPDGGRADEWACELRLFGRVLERAACLRRCKRTLPAFQVPYPPRQLLRDFQSRLPYQYLHYALFKANRLEKAVAAAYTFLQRNPKHELTAKYLNYYQGMLDVADESLTDLEAQPYEAVFLRAVKLYNSGDFRSSTEDMERALSEYLAVFARCLAGCEGAHEQVDFKDFYPAIADLFAESLQCKVDCEANLTPNVGGYFVDKFVATMYHYLQFAYYKLNDVRQAARSAASYMLFDPKDSVMQQNLVYYRFHRARWGLEEEDFQPREEAMLYHNQTAELRELLEFTHMYLQSDDEMELEETEPPLEPEDALSDAEFEGEGDYEEGMYADWWQEPDAKGDEAEAEPEPELA

SEQ ID NO: 2631 - DNA, 2533 bp, Homo sapiens
gcaggagcccgggccgacggagaggacttaacgacactatcggaccctctgggaaaagaggggagacgtcgtgacccaggccccgccccaccttgccgcctcgtgcccggcgctaagacccagcgggcgcgccgcccgcccggggcccggccctgtccccttccgtccgcggggcagccagctcagctccggagagccggcggcgcggcgggcatggctcgggtggcgtgggggctgctgtggttgctgctgggcagcgccggggcgcagtacgagaagtacagcttccggggcttcccgcccgaggacctgatgccgctggccgcggcgtacgggcacgctctggagcagtacgagggagagagctggcgcgagagcgcgcgctacctggaggcggcgctgcggctgcaccggctcctgcgcgacagcgaggccttctgccacgccaactgcagcggccccgcgcccgcggccaagcccgatcccgacggcggccgcgcagacgagtgggcctgcgagctgcggctcttcggccgcgtcctggagcgagccgcctgcctgcggcgctgcaagcggacgctgcccgccttccaggtgccctacccgccgcggcagctgctgcgtgacttccagagccgcctgccctaccagtacctgcactacgcgctgttcaaggctaaccggctggagaaggcggtggcggcggcctacaccttcctccagaggaacccgaagcacgagctgaccgccaagtatctcaactactatcaggggatgctggacgtcgccgacgagtccctcacggacctagaggcccagccctacgaggccgtgttcctccgggctgtgaagctctacaacagcggggatttccgcagcagcacggaggacatggagcgggccttgtcagagtacctggcagtctttgcccggtgcctggccggctgtgaaggggcccatgagcaggtggacttcaaggacttctacccggccatagcagatctctttgcagagtccctgcagtgcaaggtggactgtgaggccaatttgacccccaatgtgggtggctacttcgtggacaagttcgtggccaccatgtaccactacctgcagtttgcctactataagttgaatgatgtgcgccaggctgcccgcagcgccgccagctacatgctcttcgaccccaaggacagcgtcatgcagcagaacctggtgtattaccggttccaccgggctcgctggggcctggaagaggaggacttccagccccgggaggaggccatgctctaccacaaccagaccgccgagctgcgggagctgctggagttcacccacatgtacctgcagtcagatgatgagatggagctggaggagacagaaccgcccctggagcctgaggatgccctatctgacgccgagtttgagggggagggtgactacgaggagggcatgtatgctgactggtggcaggagccggatgccaagggtgacgaggccgaggctgagccagagcctgaactcgcatgagaaggggacaccccacacccctcaagcttgggaagcctggtgccgatggccccaccctcaccagcctgggcagcagcaagaactatttattaaaaacttaagatgggccaggtgcggtggctcacacctgtaatcccagcattttgggaggccaaggtgggtggatcacttgaggccaggagttcaagaccagcctggccaacatgatgagacctccgtctctactaaaatacataaattagccgggtgtggtggcaggcgcctgaaatcccagctactcaagaggctgaggcaggagaatcgcttgaacctgggaggcaaaggttgcagtgaactgagattgcgccaccgcactccagcctgggcgacagagcgagactccatctttaaaaaaaaacaagacgggccggcacggtggctcacgcctgtaatcccagcactgagaggccgatcacttgaggtcaggagttcaagaccagcctggccaacatggtgaaaccccatctctactaaaaaatacaaaaattagccaggcatggtggcacacacctgtaatcgtagctgaggcaggagaatcgcctgaacccaggaggcggagcttgcagtgagccgagatcgtgccactgcactccagcctgggcgacagagtgagactccatctcaaaaaaaaaaaaaaaaaacttaagatggacacagctgactggacccccatcctgcctcacccatgggtgctgcaccccagacccatcctgccacttctatgtctctggaccacaggatggtggtggcattgcaggttggcaagtgggctgatggggtccgccctcctcactgctgagctcctcacctggacagtctcctggacgaggagtttccagctgctggctggagtctcaggccaaattgcagagggtcctccagggtcctgaagagcactggactaagagtctagtggttccagggccctgaccagtaggtgctcaataaatgtttgttgttgaatgag

SEQ ID NO: 2632 - protein, 437 aa, Homo sapiens; identical to SEQ ID NO: 2630

SEQ ID NO: 2633 - DNA, 38820 bp, Mus musculus
  misc_feature (1)...(38820): n = A, C, G or T/U
ggctgcaggctcagctacgatgctagatgttccactttgctgggttaccagggtttgtggagccccaccttttggtactggattcaggaatcaaacaggaacaattactaggtactgactaatatctgccttaaggactgaataataaaaagggtgacgtttcttgatggtgttattttgtttgtaaaggtctccctactatgtggctctggctgtcggagaactggctgtgtagaccaggttgcgtcaaactggttcagcaattggcctgcctgagccactggcccgggaagctattgtatacagggctctgtatacaattaaaaaaaaaaaagaagcctcaaattatgcctgtcataaaagaagcctacaagaaatagcaactattattgttggtttgtttgtttatttgtttttgtttttttgtttttcgagacagggtttctctgtgtatccttggctgtcctggaactcactttgtagaccaggctggcctcgaactcagaaatccgtctgcctctgcctcccaagtgctgggattaaaggcatgcgccaccgtgccgggcgcaactattattgtattgataaatatttaaactaaatatttaaatgaaaaaaattttaagaaataacacaaaagaattaaatgttcaaataaaccaaggggcagtatagtgcttctccacctgtaatctaagttctcaggaagtcaaggcaggatcatcatgggttcatgagttcaaagccagtctgggctacaccatgaaaacacatctgtctaaaactacccttctctcaatctctttctggaacaaaaaacaaaaaacttctggtggcccacacttataattccagtactggaaaggcgtgggaggggcgggggtggtggtggggggaaacacaaggatttccatggctacttagcaagttcaaggtcaatgtaggaaacattgagatcctgttccaaacaaacattaaaaaaaaacctcacttcagctggtgtggtgatacattcttgtagtctcagaagcaatgggaggtgtgggggagggtgcactgaagccggaggatgctgagtttgaagccagtgaaactttatgtcaaaagttactacaactaagctgcacatggtgaagcatacctttcatggaagcactctggaggcagaggcaggaggagctctataaattcaaggccagcctaatctacacagtgaggtccagagtagagagatcatgtctaagaacaaacaaacaaacaacacaaaacccacttgctactcttttagagaacctgatttgattcctagcacacatatcagttggctcaccatagcctattcattccacttttaaaggacgtgatgttctcctgtcctctataagcaacacacacacacacacacacacaccagacactcaaatatatacacataacttaaaaaaataaaatccatcaatcttggtggcctatgcttttttttttttttttttttttttttttttttttttttttttttaaagatttatttatttattatatgtaagtacactgtagctgggagtcagatctcattacagatggttgtgagccaccatgtggttgctgggatttgaactccagacctttggaagagcagttgggtgctcttacccaatgagccatctcaccagccctggcctatgcttttaatcctcagcacttaagaggcacaggtaggtannnnnnnnnnnnnnnnnnnnnnnnnnnnnnnnnnnnnnnnnnnnnnnnnnnnnnnnnnnnnnnnnnnnnnnnnnnncagcagttaagagcactgattgctcttccgaagtactgagttcaattcccagcaaccacatggtgcctcacaaccatctgtaatgggatatgatgtcctcttctggggtgtctgaagagagttataatgtactcacataaaataaataaatcttaacaacaaaacaaaacaaaacaaaacaaacaaaaaaaaaaccaagtggggctgatgagaaggttgagcaggtaaaggagcttgctgcacaatcctggcgaccttagttgcatctccagaacatagaagggtaagagtatgagggctggagagagatggctcattgatgaagaccactggttattcttccagagctcctgagttcaattcccagcaaccatctataatgggatctgatgccctcttctggcatgtatcatatatacactcagaatattcatatataagtaagtaaaaattaaaaaaaaaacaaaaaaaaaaaaacctaaaaacacgagctgggttgtggtggctcacacctttaatcctagcatacgggaggaggcagaaacagagggatctttgtgagtttaaagacagcctgatctagagcaagttccaggacagactgaaactctgtaaagggggatgggggagaggaggaggaggaagaagaggaagaggaggaagagaaagaaaaaggtaagaatgaaccaactctacagagttgttttctgaccaacacacttatttatactactgtggtatatgtgtgtgcacgtgcacacccatacacactaaaaataaacaaaactttataaaaaagaaaaaaaaaaaaagaagaggaagagaggagaaggaagatacagctgaagctcaaggaagtcatgggctgggagagcccaagacaactgataagccggggagtgaggctccagccccagcacacagctccactctccctgccacatgctgccctcctgttcacaagtatgctgaggttttacctgactacaccatggtccctgctgtgctggctgcttaggacatttcccctactcctcttgtctcaactaaaagaccagctccttcatgagaacttccttgatgttggatcctgtttgtttgtttgtttgtttgtttgttttactttgaggcagggtctcactagctcaagctggcttgaaactcatgtaaatcttctccctccatctcgctacttttcttgttctacctcaatgtggtttccctgtcaaatcaccagtagaaatttttatcccttccttaagtgtttgtatttgaccaagaccttggttccacagaggcaggaccttaccagtcctctttctactctttcctcagtacctaaaacaggattcagcatcgactggattctttttttttttttttttttttttttttaaagatttatttattattatatgtaagtacattgtagctgtcttcagacacaccagaagagggagtcagatcttgttacggatggttgtgagccaccatgtggttgctgggatttgaactctggacctttggaagagcagtcgggtgctctcacccactaagccatctcaccagcccgactggattcttaatatgggttgtacaaaaggttctataaactttggtagtcgtttttggcggggtcaattagtccaagtttggatgaatagcatgccactgagtgtccacttggcagtcaggaaagtatgagataacgtggagggaacatagtaggtactaagtaacatctgtgttccaaaggctctctgagaagatttgaaaatgaccttttaggacaatgacacctaagaaaaggactttgcctttctggacttcatcagtgactataacccatcctttgctgccaacagagctagtgaatatataagagtcttatgatacataataatacataagaacttgaacagcttagttagcatctctgagtattgctggggaattttagatgattccaaagttctgggaaatggagactgaggaaaaaaacaaataaggaaccaagaaaagagagaggccaaggcacctctctggtcattcttcacaatgacacgagtccttcctgtcccttctttgactctccagatctcacacctgggagaggcaatatataatggaaactgagaacttttttgcttttattgtttgtttttgagccagagtctcactatgcagctcttgttacagctgggattacaggcatctgcagccacaccctgcttgagaatggacctttgaattaggtgcaagctggaatctcagctcttggatgagtccttttactcactgaaccacattaaaaatgttaaagctgggaatcaaactcagggacttaagatctcaagcatgtcaggttatcctcagtagtgcatagctactgatctatatacactagcccaatcttatcaataaacaggtacctagtcggtcacaaagtgggtttttaagtaagtttatatagcaattatgcatagtgaaatgtgtgatacagaatgagaattcaataaacatcaaccaatattatataaggtgacacacaaaaatagtcttatgtctggtgaagcgtggtaatatagacaattccggctactcaggagactcggataagggggtgggatgcttaaggcctgcctaggctacaaagtaagtttaaggacagcatgggaaactttggttagaccctgtccccctacacacccacaaagtgagaaaaagaaacacatttggatattaggataaatggtacttttaagccaagaactcacaaattctagtgacttctatccgtagcaaggctcaactatgtaccttccacttaaaatacaaatacttatgtcaggtacagacatgtagtagcatcaagatggtgaatttgcctctgagaaaatgaggaggtggctggaaactatagagttaggaacatctgtgggttgggaccctggacataggggtttctagggatctagtcagatgccctgacttctgtcagagagtataaattggctgcccctggacctgaccgagagcaaactacaggatcctgggatcttaaagacctggaacaagtccaaagtcttctagcttcatcccaaccctgaggctataacctgggctagtccagacagatgcagggctggaagggtggtgtctgtagtcctacccccagctatttgtgactcacgctccccctccccccaaccccaccccgggtttccctcacctctaccaacttagggtgagaccagagaaactgacttggaggggagggaaagaatcctacaacattctgggcttaggatcccagtcaagactcttagacaacctgttcaaattacgtccaccaaatcttggcgcctctccttcttcagatctaactttaaacactgaatactaaaattgcagctatcaaagagataaggtttccactaacacttaacgtttcctttcacttcattacccgctttcaaattcatcattactcaagaattagcgtgtttctaggacgttcaggatgccccagcaagagacttcacagagcaggtactcctagctttagaaccaagcctaatgagctggactaaccacatcaggcatccctttttcccagggttgagggtccgttctttccttcccatccctgctactagtcagagaggttgttttttgttttgtttttgtcttgaagcatcagaattcattaaatcgccataaacatcagggataattgtgttgcctggataagggggtggcacactatgttcctgtacggagggtgtcgtagctactagtacaggaggaagttacgatgttggcatagttgggggatgtgggcttgtattttttgaggctgtagagatgaccaataatatttacttttctgcctcggtagtcaggttcatttcttatttaaatctgaaaagtggcttcccacccagtttttccagaaaactccccgtgacaggtgtggaaaggatcggaggccaaagaagaacccttcttcacccgtgtggcaccttgggttttcaaaaggcacctttcttccgagttcccaggagctgagcttcccagctctccgagtgagcaagagggataagggtggaggaaaggtctgggggaaacgcagcttaccccggtcttgcgtcttgcgcagcgctacggcagtcccggagtcccagcgcaaacccttccagcagcagcttccagctgtcaacgcttccttctctggacgccgcagccctcacccagtcggtggggcggccccttccgctgcccttttggccgggtgcgagagtgtgcgagtggcacggggctcgcgggggctctaccttgacccaagagagcgcacggtcagagcaggggcgccggagcccgagctggacaggaggggacgggttaggaagacgcggccgctgcggggccgcccagctcctgacgacacactgcccgcccccgacccagcctgccctcctgccgcgcccaagcccaccgctgttgccagctttccaacacaatctgctccgggccttcagagtatctccagggctctggtttgtgccactttctccactcctacgcttctgtcttcccatgcctggggcagctctacttctatctttcttttctaattagtcaaagcctctcccatcatcccttcccaggaaagccaaggtaggggtcagggtgctgattggaaccacccagcgactggtcagcaattggccggccctccaatctccaaatcatcactttggacgcgcctgcccaagtcaatgattccacattcaggagaacccagagaggcaaggccagagttccacaattcacacacaaccctagacctaggtgcatttccttctccacatggcttcacattgcttgaccctgcctgagataattgcccacctctcctccgagttcctcagctccgcctcggacttgtctatgcacagccttttctctcaaaatccatatcctttccttaagactagggtggagatttaggtgcataaaacaacgtttgactgtgttcaccttttcttcatacccaaccctagcactttaccctctggccttggcagatggcacagaagtcgttgggcaaaggtagagtctgaaggcagagcctttcagttcctcctacctgttattggagctgtcaggactcttgaagcagcatggttggtgtgaggctgaacggaaaggagaccaatgagtggggatttactggtagggactggggacccaggcatcctgcatcccccgccccgccccaaacccacgactaactccctcctacccttctctgaagtaggagcagcacaacaaagccttgtgttcttggaattgtatcctcttacagctgggaatagaaaggagtgggagagcagactgcttgttggaaatgtgtgtatatattcgggtccagtgagggtcagagagagagagagaagaaaaaaaaagaagagaaaggaaaagaaaagaaaaaaaaaaaaccgaaagaaacaaaaggccctctagtggaaacagaagtaagtagtcttcaagtatttggagacaaagctgttgaagcaactctctagagtagtggggtttgctgctgctgttgttatttaaactttagattcagatcgggagtcggagagtgacctgtctctgttctgctgtccttttcaggtttgttctggtttgcttgcatcctgacccttcactgctttgtttttgttttcatttttcctcttcctcctccatcactgtcaccaccatgctgcagatgagcttcagtgcctggaacgtgcttctccggtgctgcaccacggatctataccgctaccccacacccttcttcttaacagtatatgcgtcaccgttagcaaagtctatctccccttcctacatcgcctccttactcacagtccaacaaacgatttttttcctgagacaagattttagtatgtacatagcctaggctggcagtgaaattgccatcctggttcaacctctcaagagctgggtttaccgggtttattggtgtgtgccactcctgctatcaacagacacttttgaaggtctctttatacctgatcttgttcttagttctttctgtaggataagcaaaaacacaaactgaagcaagtgcctagatgtctgtaaagcttcctagctcttgatcaccgtaaacaaagattctgtttaaataacacttgtgtcccaaactactcttcgaatcagttcttgcataaagtcaaagactctcctacattaaacaagccataggttggaatatgatttttccaataaggaatatgaagagaaactcagacttttattttatttcggtttttcaagacaggatttcgatgtgtcgccctggctgtcctggaacttactctgtagaccaggtgggcctcgaactcgaactcagaaatccgcctgcctctgcctcccaagtgctgggattaaagggtgtgccactgcctggcaggagctcagagttactgtaacatctttgtaccttattttggatctgtgtttcgccatattctcaggtcagttgttggtgggggtggtggaagaaaagcaaagaaccatctacggaagaggtgtttgatgtctatagttccaggtgctcatctctttaatcaaccacatcatacaagtcagaaagaaagaaaccacagtgaacaaagggaaaggaaaaaacaagcctgttttcccagcctcttcttcctctgggtggggttatacatccggggcccagggctgggtccagggccagtctactgaacagacaattgagtttcacttcctgccaacctgcagagatgggggcaggatgtctgaggggtacagtgatggggagtgtccagagattaaagagtaaacaggtcacactagtatttcccctcactgagcaggtccgtggagagctttagagaccactcttgaaagagttcaagtcatgcacctcactaattttcagaggcactgttccatattctcatctccttctcctctttgaggaaagggtactagatagacaggacttaagtgcaattgatgaacaaacagatacgggctggtaggcttgggccagaatggttgcctgacttaatgctagctacactctaggttccactccccagcatccctccctccaccatacccaaatgcaggaggaagcaaaggcataggtgagggattatcacacacacaaagtgagggattagaagtatacatgtagccgggccgtggtggtgtacacctttaatcccagtacttgggaggcagagacaggcagatttttgagttcgaggccagtctggtctacaaagtgagttccaggacagccagggctatacagagaaaccctgtttcgaaaaaaaaaaaaaaaagannnnnnnnnnnnnnnnnnnnnnnnnnnnnnnnnnnnnnnnnnnnnnnnnnnnnnnnnnnnnnnnnnnnnnnnnnnnnnnnnnnnnnnnnnnnnnnnnnnnnnnnnnnnnnnnnnnnnnnnnnnnnnnnnnnnnnnnnnnnnnnnnnnnnnnnnnnnnnnnnnnnnnnnnnnnnnnnnnnnnnnnnnnnnnnnnnnnnnnnnnnnnnnnnnnnnnnnnnnnnnnnnnnnnnnnnnnnnnnnnnnnnnnnnnnnnnnnnnnnnnnnnnnnnnnnnnnnnnnnnnnnnnnnnnnnnnnnnnnnnnnnnnnnnnnnnnnnnnnnnnnnnnnnnnnnnnnnnnnnnnnnnnnnnnnnnnnnnnnnnnnnnnnnnnnnnnnnnnnnnnnnnnnnnnnnnnnnnnnnnnnnnnnnnnnnnnnnnnnnnnnnnnnnnnnnnnnnnnnnnnnnnnnnnnnnnnnnnnnnnnnnnnnnnnnnnnnnnnnnnnnnnnnnnnnnnnnnnnnnnnnnngagcttgagccagcaccttcctgacagaagaggaaacaagtttaacaggatttagccccagaggaactaaattgctgatggaggaggggagggaccggaccgggctttggcgctccttccaagaacaaggcacaacctaacaaagggagtggcctcactgtcccggtagatttaagggtggaactgctcgcggtagccaaagctaatccgaagtgtggggcgcggctaattagaatactgactgggtccgccccaaaagccttcaccccgtgccctctgacccgagaggatccagtactgagcagcaggccaagaagttacctcgccggccgctgaatccccagggctgcccgccccagttcagtcatggaaaccgccagcacccccgaggccacggggacaggtgaccgactcgcagtgcgccgatctttgcgcaccccttcgtaggtctctgatcagttaacctgggcggccgagagtggtcggcgtgccgagtagacctgcccacttttaagtgttagcccgggttttcgtgtatccctggggcttctttgcccatgccaacacgcgccctagggtttggtgcaggcgaggggccttgcatattcctttcctcttttaccagctttcctgctgggtcccggtgggccttgagcctgcgaggactgtctgggataaggcttatgcccaaacttctctccgagccctagggattgttttatatacatcaggaggtcaacagtggcgtcggtggtagtctaagagcccatgactgtgagcgtcttacactcgccttttccgcctcccgcgtcagagaaatggtgcagtctctctttaagattaaaatggtggcttgctaggatgaggactccacttccggcggggaggggggcgggaccccagcccgctcacgccggaagtggttcgggttctcaagatggcgactccctatgtaactgacgagaccggcggtgagtgcggggatcgcggagccgcctctcccgggattcttgggttaggggttcggacttggaaaagggtttgtgccacgcccatcccggggctcctcctttgccacgcccccgtaccgccttccccattcattccttttgggttgttacctgcgcccccttctggtctcgtgttttttggggggggtctctgcttccggtctcccaaaccctggggtcctccaatgtcccctgctccgggacccttaggcgcttcagctctttctagctgttggagtcccgtacctttgcaaggttctccagcattatgggctcctgtgctcagttccctccaattccaaccccctttctccctcccccatttcttactgttgtacctgctctctacccttccctgttttcattctttctctccgggctgtgtctgctgatgatctcattgctacatagtgctttcttcttcactctttgccccatcttcattgggtgggggtgggggtgggtgtcactgaaatccagacgtgtgaagggaagaggaatttaactttcaacttgacttttctccttggtggagttttccatttaaagtgggagaaaacaaacaggaaagtatctactggcctttctctcaacgtctttgataattgatagaaccccatgatttcttaaaggttgagtagcacttcagtcgagctgtctgaaatgttggaagtcagctgtttgtgtgtgaagctgagaatcggttttatgtttttgtcttgtttgtagttgccttgtctttaggataatgtgcaatattgacttcgagatgatcaaatagatatttggaagacgtagtgcaagtacccggtgactgtttttgtagccttcatcttggtcttcatatgtgactagggttttgtagaagtgatcctgtgattgtgcggtaatgcacggtgtgttttaaaatgtgccatttatgcttcttggtttgctttaaatgttccttattaaaattaaaagcatgagccactgtgcccaacctttaaaaagcaactttcatctttaacactccaatccccagatgtgatctcactatgtggccctggctggcctagagctcactgtgtagaccaggctggccttgaactcatagagatccacttacctctgcttcccaagttgtgggattaaaggcgtctaataccatgacaggcagtttgcagcttttaatgtgtaccttcttattctttttatattccatctggcccctgccctgctatagagatagtttctgttctttgtggctctgtagaagaggaaaataagctgttcttttgcctctctgcttttcaaatgcaattttagcaaaacggcagtgttcctatctactgcccacagattatgtttttttgtttgtttttttaaaagacttattttgtgtgtgtgaatgttttgcctgtgtgtatgtctgtgcgtcatttgtgtggttggagaccacagaagtcagaagagctattagatctgaggctggagtttgagctgtaggccactatgtcggtgctgggaatcagacccccaagtcctcggtccactgcagtagccactcttaacctctgagccaactctctagcccttttgtttttatttttgttattctgtctgtagcagcttgggaatgctctgaaccccctcgttcctgagcacgagatcattgacgtacctttgtattttcagctacacctcaggattactacaacctggacttcatctgtgacacatttcctttcaggtattccccttcgctttagcctccttaccagtcgccatttgacagtctcaaatccacagaggcagctttttgccctctttaggttttctggttgtgtgtgtgggtgtgggtgtgggtgtgaatgcgtgtacttgtctgtgtgcacgtgcatgcatgtggaggccagatgttgatgtcaggtgtcttccttgaccaccccacttcaccaccaccaccaccttatatctgacaggatctttcaccttaacccagagtttggtgactcagctagtctagatagtcagggtgctcctgggatcctgtctctgtctcccaagtgctgggattgtaggcatgccaccagcccacaggtgtgaatgtggatggatgctggtgatctgagtactggtctttatattaatgtggcaagtgttttaacttctgagccatattagccccctcttctctctctctttttttttttttttgtttttgtttttgggtttttttgttgtttttggctgtttcagatagtctcttgcagttcaggctggccttgaactcctgttcttcttgtccccgcctcctaagccacctgcattgcaggtatttagttcagaactgcatgtggctgtctttgtcttgaatgatattcatcaactcttttcttggctactgattttagactctaagaaaagaaaatcggaagttagaagattcagtctcgtgttaacttctgtcaatattacagctttttgccaattcctgcttcctggaagcctaaattcttttatgactattttacaagactctatcattagccctttaattcctccttttgtggcaaatacccttactttatatttcattggaaaattagggcctgtcatttctgttttcttagcctcagccaggtgtctgtcactctcctccctcccgtcaggatttcacatcagcggcttgagcactgggattatagatgtgggttgcactgtttaagtccagatttttgaatattgggtctcgatagtctgttgctagactgtggttgttatccctagcgcttccttcctcttctgtgttgcttattccttcttctttcctaatgctgactgtcttaactctgggctgggctgtcacctttcagattcaccttttctaatccttccattgttatttcctgtcatgggtatcattttctagccatctctagagcaacttttttttttttttttttttgtccctttttaagactttggattttatttattctgaaacagtgagatggtatagatttggctttttagatttttagaacaattgagaagatgtttcaaagaatttcttttttaaaatatttatttatttatttatttatttatttattatatgtaagtacactgtagctgtcttcagacactccagaagagggcatcagattttgttaaagatggttgtgagccaccatgtggttgctgggatttgaactcaggatctttagaagagcagtcggcgatcttaactgctgagccatctcacctcaaggaatttctatatacctcatatttttcctttttactagcattttgtattgataaagtatatttcttactgtaaactaatcagtatcagtacattattattagttaaagtcataggttattcagggcaggcatggtggttcatacctgggttcctagaacttggggaggagagacagaaatcctacactttgaggccagcctgggttacatagaccgtgtctccaaaaaacccaaattattgaaacttccttaagctgagggtgatggcccaggtctataatcccagcacttagaaggtagagacagtcttatctcttgagtttaaggacagcttggtctacactgtcagagaaagagagagagagagagagagagaaggaagaaagacctttcataatttttttctgatccaggatctcatctagcatgccatcacatgtaggtctcatgcctccttaaagaatttctcacacttttcttgctctcaatcatctttatgggcttttttgtgggggtgtacaggtgtatgtgtggtatatactcacgtgtgcccattcgtgattttagaggccagaggccgccagctggtgtcctgttctttctgccacattccctccagagagcatctcttgttgggtcacaggtgcatatggccacacctgcctttttacttgcatgctggtgatgcttttaagagtattttagtaagttttatgactgttttaccaacatatatatgtgcttggtgtttatagtcagaatatagagacagttgttagctgccacttgagtgctggaaattaaacctaggtcctctgtaagagcaacaaatgatcttaactgatgagccaattctccagccccagtggttctgagggttaactcaggtcctatgctcccacagcaatgcctttacccaaagctactcccaacagttttcagcaatgctaggcatgtattttaaagaccacgcttctactggaatttcttctttcttcctatccccaactctctgtctcctctccctctccctgtgtgtgtgtgtgtnnnnnnnnnnnnnnnnnnnnnnnnnnnnnnnnnnnnnnnnnnnnnnnnnnnnnnnnnnnnnnnnnnnnnnnnnnnnnnnnnnnnnnnnnnnnnnnnnnnnnnnnnnnnnnnnnnnnnnnnnnnnnnnnnnnnnnnnnnnnnnnnnnnnnnnnnnnnnnnnnnnnnnnnnnnnnnnnnnnnnnnnnnnnnnnnnnnnnnnnnnnnnnnnnnnnnnnnnnnnnnnnnnnnnnnnnnnnnnnnnnnnnnnnnnnnnnnnnnnnnnnnnnnnnnnnnnnnnnnnnnnnnnnnnnnnnnnnnnnnnnnnnnnnnnnnnnnnnnnnnnnnnnnnctttcctcagcctactgagtgctagggttctatgtgtatgtcactatccccagctgtttgatgtttctgtcattaaatttagactaggtggttttggaggaaaacaatagagacaggttacaggttgtaagatgacagtgatttcccctaccctatgtgtagtaacactgatacctgtctgaagtaatgtttataaagtctttccattgtaaaagtttacctttcctcatttaaaatgtttatttttatgtatgggtgtttgtctggacatatatctgtctactacttgtgtgcctgttgccagaaaagagcattggatcccctggaactggaggtacaggcagttgtcagctgccagtgggtgctgggaattgaaccctggtcttctgggagagcagttagtgcttaccaatttgccacccccacctcatgctttatagaggctaagagtcactgtgagctcaggtaaggaattgatgttaggctttcctttttaaggacattatttggagtcttcttcctaacacatttgggttgtttgtgtgtgtgtgtgtgtttgttttttgttttactttgtttttgtttttgttttgttttggctttttgaaacagtgtcacatttagtagaccaggctatcctggaattcactaggtagctcaggctgtccttgaactcacagtagttttcctgctttagctttccaactgctagatttacagatgtgagnnnnnnnnnnnnnnnnnnnnatagcaggagtggcacacaccaatagtcacacgcacacacacacacacacacaacagagcatctctcctgtttattcagtcaattacgtaatattattttgctgatattttatattagggttagctagtattcgtttatttttcaaccgttcctgctttacttattttgggtaggggtggcgtgcttgtaatgccaaggatagattccagggcctgggacattttaggcaagaattctaccattcagctgtacctccagctctcagctcccagcctgccattgtttcagacagggttctctctctctgtagccctggctgtcctggaactggaactctgtgtagatcaggctggccttgaactcagagatctgcctggctctgcctttttaatgctgggactaaaggtatgccacactcctttcagcttgccctcctggagctcaggtgatccttgtgcttcagacataggtacatgttgtgcctggctcacaggtgcatcatttatcctactacctactgttacgtttgacagattccttccttccttccctttgtccttcccttcctccattatttttgttattttagacaggatctccttttctagctctggctagcctggtccttgctatctagaccaggctgacttaacttgcagttatccttgcctcttgtaactgctagaatcacaggcgtgtgccatgtttttaaacattgttgactcgagtgacatgtacatttgtttgtatcttcttttttgacttcatgttatgatatcggtgctattctttgctattaaaagttctttagctggggatgtggctatagaatggtggttgaacacttacctgctatatatgaggtcctaggtctgtccctagtattgcagaaacaactcattagtctggatgtggtggtacacatctggagtcttagcatctcaggaggctgagtgaggtgtggtggtacacatctggagtcttagcatctcagaaggctgagtgaggtgtggtgggtcacatctggagtcttagcatctcaggaggctgagtgaggtgtggtgggtcacatctggagtcagcatctcagaaggctgagtgaggtatggtgggtcacatctggagtcagcatctcaggaggctgaggcaagagaatcacttgagcttactatgactttggagctaagcctaggctggcaggaagaaaaaaagttccttctttttgtttggcttaaaatttatttttctttatgtatatgagtgcttttcttgttggcatgtatttgtacccctgtgtgtgtgtgtttggtcccttgtaactggggttatgggaggttttggccactggggactgaacttgggtcctctgcaagagcaacaagtgctcttaatcactgggccatttctccagaaacacccacaccttattttttaaatgtgaaacgctttgtgaatttgcatccttgtgcagataccttgttaatctctatattgttagtatgtgttctgccaaagtaagtacaaaatagttgttaagaagcctttgggataataaaaaattaaaaaaaaaaaaaaagaagcctttgggaatattgctaaatgataaaatggatgataggacttccttgctttacagcttgctggatttctcttaagttttttcttatgtctttctgtgtatacatattagtgggtgtgtgcacatgtgtgtgtaaagggcagaggttgttgaccttgggtgtccacttgaacacccccacacacagcaccccaccccctttttgagataagatctcactgagtaggatggcctagaactcaatattagacaaagctgacctcaaatgcacagagatccgtctgtctctgctccctgattgggactaaaggcatacaataccatgcctagttctgcattatttttcaaagacaaggctctctgaatttggagctcactgtacagctaggctggcagctgagcaagtctgagagggcctcctgtctctgtctccctagttctcaggcatgtaccgctgtgcctgcatgagttctgggggtggtatcctaggcctgtggatgcaggcatgtacctctgtttgtttgtttgtttggattggttggtttttggttttttgagacagggtttctctgtatagccctggctgtcctggaactcactttgtagaccaggctgacctcgaactcagaaatcctcctgcctctgcctcccaagcgctgggattaaaggcgtgctccaccacgcccggctaggcatgtacctctgtgctgggatttcgatccttgtgcttgtgtaggaggcacttcaccaaccgagccatttccctggcccctgtgcttttaaatttctatttccttttattagtgagtttgaactttctgtactgcatttgtgtatttatttatctgtatttatttggatgtgtgtgagcatgttctcatgtgtgtcaaaaagcaacctaagggaatcagtcctttccaccatgtgtcaggctaggccaaaaccacctttactggccagccaccttgccaggtccagtgtgtagtaatactgttacagcccttggaattcagagtttagattttagtttctgatactgtttactaattgtaacttggggaatgttaataaacttctcatcatgtgtaaactggaataaactggaatgatatttcgtggagttgtgaaaattaaataagatgcctataaatattgagccctgtaattgttgccgttatcttctgagaattgacatttgttctgctcagatactaactccctgtgtgctcagtatgcagcgtggtagagtgctcacctggcttgcacaaagccctgggttcagtgtacaccagattgtggtgatgcacatctgtaatcctagaactgaggaggcagatgcagaagaatcataaatccaaggacatcctcagctgcataacaagtctgaggctgacctgggcaacataagaccttgaagataagtcactctaataaatcctctcccttactttgttttaagagagggtctctttaagtcagtttagccttgaactcatggcagtcttcctgcctcaacttcctgaatgctggaatttcaggcctgagcttaacttcttgaagatttagtcagatctagtggcatacaactttaatcccagcattctggagtccaaggcaggtggatcttggtgatttctagttcagccaggactacatagtgaaatgtcatctcaaataaaataaattaaacaaacttgctgaagactctactcagcttgtaaatgataattatatccacagtcaacaagacatgtgtgaaattgctggtgtgatgtagcttcatgttagtaagaacccattctaactgttagcaactgtgacttttccagtgctgtgctttccattgttgtctcattaccctgtccccttctctgcctagaggagtattggctgctcatttgttattattcataaccagtctttaaggtcatatcttgaggctttcctaactccctgtcacctttgcctttgtcccctcaccctccccactctacacacacacacacacatacacacacacacacacaatttttttcctgagacagggcctcgccacatagcccctcatggctcaaacttgcctcactatgtacactaggctagcctagatgtgacatgtgtgtggaggtcttgagttgagtctctcctcctctgggtagtgaggctggcacccagtcactttcttggcacaatacttaaaactattctctcattctttgtttgcccaacttgtctatttcctctttagcattaaaattttttttaccatttcattgttttatatttaagattggatattacatagacaagtgtggttttggctcctgatcctcttgtctctaataaatactacttgaattctaggattatcaggatacattgctatgcctggttaaacatggatatttaaggcttcatctccaccgtgtgtgtgtgtgtgtgtgtgtgtgtgtgtgtgtgtgtgtgagagagagagagagagagagggagagagagagagagagagaggggaaggtttgatccgtagcactggctgtcttgttccttatcatgtagctcaggcctctcttcagctcatggtggtcttcttgcctcagactcttccatttagactgtagactcctgaaactaaggacatctcactactcatattgataatcctatagtacatagtgtctggttactagaatgtgtcaatatttaatccactcataatctgacttctgaccactgtattttcttgttgctttattcttagaagatgaataagggtttcaaattagcaaaaattattttcttgtttgtttttatttttgtttaacaagataggaggatttcactgtgtaacaggccagttagtcactttgtagaccaggctggccacagattcacagcgattcacctgccactgccttcccagtgctgagattaaaggtgtgtaccaccagtattaaaaaaaaaaaaaagctatttttaaaatttcccccatccatagtatctatgcagtatttaataccttacctccttaaaatagtatttaatatactttaacaccgcctgtaactttaaacccttgttctccatggcacagtactcccgtgcttggaatatttcctgtcaatgctgctgttttgtcttcctagggagtaatgatgatgatcatctctaacctgaatcctccgcctgcctctgcctcccaagtgctgggattgaaggcatgtgccaccactgcccggccctttttacaattattttaattaatatattttcttatttatttatttatttatttatttattgggagggggaagacttaccatgatgcacttgaggcagtaagagctcagcttacaggtatcggctctctccctccaccttatgagagcaaacagatggtcaggttcaacaagcagctttagccaccagccatctcactggctctatgtttttgtttttgttttgttttgtttcttttttagaaattgtacccagggtctggagagaaggctcagtgattaagagcacatacttttccagagttccaggttcaattcccatcatttatgttaactgactcccaactgcctgtaactctagctccagagggctccatcacctcaggcctctgcagcacctgccctcatgagcacatacccacaaatgtgtgtgtgtgtttatatatatttaattaattaaaagtgataaaccgggagagagggttcatcggttaagagcactcactgctcttcagaggacctgagtttggttttcagctccatatcagacagctcgtaatagtctataacttgccgggcgtggtgctgcacacctttagtcccagcacttgggaggcagaggcaggcggatttctgaggccagcctggtctacagactgagttccaggactgcacagagaaaccctgtctcaaaaaaagcaaaacaaaaaacaagcaaacaaaacaacaacaacaaaaaagagttgttagccctgagatcctgtcacattctaatctgtgacctagatctctttctttgtagcaggtcccagaaactcacatctttaccaggtaattcccaggtcctgtggagttctcccaagccttgctgtgttattatctgttgtctttctgctcttgcacaggccctgggtttgactctcaggacccacatagctgctcgcaagagtctgtagctccagttctggagaatccaacactgtcttctaaccctgcaggcaatagtcacatatggtgcgcacaaatgcatacaatcaaaacacccacatacataaaattaaaatttaaaaaaagtttttattgctagtagagttaaagaaatagtttaaggatggcacccacccaatgtggggaaataacaagcttaaaaattctttagagccgggcgtggtgccgcacgcctttaatcccagcgctcaggaggcaggggcaggcggatttctgagttcgagaccagcctggtctacaaagtgagttccaggacagccagggctacacagagaaaccctgtctcaaaaaacaaacaaaaaaaattctttagagcagctgtccttacaagcattatttgaaagtcctaattctctgcccttggttttcttctgcgggtgggaatcgccagacctctcccttctttttgacttcgcccttggataccatgaaggccagaggctggaaccaagatggcgtagaataggtgctccttggtcatctgtacctctgagggccttcacacactgtgggcattgaaaaggcctctgcctccctgcttctaacaaaatgggcagttatatatatatatatataatactatatattatatataaatataagagcataaagaccacagtaggagttttgaatgtacaccaagtgcggtttctaagaggccaggaaagggtactatttgtgtgtgtatgtgttttttttgttttttttttgtttttgttttttttttttttttgagataaggcttctctgtgcagccctggctatccaggaactcgctctgcagatcaggctggcctggaactcaagagatccagctgtctctgcttcagagtgccaggactccaccctgctgtggactttatttatactacttaaaattcactcttgaagaataaggtgtagaaaataaagagagaggggtctggagaagttagtatttcagtggtcagaggtgagtgggagtagtgaagcctaagaagtttaagtctgtgtgagtgccttgaggactgtagaatccatgagtctatttgtcctcttgctcatatcccaaacctgaaatgcttccctgtttctgttccttcaaccatatccacaattccatgtgtataaagccaggttatcttccaccagtctcaactgatgctgtgtccttcataaaatgtttatgaatcacccaatcaaaaataatttcattcaaactaggtgaagagactcatttccaccacttgggaggcatgcactgagttcaaagaccctgtgtcataaaacaaaaactaaaagtaattttcattctccaagccatttaggtttaaatgtgaagtcatacttttttttttttaatctacattataccacaagttaatgggaattcttttttttttctttttttttaatgtaaagttactagctattccttttttttttttttttttttttttttagagatttatttatttatttattatatgtaagtacactgtagctgtctttagacacaccagaagagggagtcagatcttgttagggatggttatgagccaccatgtggttgctgggatttgaactaaggacctttggaagagcagttgggtgctcttacctgctgagccatctcaccagcccttaatgggaattcttagggagaaaaattgcttacagtctggcaagatggttcaccaggtaaaagcaggtaaaaccatgcaagcctgagggcctgagttaaagctctggagccacataaggggaagggggagaactaactccatgccgtcagttttctcctgatgtgtgtgaggagaaaacacacacaataataaatgatacattttaagaattattaacgctcagctacagagagtttgatgctagccagagcagccctgtctagaaataactaattttttggtttgtttgttgagagggtttctccatgtagctctggctagcctagaacttgctctgtagaccaagctggtctgcaactcagagctccccctgcctcttcctctctcttaagtactaggattaaagatatgcactatcactgcctggcacagcataacattttatatactgtgtgttttctaaacttaaacaccacatattttgttgaaattgtggcacatagtataggacctcttttgtttgtgttatgtgcttgagttcatgtatgtgcacggtgtgtatgcaggacccctgaaattctttgaaaaaaaattaagggtgtattgtatattcagtcatgtatgcatgtgtctgtatgctacatgtgtatgggtacccactgagaccagaggcattggaccccctggagctgggattccaactcaggaccccccccccccatcctttagaaaagcaatacaggctcttacatgcagagggaagcatctctctagcctctgagaatgtcataacacacattttgatggtattcaccccctactcctaccctttagctcctcctagatccagccctccccactttgatgtctttttttttttctttaaataacccactgaatccagtttgtgccgactcttcaagactgggcaatccactggactgaccctccagtggctgtgccttaaaaaacaaaaatcagtctgtctctttctctctctctctctccctctccctctccctctcccacaaggtcagttgtcagttagcagtcagaggacggctttgggagttagtggttctctctgtggagaccagctcaggttgccagctcaggttgtatagcaagtgtgtgtcgtgtgttcacggagccgcctgtccagcccctgaaggatttgtttagatgctttttaatttttaagatttttttcttatgttttgggtgttttgtctacatgtttgtctgtgtaccatttgtatgcagtgcatgtagagatcaaaagaggatgttggattctcccagagcaggagttacagacaactgttagctgaaacgtagttgcagggaagtgaacccaggtctctcaaagaacagtcagtgctcagcagctgagccatttctccaaatccttgtttgagattttttgtcatctttaaaagatgtatttttccattcttataaaattgaatataaagttggtttaatttagctatctataaataacaccttaatttaatttaaaaaatttttttaaattttttcttacgctaaagtcctaagatttggattaactaaccagaggtgaagtacttgatccctcctcactcctccgatactcagtgaaatcctacatattattgtttgatgattagctagcatgagtgtcctagttagggtttctattgctgtggtgaaacaccatgaccaaagcaacttgggaggaaagggtttatttggcctacacgtccacatcactcatgccagactgatttaaaatactactggatggcagatttattcattgccaaaggttctaaaacaatcttttcagtaaaggactcatgtcacagacatttcttgatgcataccatgtgccagatggtaaggtcctggactggcattcacagcctacatatcctctctcctgcaccagcacactcttcagctcagccagactagcatcaccgcctacaggcttttatttatccagatggattttatgtgttgtgaatgttttgtttgcatgtatgtccatgtacagtgtatgtgcctggtgcctgtggaggtcagaaaagggtgtcagatcctctggaactagagttacagatggttacgagcctccgtgtgggtgctgggtctcctgcaagagcaaaaaacagaggctgtcttaacctctaggccatctctccagcccctcgcccgtctatgttctttgtttcagagggaacttctccttcaaattcatcttcctcccttcctctctcccttccttcctctcttccttccttcctagtgtcccttgtagcccaggctggatttgaaattgctctgtaactgaagctcagccttgaattccagatccctctacctcacctctaggtcctctgaacaaatgaccaaagcttttaactgcttcctcttttcggttccagcctggctcttgttattcctgtcatcacctgtctgactcacctgaagaactgttttactgctgggagcatggctcagtggtgcagtactggcctgctatatacaagttcagtccccagaatctcctccccccccccgcaaaaaggaaggaaggaactctttattccccaagttcttatgcccaataccatatctgtttgctttttactatttatcacctccaactgctgtatcatatcttaaccatattttcttttaaaattttttattatgtttttgctgggtgatggtgtttttaattgctgagccatctctctggtcctctaaaaattaaaattaaaagaaaatttaattattttgagtatgttttatttagtgtgtgtgcacacataccatgatgcatgggtggaagccagagttgggtctctcctttcaccatgttggtcctgggaataaactcaggtcccatggtacctttacctactgagccttaaagatttctatggggctggggatgtagctcatttgtagcatgcacaagcacccagcaccatgtaaaccaaccctgtatagatagactgaattgatagtatgagaccagcctgggatatgttaggccctgtctctgtctgtctgtccgtctgtctctctctctctctctctctctctctctctcacacacacacacacactttaaactttatttgtatacagtactttgatctttctaagtgggaataattcttgagcccatgacatgattcagtgggtaaagtgcttgagcaaacctgagaccctgaggttaatccctgggacccatgttaagatggaaaaagagctgacttctgaatgttgtcctcttgatgtctacatgggaaccttggcatacacaccccataaacacataaataaaaagcatgaacaagtgtcctttgcatccacgtgtttccatgcctttgtaatccattttcctaaaagttttggttttttttttttttttgaagtctgtttgaatgaaacctctccctcagtcttccttgctcttctctgtgtacttcttgccttggccccgacagtcgggtttctttattgcttttgatgttccctttgccttggacttcctcagaatgccatctctccctggtctgtctgcacatgttacttaaaaacagcagcagcagcagctccatggggcaaggatagtatgctagtcaataaataacagaagagggaagttgctatgagaaatgccttagctaagtggactctatcatcggaggtgggagatgcaagttcaggtctgcagagcgagccttacctttcatcaggatggatggatgggggctgagggagctgtgcatttatagtctcaccttgggagaggcttgagaatgagagactaactctagcttaacttctgtcgttacaggcaagtacattgcctcaacacagagacccgacgggacgtggcgaaagcagcggagggtcaaagaaggatacgtgccccaagaggaggtcccagtgtgcgtggttaggcttaacaaggggtttttaatgggttcctacacaagtatagcatattatgccgtggagttcagggatgaatcgtctgggcccgaaagaaatggaaggagggacaacggtctcgggagaggaaggagctgggcttgaggggtgagtgggggtctccccaactggtctggttcctttgacctttgttctccaggatccatagtcagcaatcagagggccagggccacgaattctagaactttcctatagaccagggactctgaagggcagagaaaacaggaatgtcatgggaaggtgtgaggtgggagaagttaggctgaggtgagtcctggaagctttagcatctctgtttcttgcagctatgaaaacaagtatgtgaagtttttcaagagtaaaccagaacttcccccagggctgagccctgaggccaccacaccggtcaccccatccagacctgaaggtggtgagacaggcctctccaagacagccaaacgaaacctgaagcggaaggagaagaggcggcagcaacaggagaaagaagcagaggccttgagcaggactcttgataaggtgtctctgggagacacagcccagatacctagtgctctccaaggcccccaggccacgcctctagctgcctctgatccatccgactctgctgccaccacagagaaagccaagaagatcaagaacctgaggaagaagcttcggcaggtggaggagctgcagcaacgcatccaggccggggaggtcagccagcccagcagagaacagctggagaagctggctcgacggagggttctggaggaggagctggaggacttggagttgggcctgtgaggcttcaggagtaggggagtggactgcagaacaaaccatggggtgctctggggtccagggagtgtgggccgcagcagtcaggaggggtacccccatactgactcacctccacctcctgtggcccgactccgtcctccagagcctaggctctctttcatcccttccacttcttctcagctcctgtttttggactttccccttccatcccagtgttcacaatctgagtgccgacctgaggtacctctgctgctgatctgggtgtcttgttgaaaaggaaaccgggggggtgggagtctgttagcgatctgaggctgagggtatagcagtacccatgttttggagtcttagttcctgttcacagtgtttatgaattacttccctgaccatcccgatttccccccaccccaccccccacgccccttaattttttttttttttttttttaaagaaaagaataaattgaagtagatgacatgtggtcaggctttggctctgttctcgactcttgtcaatatggtgaaagaagacactgaagttttaatggagctagggattaaacccagggacttgcacatgctagctcttctacatccctaacccttaatattttaaaggtatacttacaactgtggtagtacacacctgtggtaggactttggagacagagacaggattgtcagcattccaaggccaacctggtctacagggtaagaccatctcaataaagtgatatatggcaaaattagacctcagtaaacacaagttagcgctgaaatctagtgaaatttagaagaaggttaatttgacactaatgtatgtgccattgtgccacacagcagtacatctgctgtaccttcctcattgcttctgaagataactggctgacgtcagatgctggagcaacttttgaaatttcaccttggatgctacctaagacgatatcggggcaaagtaatgacatgtcaagatctatccagaagatctgctgtccatctcttgtcttatccatgctgcgcctttgtcacagactactgggaaccgtggtcagctctcaggaattcagaggccctagcttcacttagaagtcccaccaaaatcaaccctgttaaatccttaccccctcccagcccctttaaagctttcggatctttgagaatccttcccttaccattaccctcacccttaaacattagctaagctacccatttcttgtgtgttccatgtgtgtatgcccatgtcaatgtctgtgtgcggtgataccacacaaaatgtggagaagacattcaccttgctcttcgaggcaaagaccctcattaggcctgggctcgctgattgtgctaggctggctgacttgtgagcctcagggatccatctgtgtcttcctccctagagcagctccccgaggcccctacccctcctaggggtaaactcctgactgagctgtcttccctgcctatcatggttgtccacattgtcatgtttgcttatttcccagccaccaacttagttagttccttcagctcctaagccagttggttagtttgagacaggatctctgtataaccttggctggcttgtaactggaattcactgtgtggatgaggtaattgtcctgcctctgcttccccagcactgggcttccaggtgtggggtactgcattcttagagcctaacagttaaattctcaaatatccaactgaaataaggcttgaaaccatgcatagaaaagaacacggctaataataaatacttagcctgggaacagttagagaccaacgtctgggttcctttttgtaggaacctgacaattactatatatgtagtttcccatatgttatgagaaacagacatatgtatacaggttcctgaaggatagggtgggattgaagttagatgtcagagtgcttacctagtatggacaaagtcttgggtgtaattcccagaaccacataaaacagcaagatagcacaagcctacagtcccagcacgacgagagtagaggcaggagaatctaaagttaaagacaccacaggtcaaggcaatgcccgagtcctcactgctaatgtgagacaaaattttgagcaataaagctccctcaggcaacacctaccccaggactcctgagtgtcgtgtgctggatacttttgtgtcaacttgatataaactaaagtcatgagggaccctcaggaaaatgcctccaaaagacagggctgttggcaggcctgaagggcatttcttaatggatagtgctatctctgggctagtggtcctgggttctatcagaaagctggctgaaccaactacaagggacaagccaaaaagcagtatcctgccatggcctctgtgcctgtgtcagcctctgcctacaggttccttccctgtttgagtttttatcctgacctccttcagtgaggatcagtgctgtagaagcataaaccaaataaactcttccctccccaactttctttttttgaagacagggtttctctgtatagccctggctgtcctggaactcagtctgcagaccaggctagccttgaacacagaaatctgcctgcctctacctcccaagtactgggattaaaggcgtgcaccaccactgcccagccctccccaactttgtttggtggtgtttcatctcagtaatagaaaccctagggcaccccctataagaatgaaaaattaagtaacaaaggccatcctcagctgccttggatcctgcctcaaaatcaaactttttgttgttgtgttttgttttgttttgttttgtttttccaagacagggtttctttctgtagccttggctgtcttggaaccatctttgtagaccaggctagcctccaactcacagagatccaccagcacctctcaagtgcttaaaggcacataccacttccccctggccgacatgaatgagtttttaaggatttttttttatgcttctatgtctatgtgaatgaatgtcatcggaacacaggtcaggtgcctgtggattccagaagagggtgtagggctccttggagttggagttacaggtagttatgagttgtctgaagtgggtcctggtaactgaatttaggacctctgcaagaacagtatacttttaacctccgaatcatttatgtagccctgataaaaatcctttattaaagccagctagaagccgctgtggtagaacacaccttaatcccagtactcaggactctgaggcagacaggtctttaggagtttcagaccagccagggctgaaactgtctgaaaaccttgtctcaaagggggaaaaaatgaaaagtaacaggcataactgctgctatgtgtttcagttaattttcaattgccctgactgagataccatgaccaaggggacttagagaagagttagtttggggtttcagaatgttaagagtccatgatcatcatggaatgggagcatggtagcaggcaggctggcaaaggcctgattaaaggtttgtgccaggccctcagactgggtcttactatgtcacctaaactggcatcctcctgcatcatcatcccccagtgttgggattataggcatgtaatggcaaggatagcatttgaatagcgtgactaacactgcatgaaaatctggcagtgaagactcggcctgcatttgcaggcaggtctcagggtgacaagtatgtggccaacatgctttcagttttgcagggtctgttttcctccacagaagaacatttacgtgtaaggcaggagtcttcaaaacatggcccatgagactggtgaatttagagcctaccatcctgaaatatgctactttaacatattggttattttaagttgaagaatttagctggtctttgctacattgtgggatcttctttttccccaccctttattctccctccccctccatttcaccccatcactagataggagataaaggagagagggaagagagagggagggagggggggttgtttgaatctaatttctgtcttatttcttctttgagtatgattactaacaaaccacaaccaacatccccgaacgaccaacaaccacccaccctacctttcatggtcccagcatttatatatataccctccaaaaagttcccaaaattccaaaggtcacacaatcacagaaactatcaacagctggcaaaaccatgcttctgctagagcatgaggcacatcataatcagctgccgtgacacatccccaaatccccacacgtcttagtcagggtttctattagctcaacaaaccactatgttacctggcatctccaaaactgctggggtcccttgctgcaactgggctgcactttcatcagtagcctctcataggcttttcccggtgccaagcctcagcttctctacatgaccctttcagccctgggcctccaaccgccactgaggctgcatcttcatcaatgacctctcctggcctctcacagtgccaagcttcagctgctcttcatgaccccttcatgctttcaaaacaagtaccacctgggtaacccttatatattaccaagtccagctgccaacgtgaagtacaactgtggctgcctctggaacacagcttctctgtgctcccaagaaacacttcccagaagatttcacctcagtgatgccggtctcttattaattgtcccagtaaaacaaaggtttctctttagtagttctggtactgtgttaatcacagctgattcttcagccccagctaaccagaaccatagaatatttgcaatcaaaatagaaatggctctgagagagccttcagtcttccctctgaaatgccacaagccaggcatccattttctgcacagctctcaaaattcttatcttccaagctcctacagaacattgccgccatggtcataacactcaatggcttttctagcccaaagttccaaagtccttccacaaatcctccccaaaacatggtcaggtctgtatacagcaaagccccactaaactggtaccagtttgtcttaggatgtctattgctgcgacaaaacaccatgaccaaaaagcaagttggggaggaaagggttgatttggcttacacttggaaatcatagtccataattgtaggaagtcaggacaggaactcaagtagggctggaacctcgaggcaggaattgatgcagaggccacggagggtgctgcttactggcttgctttccaagtcttgctcagcctgctttcttatacaactcaggaccaccagccaaggaatggtacaacctacaacatgccaggccttcccctattgatcagtaattgagaaatgccctacagctggacctcatggaggcatttcctcaactgaggctccttcctctgtgatgattctagcttgtgtcaagttgacacataaaaccagccagtacaccacacgtaggattaaaacaaaaacacatctttataatatttctgtgctaaaactccagaattctctctatggaagaaaatacaatattggtgctctttgtttcatctttcttcctgaaagtagaccacaaggcagactgcaaaggtgcccccttaccaggaggaaggggagacattcttaccagagatggggaactgaggctgagagaactctaacacaaacaaaccctgtgagctaggtatggtggcacaagcctgtactcccagcagcacttgggagatggatcttggaggatcgggagttcaagtcatccttggtcaaaaggtaagtttgagaccagattgggtggtgtgagactcaaaataaaataaaataaaataaaataacataaaataacataaaataacataaaataacataaaataaaataaaacaaaacaaaaatcaaccccaaaaggaaagttcctctctccacatttccacagctgcccaatctctcctcttatcacatttttaaaaagatttatttattttatgtatatgagtacacactttagttgtacagatggttgtgagccttcatgtgattgttgggaattgaacttaggacctctgcttgctctagtcaatcccacttgctccggccaaagatttatttattagtataagttcactgtagctgtcttcaaacgcaccagaagagggtatcagatcttattatgggtggttgtgagccaccatgtggctgctgggatttgaactcagtacctttggaagagcagtcggtgctctgacccactaaaccatctcaccagcccctcttgtcacatttttgtagttgatttaacctagggtataagctctcagccctcgctgctactttgtattgtcatcaccctcctgaaggtactccctgcacacataaaaataacccaacacaacttgtgtgctttcatctgctattctaatactaacttgattttcagacccagtcagagtgtgagagagttaattgctctcccttgctttatggctgtaataaaaactctgaccacaactaacttatagaaagtgtatttttttttccatttggtctaaagccgatgaagcaaagccaaggtaggaacttaaggccacaggggttttgggcttggtggtccacgccttcatcacagcacttgggaggcagaggaagaagcatttctgtgagttcaaattcagctttgtttatggagtgagtcccaggccatccagaactacataaggagatcccagtctctaacaaacaaacaactccagaaccccaccaccaacagcagcaaggacaggattgctcactgactgttccctgcttctgttcagctagctttcttatgcaacctaggaccacctatgacagtggttctcacccttcctaatgctgtgaccctttaatacggcccctcatgtggtggtgatccccaaccataaaattattttgttgctacttcataactgtaattttgctactgtcatgaagtataatgtaaatctctgtgtctttaaaaaatgatctatttatatattttatgttgtcagtgctctatctgcatgtacacctgcatgccagaagagggcatcagaacttattagagatggttgtgagccaccatggaattgaacttaggacttctagaagagcagccactcttagccactgagccatctctccaacttcttatatctgtgttttccaatggtcttaggtgacccctgtgaaaggttctttcaactcccaaggggtcgtgacccacagattgagaacaaatagcctaggaccctctccacttatctcagaaaaaaacgccccacaaacacacccacaggctaatctgaggcaagcagtccttcaactgagtccctcttcccatccatgaccaagaatatccatcatactggtaaaggagaaatttatttcccccacaaaatcagttgaggaagtcacaactagtatgtcattgccgagaagtttctcgtcttgccttgtgtgtagctgccttcttatgtagagtcacacacatggcttttcctgagcttatcatcctggaaagaatcccctttgattagggcacaaatcttattaaaggttccctatctcatgacctcatttaaatctaattagtgccttaaggtcttgcttccaaatgccatcacagtaagattataattcagcccatatgtccgtgtgtgtgtgtgtgtgtgagagagagagagagagagagagagagagagagagagagagagagagagttgcttttctttgctcatggtgtgtcatcccccccaccccccttatgcaggtaacaaaggttaggaatttggaagtgagctgttttaggactggtcgttttggcattagcttgtattggggtttgctgcccactaggtggtaccgagaggccaagtggtatggaaattttcctcaacctgcttgttttcaaagcagcagataggtttgtttttttcctgtacagaaactttctaaaacctatgtttgttcgtgtgtatgtgtgtgtgcacgggtgtgcaaatgtcactgagaggacatcctgtggaatcagttctctcttttctgccagtccagaggattgaacgcaggtcgtccagcttggccaaaagcacctttactggctgccagatctggccagccctctctttgggttttctgaggtgggatctcatgtagctcaggctgtcgtaaaaaatttcactgtataactgaggatggccctaagctactgatcctcttgtatgccttgattataagtagactcagtacactgggtaatcgttttttatttagtctcccaagtacttaaggaaatggtatctacacctttcatatgtcttcaaaattaacccaagtacacatatcaagaatagagaatctgttattaagagtgtagtagtgttgctgggaggtggtgacacaggcctttaatcccaggactctggagacaaagggaggtgatctcaggtccagactagccagggtgacatggttaacactttctctctcaaagagagagtggtggggactggggctggggatatggtcagttgctacactaaagaactttgaaatagtcttttatttatttctttttttgaaaagagtcctttttttctcttcctgggttttatttttttttttaattttgatttttttttttccaagatggggtttctctgtgtagctctggctgtcctggaactcactctgtagaccaggctggctttgaacttagaagtccacctgcctctgcctcccaagtgctgggattaaaggcatacgccaccacaccccacttttttttttttttaattttgaaacaaggtctccctatgtagtcctggttggctcagaacttgctgtcttggaacaggagagatccacctgcctttgcctcccaagtactggattaaaggtgtgtaccactatgcctggctcccatatgcaattttttaaaaaaagaattatctattatatgtatgaagacactgtagctgtcttcagacacaccagaggagggcatcagaccacagatggatttgagctaccatgtggttgttgggaattgaattcaggactctgaaaaagtagtcagagctctcaattcctgagctatctgtcaagccccccaactgttatttttaaggagtagaaaggtagacaggtggcagtagcctttaatcccagcattcaggaggcagaggctggcaaatcttttgagtttgaggccagcctggtcttcagagtgagttccaggacagccagggctacacagagaaactgtcttaaaaaccaaaaccaaaacaaaaccgaaacaaaacaaatgaacataggaaaaacaaaaaagaggaggaggaggaagaagaggagggagaagagaagtaaggaagagaaggagagagggagagagggaaagagaggggaagagagagagagagggagagagaaagagggagagagagagagagagagagagagagagagagagagagagagagagactgtaactgggaacaaagttgacttctgaaacctcaaaccctagttattcacctacgtcaaggtcacgcctcctagtccttcccaagcagttctaactactagggaacaagcattgaaacacatgagtctgtgaggccattctcaaactatcacacataggaacactgagattatagacttgctctctgggttctggggatcagaatgctggtcctccagatggtgtggcatgcacttttacccatggagtcattcccccagcttctaggataaaacctcattatgtagcccaagctgatcttgaacttgatatcctgctatctcagcccatgccaccgtggctgactatgcacttcttcttctttactctcttttcaccactggccacccttgtcagcttcatagcagaaggtcaggaccctcacagatcagttccttctgatcttaatgaccactattctttatgccatggctagtgattgactagaaattcttcacccattccaacacttagtttctaaagctctctgaatttttttctcatgtacctctaatctgctgaccgatgacttttgttttgaaagtggatgggggcgagttaagaatacgtgtactctttcagaagacccaggttcaactcccaggattcatatggtggtttatgaccattcatgactcagtgccagggaatctgacaccctcttctgacctctgtgggcactgggcacatatgtggtacacatatacattaaataaaataaatattttttttcagcttttagcaactttattttccttccatcttttttccctttgctcaggcacctgcacagcagcgcaggaccactcagtggtggctccaacccactcagtggcctgcgctgtgggagctgctgaccaatcctcagtggctggctgtgtactccagtcttctgtggggaactgctggatgggcacagagggaacctgcacaccctcagactagtcggccacctcaggctgagcagcagtgaactcaggagctggtgcggtcca

SEQ ID NO: 2634 - DNA, 1159 bp, Mus musculus
cagtactgagcagcaggccaagaagttacctcgccggccgctgaatccccagggctgcccgccccagttcagtcatggaaaccgccagcacccccgaggccacggggacaggcaagtacattgcctcaacacagagacccgacgggacgtggcgaaagcagcggagggtcaaagaaggatacgtgccccaagaggaggtcccagtctatgaaaacaagtatgtgaagtttttcaagagtaaaccagaacttcccccagggctgagccctgaggccaccacaccggtcaccccatccagacctgaaggtggtgagacaggcctctccaagacagccaaacgaaacctgaagcggaaggagaagaggcggcagcaacaggagaaagaagcagaggccttgagcaggactcttgataaggtgtctctgggagacacagcccagatacctagtgctctccaaggcccccaggccacgcctctagctgcctctgatccatccgactctgctgccaccacagagaaagccaagaagatcaagaacctgaggaagaagcttcggcaggtggaggagctgcagcaacgcatccaggccggggaggtcagccagcccagcagagaacagctggagaagctggctcgacggagggttctggaggaggagctggaggacttggagttgggcctgtgaggcttcaggagtaggggagtggactgcagaacaaaccatggggtgctctggggtccagggagtgtgggccgcagcagtcaggaggggtacccccatactgactcacctccacctcctgtggcccgactccgtcctccagagcctaggctctctttcatcccttccacttcttctcagctcctgtttttggactttccccttccatcccagtgttcacaatctgagtgccgacctgaggtacctctgctgctgatctgggtgtcttgttgaaaaggaaaccgggggggtgggagtctgttagcgatctgaggctgagggtatagcagtacccatgttttggagtcttagttcctgttcacagtgtttatgaattacttccctgaccatcccgatttccccccaccccaccccccacgccccttaattttttttttttttttttttaaagaaaagaataaattgaagtagatgac

SEQ ID NO: 2635 - protein, 201 aa, Mus musculus
MASTPEATGTGKYIASTQRPDGTWRKQRRVKEGYVPQEEVPVYENKYVKFFKSKPELPPGLSPEATTPVTPSRPEGGETGLSKTAKRNLKRKEKRRQQQEKEAEALSRTLDKVSLGDTAQIPSALQGPQATPLAASDPSDSAATTEKAKKIKNLRKKLRQVEELQQRIQAGEVSQPSREQLEKLARRRVLEEELEDLELGL

SEQ ID NO: 2636 - DNA, 1159 bp, Mus musculus
ggatgaggactccacttccggcggggaggggggcgggaccccagcccgctcacgccggaagtggttcgggttctcaagatggcgactccctatgtaactgacgagaccggcggcaagtacattgcctcaacacagagacccgacgggacgtggcgaaagcagcggagggtcaaagaaggatacgtgccccaagaggaggtcccagtctatgaaaacaagtatgtgaagtttttcaagagtaaaccagaacttcccccagggctgagccctgaggccaccacaccggtcaccccatccagacctgaaggtggtgagacaggcctctccaagacagccaaacgaaacctgaagcggaaggagaagaggcggcagcaacaggagaaagaagcagaggccttgagcaggactcttgataaggtgtctctgggagacacagcccagatacctagtgctctccaaggcccccaggccacgcctctagctgcctctgatccatccgactctgctgccaccacagagaaagccaagaagatcaagaacctgaggaagaagcttcggcaggtggaggagctgcagcaacgcatccaggccggggaggtcagccagcccagcagagaacagctggagaagctggctcgacggagggttctggaggaggagctggaggacttggagttgggcctgtgaggcttcaggagtaggggagtggactgcagaacaaaccatggggtgctctggggtccagggagtgtgggccgcagcagtcaggaggggtacccccatactgactcacctccacctcctgtggcccgactccgtcctccagagcctaggctctctttcatcccttccacttcttctcagctcctgtttttggactttccccttccatcccagtgttcacaatctgagtgccgacctgaggtacctctgctgctgatctgggtgtcttgttgaaaaggaaaccgggggggtgggagtctgttagcgatctgaggctgagggtatagcagtacccatgttttggagtcttagttcctgttcacagtgtttatgaattacttccctgaccatcccgatttccccccaccccaccccccacgccccttaattttttttttttttttttttaaagaaaagaataaattgaagtagatga

SEQ ID NO: 2637 - protein, 202 aa, Mus musculus
MATPYVTDETGGKYIASTQRPDGTWRKQRRVKEGYVPQEEVPVYENKYVKFFKSKPELPPGLSPEATTPVTPSRPEGGETGLSKTAKRNLKRKEKRRQQQEKEAEALSRTLDKVSLGDTAQIPSALQGPQATPLAASDPSDSAATTEKAKKIKNLRKKLRQVEELQQRIQAGEVSQPSREQLEKLARRRVLEEELEDLELGL

SEQ ID NO: 2638 - DNA, 45851 bp, Homo sapiens
  misc_feature (1)...(45851): n = A, C, G or T/U
ttgtttgtcccacctctccctttttttaaaaaaaagatttactgatttttttgagagacagggtcttgctctgtcactgaggctggagtgcagtggcatgattactgctcactgcaccttgaactcctggcctcaagcaatcctcccacctcagcttcccaaagtgctgggactacaggtgtgagccactgccctcgacttacctttcccctttacctttcctccctttagctcctagaccagcctgactattctccaccaatttcccccaacctgcacaacgtgtgactcaagttaattctcaaccccaaatccatactagtttgatttttctgccagaggcttagcccagtcctacctgcttgaccataccttttgtcacatttgtctcatttaagcagtgaccagtctcaaaggattgaaacagtgccaggcttaggtgtctgggaacattatccacttcgagatagattttcaggaattgctggaatccctcgtacccaatggcctataatgagagtgagcattatcctggggagtctgcaaggtcagagctggggctgaagaattgggagtagcggggacagggataataaatgcagagctgagaagcatctgaggcaggagtatggtttctttgattaagtcctgagttaatagaatcccttgttttatcctaaagcaatagtcagagtgacaatggacactagggtatctctagaggggatagtgaggggcaggcccagaataattcctggaagttggggatcaaaaacaaagatgggaagagttgatcaagaagaagatttcccagctgccactcacatctccttggacatatttagccatctcgccatcctcgaagagctttaggacatcactgacctttttggtggagtctagggtgtagagagagtaagagaacagcattattagtccagctgagttctcttgccagagaaatccagcaggaaaaaagattcaaatgagatgaagaaattccaagaagaaacacagaaatacagagggaaaaatatttcagatcctccaaaacagtaccactctttactcctcttctctgagagctggagcaagcagtccaggtatagcgaaggtgggtagagagccgagaccttgcacaatgcagcccagttagactgtggtagatccggatctttttctgacatctccccatctcccactcctcccatttccagtcatgggcacatctgagcagcacactgctcaaagccactgaggaagctggggggcagggggtgtaatgaggaggaggagggattctctggggcagggtctccagaactgaaggcctgacaggaagactcacattccatgtatttttgcagctgggcaaaatcactggggcttattaggcccctctccttggccatctgtctatttttctcaaggatggccagaaaggcagcttcgtagtagtacttccgttgcttggacctcttcagagggtaggcctggggaaaggtgacagagcgtacagtgggaagagccagctgtctgggtgtcttttcttctgtctgttccattctgtctctactcccactattattttttgttctttccttctctcctagtccctccctaaacatcttcctttccctgtgtccctcttccctatgcctctaccttccctgacagtgtctgtcctctgtctctgtttctctgactcatctctgtctctccatttctggatccttctccctctcccccaacctatcttgattcatctgaccaccctcaccttcccacccgcacccggctttctcagtctatatatgtttctgtgggtgtgtcccttgtctgtttctgcgctttcttccaccatcgtcaatctctgcagactctccccatcctgagctctctcccatctcgggtcttcggcagttccggcagttccggccctctgagtgactcttactgcgttagcgcgtcttcctggccatgaccccattttgttccgcctctggccagggaccccagctccgctcagccacccactccccgagccacccacgccacgcaacgacctctagcgcttctgacgcgcgacacagaaccagctctggcaaggtccctagccccggccccgcctggactgcgttccgcggagctccactagggaagggtggggaactaggcgcggggtagggaagaggcaggggaagagactctgggtacccacagagtctcttcctcagaagagggttctgggatactgacatcctagagaaaggactctacccatctggcacttttcaatgactataatccaacttctgctgccaacagatctagtgtttcccagtcctgggacgatggagccgagtgctagtgtctcggctcctgggaacttccttccactccgctaggtcagcagtgcttagggagccccaggttttggctactggatccagggaccaaggtgcagtgggcgactttccttgattcagtaatgataataacatatcttacgttaatataatacagcacggttttggaacagaactagatcagtcatatctgggtcccattcttagctctgataccactgtgtgacttggggaagttatatctgcaaaatggggagaatgagaaccatttttcacagttgtgtggcttacgtaaaacaatatatgaaaagtcactcatacaatgcctgacatttaggaggcctacaagaaatgctagttattattgtactaacaattagaatcaaatcatcagacataggaaattattggcataaccattctacagatgaagaaactggagctcagagaagcttggatttcctaaggcagttgatagatggaaaatccaaggctccagcccaaggccatgtggtagtgcctctgtttgtccctctgccctcctcttgttccactctctcctcacaccccgccatctggtctcactgtgctcctttctgttcctcaggcatgccaagctctcccctgctcaaagcaatgagtcttactgttctgtctgcctgggatacccttcccagtatgtagtgggtgctgaatattggttgtacacatgattgtgtaaagctggggattcataatttggggctattaatccaaatatggttacatgggaataggatgccagagtgtccacctgacagtcagaggaaaggagataatttgtagtacatagagtaggtgctaaataaatatttgttaaataaatgaatgatgctgaaaagcacttattgactaccccatcaaacaccctgatctccacccactcatttagggcttgttgggtaagggaagcagtttgggtgttcaagaacagcctagcccttttcctttctgatgatgcaagaactttctctgcagcctcttcccttgggacatctctgctgcctacttttatgcagcacaccattcctattccagcagctctctgggaacactcagaagagggttctgggatactgacatcctagagaaaggactctacccatctggcacttttcaatgaccatagtccaacttctgctgccaacagacctaatgaatactaatagtcttatggctaatggggcctctatagcttaattagcctctctgattacccctggggattctaagatgactccaaagttctaggaaatggaatctgagggagaaagtgacaaggagggagcaaacaagttacaatgcaaaggagagaggacaggcttcttctctgcctctctttttacaatgatctaactctttcttgctccttcctagctccccaggtcttaaacctggagaagtagtatacagtagaagttaagagaatggacttgcaaattggacaggcaaggatcagaatcctagctctttaaaaggtcatttcatctccctgagcctcagttttctcatcagtaaagtgggcacctacagaaatcagtcgcaatgtgggcattaaataagatgatatatgcaatgtacttagcaaacagcatggcacagaataagaactcaatgaacatcagctattatcattattacacaagggtagtacctagagaaacatttctggagattaggaaaaatgatgtctttgaaccaggaaggcataaatttcagggactgctagcatcagtgaagcccagttgtacgtcttaccccttgttattaatatatctgtcaggtgcaaacatgtagtatcaggattctgaactttgcctctgggaggatgacgaggtggctagagctagactctcagggttcaaggacacccctgggctggaatcttggaaacgagtgctcctgggatcttttcagtggttttcttgacttctctgactgaaagtttagctatccctggagctgaagggcagcaaactgtgggatcctggggacttgaagacctagaacaagtccattttttttcctccaggtccatcccaaccctgaggctataacctgggctagtctaggcgaaggccagggctgggagggtggggtctgctgccagcctgccagctatttgtgactcacccttcccttccctcctctggtttccctgcccgcccctacccaattggggcgagaaaggaagaagttgacttggaggcagagaatcttagaacatccacagagctgggagtcaccaaccctcgtattttacagaggaggaaattgaggcatagagagagaattactctcttaagggcacagtcagactctagacacccatccttagtacattccactaaatcttagagctcatggctctctggatctaattttaaacatcaaatactaaaattttaaccaagagataaatattgtttccaaagcctgtgttagtatttaaagtttccttttttcacttaagcgttcattgctcacattccaagtcctttaagtcgaccattactcaggaaatagctatgtctccagaatattgaggctgccccagaggggcaggagccccgaatttgagggcccaggcctgattacctggacttctgaattccttaatcacatcatagactgtatcctcctcctctccctgaccgttgctgctagtaggtagccctcaagagggaatcatttgcttgaagcctcaaaacttattaagcctccacaaacactgaagactgcagtgctacacctggctgagggggttgtgtgtgtgtgtgtgtgtgtgtgtgtgtgcgtgtgtgtgtgtgtgtagagggtgtcattgcgtagtataggaggaagttacgatactggcatggttgggggatgtgggcttgtctgtgctgaggctgaagagatgcccagtaatatttgccattcttcctcaggaaggctcatttctcctatcaaggtgaaaagtgagattcagactcaggtattttcagaaacttcccagtgacaggtggggagaggatggggtgggaagttggggacctggaggccaaacaagaacccttctccacccgtgcggcactgtggaggttccgaagaggacttccctccgagtcgggtcccaggaaccgggcttcaccatccctccgaatgagcgggagggatggaggggaaggtctgggaaacgttacccaccgggttcgggcccagccctcccgctgcacccccgcgtcccagcgcagacccttctcgatacccgctccagctgtcacgcttcctccttcccgacccagcagcacgaacgcagcccgtgggtcctcggcttccctacccctgtccttttccgatgggggagggtggggcgctggggggctcgcggggtctctaccttgcttgagagggctcgcggtcgcagctgaagcgccggcgctggagctggagcccgagctgggctggaggggacgggccaggcagacgcggccgcagcggggccgccccgttcctgacgacatagctgcccgccccccaccccagcctgcccgccgcgcccgcgcccggcgcccccgactctgggaacttcgaagttggagaggcccgtttctaggtttccagttcaccataacctgctccaccctccctcgaatatgtccggggctttggacacattttctccatttgctgcgctcctcatcttcttcccgcgccggcggcagctctgcttctattttcccttctttctaatcactcacagcctctcccttcatcccaaacctgggagaccaagataccgggcgggccgctaacagaacagctcggcagttgggcacccaaccaacgtctcattctctcctgattgctgccatcctgaacttccctaaccaactcccttccatccaccactgacttcacactcaggagatcccacgggggcaagcccagagtcccaaactccacaacctgaccaaacacctccctcccgccccgggctctaccctgcttgagacaatctccccaccttcttcacgttcctctttccttttagacctattttccccagtctaaggacacctcctgtcaagactcatgttctctccttaattctagggtggagttttgcactttggtctatgtccaccctttctccacgccctcatcctcccactttacctgctggtcttggcaggtggcacagaaggccctggccaaaagtagggagtgaaaggtcctttcagcttcccctgcctggagtctcttctagagtcattaaggctcttggggtcgcatggatggtggtgaaggtggtacagcaagggagagagatggaggcctagggactcactggcaggaactggagacccaggcatcctgctcactggccccgccccaacccctgtctaactccctcctacccttcattgaaaatggggcagagtaacaaagccttaggttcctggaatcgtccttcttacacctgggggtgggaagaagggggaggggagacctctgactagaagggtatatgcatgtgtgggtattgtgtatgcatacatacacacacataatatatacatacttttggtgggggttggaaagggaatgaatacatgaggccctctagtggaaacagggatatctaagcagttcttgattgtttcaagacaggcttgttggaacagactcctccacatttgccagaaatatagctgctgagtaatagggtttgggagtattgttgtatccaaactggagatttcgggcataggttgaagaggggtctgtctctctgctcctgtgcccctccaagtctcaccctctcacccccaatcataaaaagacaagggccaaaggccgggcgcggtggctcacacctgtaatcccagcactttggcaggctgaggcaggcggatcacgagatcaggagattgagaccatcctggctaacacggtgaaaacctgtctctactaaaaatacaaaaaattagccgggcgtggtggcacatgcctgtagtcccagttactcgcgaggctgaggcaggagaatcgcttgaacctgggaggcagaggttgcagtgagccgagatcatgccactgcactccagcctgggtgacacgagcaaaactctgtctaaaaaaaaaaaaaaaaaaaaaaaaaaacaaggcccttgacactccccatcctgtctttacagtattttcttcactgttagcaaagcttcatctctccttcctctatgacctccttagtcatagtaaacaaactcttctgaaggccttttatacactaagtcctgtacttagttctgcaatacaagcaaaaacatagtccagtttagggactatatcaatgagtggtgcaatgtgtgtaaagcctctctgctctgagctactttaaacaaacatacaatgtaagaataggtcccctaacacctctgcctatcagttttctgtccctggatctttcatttagaaatcttggaacgatattaatctctaaggcactcagctttccttgcaaagaatgctcaaagtaatgccaccctatgtattacctgtgtttctcactctatcgtctttagatatgtccctaaataaagttgaagacactccttttaagatagtttttggtacttcaaagtggggtgtaatgttatctctcgaataaggaataaggtggaatcagtcttactctagacttctttgtgtcttctttaggatctgtgctccatcataccccaagtcagttactggggggtgtgggtgggggaagaaaagccaagaaacatctaagaaggaggcgtttaatgcctacggttccaggtgctcatttctttaatcaaccacatcataaaaatcagaaagaaagaaaccgcaatgaacaaagggaaaggaaaaaacaacagcctgttctccccggccttttttgccctgttcctcctcagggtggggggccacatccggggccccgggttgggtcccaggcaggtctactaagcagacaattgagtttcacttcctgtcaaccctagtgctgaggcaggatgtctgggggtgggaagggggcctagggttggtagtgaacaggggcgactttaggtttccctcctgcacaaaggtctattgagcagcctctgaaagctgcagagaccactcctgaggtagttcagtcaagaccaacgtatcccattagttcttagaggcttcatcccacactctcacgtctaatcataacaaggttaaggacaagatgttagaccctgcagggctgaagtacaatcggtgaaaagagagcaagggtttaagaccacagtgtcacaacacttgcaataacagtgtatcgtatgcaaatactttttatttatttattttgagactgagtcttgctctataatacaagctggagtgcagtggcacgatcttggctcactgcaacctccacctcccaggttcattcctcagcctcccgagtagctgggattacaggcactcgccaccacacccggctaatttttgtatttttagtagagatgggatttcaccatgttggccatggctggtctcgaactcctgacctcaagtgatctgcccacctgggcctcccaaagtgctgggattacaggcatgagacaccgcacccggcctggaaatactttttaaatgagccccacccccagacattctgaattggcctctagtggaagtcacagacatggaggatgggaaggaaggcaagctgcggcccccagaaaacttctgaggcctaatttgtcttataaaggtcctagtcagccattgctcagttttttagttttttttttttttttttttttttttttttgagacggggtcccactctgtcgtccaagctggagtgcagtggagcgatcttggctcactgcaacctccgcctcccagattcaagaaattctctgcctcagcctcccgagtagctgagattacaggcacccgccaccacgcccggctaatttttttgtatttttagtagagacggggtttcgccatcttggccaggttggtcttgaactccggacctcgtgatccacccgccttggcctcccaaagtgctgggattacaggcgtgagcaaccgcgcctgggttttgttttgttttttaaatgggacatgctgcctagtgttggaggtagtcaccaatacttacctcctgcctcctccctggttccaggggtactgctggacattaaactaagccaaagtggggatataagcaggaaggtaaaagggttgataaggaaaaagctatatgagggtggaggagggcagagttgacacctgaggagaggaacctgcagccgggctcctctcaggctgtaggggaaacaagtttaacaggacttagccctgaaggaacaacagttgctgaaatgggcggcggagggagaccatatgggttcgtctgcagaatagggaggtacggcgcagggcaggactacaaatggagtgacactacgggaccggattattggcgagttgccccgctttagatcctcagcggttggacgagtttaattagaatactaagtaggtccgcccagaagctttcaccctgccctctgaccctagggcccagcccgaggaggcactcagggttaggaggtctgggcgagaagcaactagggccctcatcacttcgccgccgaatccccggcgccgcccagcggggcagagccaggccagggccgcccgcccaacctggtccgctgcctcttcggccatggaagctgccggcagccctgcggctacggagacaggtgaccgacccgcggcgccctccgccttgcacgcccctcccgcgggtctctggtggttgagtgggttggccgacagcaatcggcacacgaattcgacctccccaccttcttagggttagatagggtctccaaccgtccctagaaacacttgtgcgccccagtgcgttcctggagtttgtctgctccacgtcaccaagccgctctgagatctgggtgcaggccagagcctggatattcttcctttcttcatttataaggccccctttttgggtgcaggtgggccttgcgcccttttccctcgcaggtcctggacgtacgaggagttcctggggatgagagggactgtgcctcggaacttctcttggctccctgaggactgttttacaggcagcaagcgctcagtaatggtatcggtggcagtaaaaagcccacggctttattttattaactatttcagcttctccactcttcctcctcctccacctccgcccatgaaatggtgcactctccctttaagactaagatggtggcttgctacgatcgggactccacttccggtggggaggggggcgggaccccagcccgctcacgccggaagtggtttgcgttttcaagatggcgactccctatgttactgacgagaccggcggtgagtgcgggaggcgcggagccgcttctctccgggctctcggggcaggggttcggacttggaaaggggtctgtgccccgcccatcccggggcccctcctttgccccgccccccggaccgccttccccattcattctctcctacggggtgtctcctgcgcccccttctggtctcgtgtttggggtctctgcttccggtcacccaaaccctggggtccttcagtgctggtccctgcttcaggaccctcacgggcccttagcttttctccagcagttggaccactcatatctcttttaggttcttcaggcttgggggcttctacactctcatttccctccagttcctgccctccttcttttcccctcccccatctcagctatacttggtttctgccctaccccagtcccgttttcattatttttctcgaagctttatttgctgaagacctcctcgtttctacatagtaccttttcctctcccgtatcttcatttgttgggtcactgaggtttagaggtgtgaagggaagaggaccctaatacaactttcagcttgagttttctccctgatggagccacccttcgctaccttctcccgtgatggtgatagaaattgaggggtctaaggtgggaaaaggcaaacaggaaagtatctagtggcttttctccgaagccctttgacaagtgaataaaacccactattccttctggctagagaagaatttgcagcctggctggccgagatgctgaagtgtctgctgtgtatgtaaggtgtatgtgttggaaacggagaatcacagcttttatcatggttttgtcccttcctaatggcctcatctttaggaaaatatgcatagtagtaatagctactcaatgatgatcaaataatatatgtaaaagcaatttataaaatactgtgcaagtgcaaagtgtttctgtttttgtagccctcatatgtgtagtctgtagtctgtagaagcaacagtgtgcctgtgccttggtacacacggtgttttaaaatgtgccattttgcttcttgctctgctgctttccatgttccttacacctcagcccacctattttatggtatctgatgacaacccaggttgctgctacttctccccaacctcacaatttaaagtggtactacctctttccttctgttctctacccagtagctccttcatgaattaccaacttttaatgtgtgttttgaaaatactacttatccagtatacttctctttactcttaatcattttctttaccctgactccgtgaaaatccaggtatcacatcttaccttaccttgtcactaaaagctgttttctgttttccgtgactatgtggaagagaaaaaggaataaactgcttttttgttttcctttactatgtccagatcattgatctaccactgtcactctaatcctcatggaaggtattgccatgcaattatagcagtttctgtaaaactttagtgtcatcatttactgcccacagggacccagacctattgcatcatatttttttctctcctttttttcttgctatcattttcagtgtctccagcaccattggaatattctgatttcatagttcctcagcatgagacggtcgactttcctttgtattttcaaaccagttgcacatcagaatcactacaacctggatctcatctaggacaccgctttttcttcagctgctccccatcactttagcctccttaccagtcacctatttcactatcttaaacccacaggatcagctttttgtcctcaagttctctggttcttgaccttcccatttcattgaatctgtcagtaccttatggcctttggtgctgcccagctagacctctgtgaccagccactttgataatatcctcttgctttctttattcattttgattttctatactaagcaggcacttctgttgtctctaatgatgggtatgattagagatgttttcttggcttccgcttctaggccacagcatgttgctagagaaaaagtacagagctatcagattcaatataacttaacttctgccaagatcatggcttctaattatttttttctttttaaaaaaattttttgctgggcatggcggctcacgcctataatcccagcactttgggaggccgaggtgggtggatcaactgaggtcaggggttcaagaccagcctgaccaatatggtgaaaccccgtctctactaaaactactaaaattagctgagtgtggtggcatggtggcgtgggcctgtcatctcagctactcgggaggttgagacaggagaatcgcttgaacccaggaggcagaggttgcagtgagctgagttcgcaccactgcactccagcctgggcgacagagcgagactctgtctcaaaaataaataataaataaatatttaaatttattttttatgttcttccatagctgtttccccaaccttttccagatctgtgtgaccatcccttttaattctccttcttttggcagaagacttcatttttatttcactgaaaactcaaggcctatcatttttgtttcctttttcttcacagccagattttgtttgtttctttctttttttaaaaatgaagcgatgcagacttgctatgttgcccaggctggttttgaactcctggccttaagtgatcttcccacctcagtctgccaaaatgttgggattacaggtgtgagcatgcacctggccccagatttctcgaatatgaagaaatctcctgatatttctgtttccttgctgcctatttgttcttaactctttgcagtcattatttctagcactaccctctctcgagttgcctatgcctttttctaattgtttcgtgaatatcttcactcttggatatactgttatacctcaaatccaacctgaccaaaaccagtatcagtttttccatcactatttctgttaaaggcaccattattctagccaacccaaggtaaacttttgtatcgtttctttttttttttttctttgagacagagtctcactctgtcgcccaggctggagtgcagtagcgcgatctcggctcactgcaacctccgcctccctggttcaagtgattcttctgcctcagcctcctgagtagctgggattacaggcacatgtcaccacgcttggctaatttttgtattgttagtagagacagggtttcatcatattggtcaggttggcctcgaactcctgacctcgtgatctgccagccttggcctcccaaagtgctgggattacaggcatgagtcaccacgcctagccatttctttttttaatattctaaatatacttgattttttagaacacttttagatttatagaaaaattgagaagatgctacagagatttcccatataccctacactcagtttccccattactgtcatcttacgttaatatagtactttgcttgcaattaatgaagcaatattgatatattactattaactagaatccatacatcatttcattagttttgttttttttttttttcagacagggtcttgctctgtcacccaggctggagtgcagtggtgcaatcaccatttactgtagtcttaacttctgggctcaagtgatcctcacatctcaacctactgagtagctgggactacaggtacacaccaccacgcctggctaatttttgtattttttgtagaaatgcggtcttgctctgttgcccagtctgatctcaaattcctgggctcaagcaatcctcacgccctggcctcccaaagtgctagaattacaggtgtgaaccaccatgcctggctgatttccttagtttttacttaatttatttttatatttatttatttattactatttttttgagacggagttctgctcttgttgcccaggctggagtgcaatggtgagatctcagctcaccgcaacctctgcctcccgggttcaagtgattctcctgcctcagcctcctgggtagctgggattacaggcatgtgccaccatgcccggctaattttgtatttttagtagagatgggtttctccatgttggtcaggttggtctcaaactcctgacctcgggtgatctgcccacctcggcctcccaaagtgctgggattacaggtgtgagccactgcgcccagcctttttacctaatttttttttgttgttccaggatcttatccagggtactacataacatttagttctcatgtctctttaagctcctcttggctgtgacattttctcaggctttccttgttttccatgaccttgagttttgaggagtactggtcaggtattttgtaggatatccttctattggaatttgtctgatgtatttctcatgattagatttgggttatgtgttttggggaggaagaccacagaggtaaagtgacattttcatcacattgtatcagggtacatagtatcacaatgattttttactgttaatatttttgtttttttgagacagggtcttccctctgttgcccagactggagtgcggtgatgccatcatggctcactgaaatcttgacctcccagtctcaattgatcctcccacctcagcctcctgagtatctaggaccacaggcgtgtgctatcatgaccagctaattttttttttttttttttttttggtaaagatggtctcactatgttgcctgggctggtcttgaactcctgagctcaaggtattgttcccctttggcctaccaaaattctgggattactaggcatgagtcactatgcccagcctgttagtattgaccgtgatcatctggcagagatattgtttgtaaggcttcactgtaaagttaggctttacccccttcctttccatactgtagggaagtcactattgccagcccacgcataaggagtagagagttgtgctctccttaaaaaaagagattaagggctgggcatggtggcatatgcctgtaatcccagcactttgggaggctgaggctggaggattgcttgaggccatcctaagcaacatagcaagacctcttatctacaaaaagatttaaaaaaaaaacgagctgggtaaggtggcacacacctgtggtcccagctactcagggagcctcagaggggaagattgagccagggaggctgaggctgcattgagccgtgattgtgccactgtactccatcctcagtgagaggctgtctcaaaaaacaattaaaaaaacacactatttggcatttttctgcccaggagatttttttcttttcctttattaatttatgtatatcaatatggacttatagatgtgtattttatatgttaggttataatccaatactattttatttgctttattgctcaaatgttccagttttgaacattgggaactcttttagttttttacttggcccatctccctttgacatttgccatcattgcaggtatgattttgttctctgctccagtcctgcggtctgccatttctccaagaagcccttgttctttttactaaagagtaatgttaaaaactaagatctgatcactaggtgtttttatttctatgggagtatttttttttatttatgggagttttatttttttatgattatttttattatcatcttttacttctctcttgccctcctcatgtatatcagttatcaaaatatcattcttttattcctactgctgttacccttatcccatctacagtacttgttagctatatagccttgggaatctaagtcttagttttctcatcaatgaaattggaataactcctgcaacacaggattattatgcgtattaaaatttaaataaagtaatttacatgtttggcacataaaaagtgtccaacacattgttctataattattactattatgtaagggtcattgtatgggttagaagaaattactatatatggccaagtaccaggcatagtacttgggccattccaagtgcctgctaaaattctagtttctgttgttctgcaaatattactgtgacctcctaaactggtcatcgtatttccagtccctctcttgtttcatttctacagatacactgctaccagattactgcttcttaagtgcaaatttagttatgtaatttttgttcaatattaattcatcaacccagagtctgctgttatatatggcatatatctttctaaactgttttaaacatagcagaaccagatggtatatacatttttatatcttgccttttcatttagccttatgaggtaaatgtttttccttgctattaaaaactctgtaaacatcttttaaaatactggcagagtgttttatagtttgggcatgcaccctatcttactttcttctgttattggacttttagattgttttcagaatttttattataagaacactagaatgtttttgtgcatgcatctttttcggcatttagggttattttctttttctttttttttctttttttttttttgagacggagtctcgctttgtcaccaggctggagtgcagtggtgcgatctctgctcactacaatctccacctcctgggctcaagtgattctcctgcctcagcctcccgagtagctggaattacaggcatgcacccccactcccaggtaatttttgtatttttagtagagatggtgttttaccatgttgtctaggctggtcttgaactcctggcctcaaaggatcgcccaccttggcctcccagaatgctagaattacaggcatgagccaccgtgctcggcctgattttttaaattatctgtaagatgaggtcttgctatgtttcccaggcaggtctccaactcctgggttcaagtgatcctctcaccttggcctcctgaagtgttgggattataggcatgagcaactagtttttcttttccttttttttttttaaagagacaaggtcttgctctgttgcccaggttagtgtacagtggcacagtcatagcttgctgtagtcttaactgttggggtcaagcaattctcctgcctcctcctcctgagtagctggtactagtactacaggcatgcgccaccatggctggctaatttttgaatttttttatagagctatgttgcccaggctgttctcaaactcattttcacaagcagtgctcccaccatggccttccaaagtggtgggattacaggcatgagccactgcacccagcctagtttttcttttttctttttcttttttttttgagacggagtcttgctctgtctccagtcacccagactggagtgcagtgacgcgatctctgctctgccaactgggctcaagctattctgcctcagcctcccaaatagatgagattacaggcacgcaccactatgcccagctatttttttgtatttttagttagagatggggtttcaccgtgttggccaggctggtctcgaactcctgacctcaggtgatctgcctgccttggcctcccaaagtgctgggattatagacgtgagccaccatgcctggcccccagcctagtttttctaagcacatatgcatatataacattaaggtaaaatgacatattttgaattatactgttaagattggctgttattttctaaaatatgaatccttgaaacacctagtaatcttctgagatgtgacacaaaataaataactaaaatagaggccgggagtggtggctcacgcctgtaacctcaacactttgggaggctgaggcgggtggattgcttgagcccaggaattcgagaccagcctgggcaacatggcaaaacctcgtctctactaaaaatacaaaaaattaactgggtgtggtgacacacacactcctgtagtcccaactacttgggaggctgaggtgggaggaattgcttgagcctgggaggtggagactgcagtgagtcaaggtccagctattgcactccagcctgggtgacagtgacctcatctcaaagataaataaaataaaatgcaaataatgtttctgtgcacaaattttgagaaacactgtaaaccatattcccatcttgcatatgtacctgaataagaacatagtaactcatttaagccttgctgttaaaaaaaacaaacgcaaaatcttttttggtgtttaacccagaatttcccaaacttatttaacaatttttagggataacccctgtttaatatcttatgggagtagtattttacataacaaaagctttgggaaatgtgattaaatgataggactaccttttttatttttgtttttttgagatggacgcttgctctgtcgcccaggctggagtgcagtggtgcaatctcggctcagtgcgacctctgcctctcaggttcaagcgattctcctgtctcagcctcccaagtagctgggactacaggcacgtgccaccacgcccagctaatttttgtatttttagtagagacggggtttcaccgtgttggccaggctggcctcaaactcctgacctcaggtgatccacccgccttggcctcccagtgctgggattacaggtgtaagccaccatgtccagcctaatttttaaattttttatagagatggaggtcttaccatcttacccaggatggtcttgaactcctgggctcaagtgatcctcctacgtcagcctcctagtgtgctgggattacagacgtgagccaccatgcctggcctatttgttgatttccatttttattttagatttagaaaatgtgcaggtttgtggttgggcgcagtggcctctaatcccaacactttgggaggctgaggcaggcagatcgcttgcatccaggagttcaagaccagcctgggcaacatggtgaaacctcttctctacaaaaattagctgggcatggtggcgcacacctgtaatcccagctacttgggaggctaagctgggaggatcacttgaacccaggaggtcaagccagcagtaaactgcaatcacaccactgtactccagcctgggcaacagagtgaaactctgtctcaaaaannnnnnnnnnnnnnnnnnnnaacccgggtggatcacaaggtcaagagattgagaccatcctggccaacatggtgaaaccccgtctctactaaaaatacgaaaattagctgggtgtggtggcacgtgcctgtaatcccagcactctgggaggccgaggcgggcggatcacgaggtcaggagatcaagaccatcctggctaacacagtgaaacgccgtctctactaaaaatacaaaaaaaaacttaggcgggcatggtggcgggcgcctgtagtcccagctactcgggagactgaggcaggagaatggcgtgaacccgggaggcggagcttgcagtgagccgagatcgtgccactgaactccagcctgggcgacagagcgagactccgtctcaaaaaaaagaaaaaaaaaaaaaagaaaatgtgtaggtttgttacatgggtataattatgtgatgctgaggtttggggtatgagtgatcccatcacccagatagtgagcttagtacccaatagttaagttttttttttgtttgtttgtttgttttttgtgatggagtcttgctttgttgcccaggctggagttcagtggtgtgatcttggctcactacaacctctatctcccgggttgaagtgattctcctgcctcagcatcccaagtagctgggattacaggcatgcaccaccatgaccggctgagttttgtatttagtagagttggggtttcaccgtgttggccaggctggtctccaactcctgacctcaggcgatccatctagcttggcctcccaaagtgctgggattacaggcgtgagccactgtgcctggccccagtagatagtttttaaacccgtgcccgcctctaataatccccaatgtctgttgctgccatctttatgtccgtgagtacccagtgtttagctcctacttataagtgagaacatgcagtatttggttttctgttcctgtgttaatttgcttaggataatggccctcagctgcatccatgttgctacaaaggacattattttgctctttatggctgtgacagactactttttatttaattaattaatttttttttgttttgagatggagtcttgctcttgttgcccaggctggagtgcaatggtgcgaccttggctccctgcaacctctgcctcctgggttcaagtgatctcttgcctcagcctcccaagtagctgagattataggcacccaccaccacgcccggctaattttttttatttttagtagagacgggctttcaccatgttggccaggctggtctcgagctcctgacctcaggtgatccacccgtcttggtctcccaaagtgctgggattgcaggcatggtgagccactgcgcccagctgacaaactactttttaaatttttttttatttttgagacagagtttcactctgttgcccaggctggagtacagtggtgtgattgcagtttactgctggcttgacctcctgggttcaagtgatcctcccagcttagcctcccaagtagctgggattacaggtgtgcgccaccatgcccagctaatttttgtagagaagaggtttcaccatgttgcccaggctggtcttgaactcctggatgcaagcgatctgcctgcctcagcctcccaaagtgttgggattagaggcatgaaccaccacgcccaacctcagactactttctttttttctttttttgagaccgacttttgctgttgttgcccaggctgtggagtgcaatggcctgacctcggctcaccgcaacatccacctcccgggttcaagtgattcttctgcctcagcctcccgagtagctgggattacagacatgtgccccacacctggctaatttttgtatttttagtagagacggggctttctccatgttggtcaggctggtcttgaactcctgacctcaggtgatccgcccgcctctgcctcccaaagtactgggattacaggcgtgagtcaccgtgcctggctgactacttttaaatgtagtattatcacatgctatgtttttgcccataccctctagtgaaactgggctgtatggctgatgtggaacagcagtgcgatggtgtgtaagctttggcatcagacttgagttcaggttacagatatgtgctacctttgggatcttgaccatgtcttttttttttttgagctggagtctcactctgtcacccaggctagagtgcactggtgtggtttcagctcactgcaacctctgcctcctgacttcaagcaattctcctgtctcagcctcccgagtagctgggattacaagcatgtgccagcacgtctggctaatttttgtatttttagtagagatggggcttcgccatgttggccaggctggtctcgaactcctgacctcaggtgatccgcccgccttggcctcccaaagtgctgggattacaggcgtgagccaccgcaccaagacttgaccatgtgtttaacctcttgaagactgtttccttggctgtaaatgatgatatctatctatcgtttagatttaacaggatgatgtatacaaagttcctcctgtaatgtagctacttattaataaatactctttactaatcattcttaaatactgagttttccactgctaggattttgcttttgttgttcctcttatcccctttcccttttctctgcctgcagaaatactggctgctgatttgttgttatcattaattattactactttctagtctttagtgtcaaatgaggttttcctgattatctcctgtcatctcttaggatacttacaacactcttacttttgtcttatgctttgcttgcctaatttgcccacttcctccttacttagtctgtaaattttttgaaaattgggaccatcttactcatcttgataaccctattggcacttacggtacttttcttctaggaggctttttttttttttttttaaagataaactcttgctctgtcgcccaggctggagtgcaatggcatgatctgcaacctctgcctcccaggatcaagtgattctcctgtctcagcctcccgagtagctgggattacaggtgtgtgccaccaagcccagctaggaggcttttaatgtttattttgtttaatttgtagtctggcctctttaccaccgtgcttttctgaggctgtatttgtggagataaccagggatttccaaaatgccaaagccagaacctttttctcagttctcctttccttgatctctctgcagtatttaatactgttaatcacctacctttactttttttttttttttttttttttaggcagagtcttggactgttgcccaggctggagtgcagtggcacgatcttggcttactgcaacctctgcctcccgccttcaagggattctcttgcctcagcctcctgagtagctgggactgcaggcatgtgcctccatgcccggctaattttttctatttttagtggagatggggtttcatcgtgttagccaggatggtctccatctcgtgacctcgtgatccacccacctcggcctcccaaagtgctgggattacaggtgtgagccaccatgcccggccatcacctacctacctttatttaaaactgttggtctccatggcttagcatgtcctggtcttcctttcctatgaatcatttcctgttgttgctgtcaccttttcttccttgagggaaatgattatgatcattatttcagggtcattcctccagctctcatcttctctttgttatattttctctgtgttggaaaccacatccaggtcttattttggccctgagatcatccgcaggctgagacctgtgacttagatctcttttcttatttgaaaaaggtctcatacctttaacaaccatgtcccctacctctttggagttcctccatgccttgctatgttgtcttttcactgtctacctgcaacccctggaaacaaggaccctttcagtgtaagagtttttattgctgacagacttaaggaaatagattgagaattaaaaaacggcagatgtgagaaaatgacaaagcttaaaaagattcttacagtagcagtccccaatctctagtttttgactctctgcaagatattatctgaaagtcctgatattttgcccttggtttttatttctaggggtgggaaccgccaaacctctcccttctttttgacttcacccttggataccatcaaggccagaggatggaaccaagataacataaaataggtgctcctttgtgataatgggctatttgtatctctgagggcttccacacaggatggccattcaagaagcttctgctctgcctttcattacagtctatctttagtcctcctaaaccttcagctataatctctatgcaatcaacttaaatatatgtttgtagtattgtccctttctcccaaattccatgtaaaacacttgcctgaattgaattgtttccacaaagttgttttcccctgtggactttgtttatatcagtagtttttattttcccaattttccaaattcaagagtgataattataaatagttgtgttcttgtttgttatctttctcactagaatgtatactctaagaaggcaagaaccttgcttgctttattcattgttgtattcctagcttctgttacagtgtctggcacaagagtaagtgctcaataaaaatttaaaatccacgtgtgaataaatgtgattaccatgtgccctaccgtatattgagaaaaataagaatacatgtgaaaagcacgagattaaatccactgtgtcactgttttgattatttcctctctaattcacatcttggtaagtctttggatcctgttgatttaatcttcacaatgaatttctccttcattttcctttcattacctgtagaaaccatcgaagtcaagtcttttcacattgcagctgttgttttcattttctctacctttagtttatggtacacatttttcagtttaatcttaaatcattgctttgaacagatcacctgtactcccttattggccatcagtattctacagcttaaggcttcagtccaaactcagtggaggttggagacctttcatagtctcactaatttaccctgagtctcttttcacgttacatatgctttttgcccagaacattctggattcttgctcttccctgatgagatactcacatttattcattaattcagtccatatttactgtcttctgtgggccaggctctttgctacaaagttcaaagacagtttctgctttccaacaagcaaataattatgttaagcattagagcatgataaaagctaaaacaggtgctgcgagtgcacagaaagcaagttttaacctggcttggcgtaaggaagtcaggaaggctgccttgagttgatacttgaatttgacctttaaagaccaatgggaatgaacttaagataagcaaatatagtctattccaggccagaggaagcaaaagcaaaaaggtacagagaatagagacatgggtcaggttgagatttgtgaatattttagtttctattttttttttttcttttgagacggagttttgctcttgttgcccaggctggagtgcaatggcgtgatcttggctcactgcaacctccgcctcccgggttcaagtgattctcctgcctcaggctcccaagtagctgggattacaggagcttgccacagtgacctgctaatttttgtattttagtagaaatggggtttctccatgttggccaggctggtctcgaactcctgacctcagatgatccacccgcctccgcctcccaaagtgctgggattacatacgtgaaccactgcacccagccaaatatttgtttctagagcagagagtatggtggctttatgctaagaggctgaaaactagcaagaggtaaatcaagaaggccttttttttttcccccctcttgcggagttttgctcctgttgcccaggctggagtgcgatggcacgatcttggctcactgcagcctctgcctcccaagttcaagcaattctcctgcctcagcctcccaagtagctgggattacaggcgtgagccaccacgcctggcctaatggaaatttttaacagaaaagttatcttatcaccccaatagaattttcattattgcatgttcttttctttttttaattttttgaggtggagtctcgctctatcacccaggctggagtgcagtggcgtgatctcggttcactgcaacctccacttcccagactcaagtgattgtcccaccttagcctcctgagtagctgggactacaggcatgcaccaccatgcccagctaatttttttttttattttcgtagagatagggtttcaccatgttggccgggctggtctcgaattcctgacctcaggtgacccacctgcctcggcttcccaaagtgttggcattacaggcatgagccactataccctgccttgcacattattttcaaaaaagtttttaaaatagagatagggtctcaatatgttgtccaagactcaattgatcctaccacatgaggactaagctctgactttttttatcttgccaaaattcctatctaaggggtctggggagtcatgccctacaaaccataagttctcatcagatgggttatttaaccctgtatctcccctcccctcccctccccttctcttttcttgatggagtttcgctcttgtcacccaggctagagtgcagtggcgcagtctcggctcattgcaacctccccctcctgggatcaagtgattctcctgcctcagcctcccgagtagctgggattacaggcgcccgccaccactcccagctaatttttgtatttttactagagacagcgtttcaccatgttggccaggctggttttaaactcctgacctcaggtgatccacccaccttggcctcccaaagtgctgtgattacaggcgtgagccaccatggctggcctcgttacttacttttcaatttgactctgacataacaagaaaataaaaatattttaccccaaaacatgtttcttgccgtatcttaaaatggctctgcaaagccgacctttgtaggggaaactgcatctgtaaaaaatctctattaacaggccgggctcagtcactcacacctataatctcagcactttgggaggccgaggcgggtggatcacatgaggtcaggagttcaagaccagcttggccaacatggcaaaaccccatctctacttaaaaatatataaaaattagccggacgtggtggcacacatctgtaatcccagctactcgggaggctgaggcaggagaatcgtttgaacctgggaggcggaggttgcagtgagcagagatggtgccactgcactccagcctgggctacaagagcaaagctccatctcaaaaaaataaataaataaataaaattctgtattaacatagctagatctatttcttccaggctctcccaatgccgaagaggttaactaaaagtctagcaccttttaaagaactgaataggaaacgtttgtcatctgttgtctctaagggtagccaccataagacttcaaaagaaccttggtctccacaatcttttatctgaacctgaacctttctatcgatctcaggcctttagacaaactcaaccaattgtcaaccagaaatgtttaaatttacctatagcctggaagccccctgctttgagtcatcccacctttctgaaccaaaccaatgtatttcttaaatgtatttgagtgatgtctcatgcctccctaaaatatataaaaccaggtgtggtggctcacgcctgcaatcccaacactttgggaggctgaggtgggtggatcacctgaggtcaggagtttgagaccagcctggccaacatggcgaaaccctgtctctactaaaaatacaaaaaattagctgggcgtggtagtgggctcctgtagtcccaggtactcgggagactgaggcaagagaatcacttgaacccaggaggcggaggttgcagtgagccaagatcatgccactacactccagcctgggcaacagggttagactgtgtcaaaaaacaaaaacagtaattagccaggtgtggtgatgcgctgtagtcccagctactcggcaggctgaggcaggaaaatcactttaaccggggaggcggagattgcagtgagccgggatcgggctactgcactccagcctgagagacagagtgagattccgtctcaaaaaaaattttatatatatatatatatatatatatatatatgtataaaaccaagccgtacctcaagcacctagggcacatgttctcaggacctcctaaggtcagtgtcagaggccatggtcacttatatttggctcagaatctctaaaaatattttacagagtttgactcttttcatcaacacaggtcaccctcctgagtagctggtagcacaggtacatgccactaaccatacacagctaatttttgtatagttcgtaaagacaggggtctccctatgttgctcaggctggtcttgaatgcctgggctcaagggatcctcccatcttggcctcccaaagtgctgggattacagccatgagccactgtgcctgacctttcgctatttattgataatgcttatcatattcatatgattatctcttcctctcttttttgtttttattttttccgatagtaactgtttatggtaaattgtggacattgagattactaaaataaaaagtgtactgaattatctttgatttcttatcctcttactccttccctagttagtgaattaccaaatgttgattctttgataatgtatctgcccttagtctcttacgttccagtgcccctgtttcagccaattctgtcccttcatgccaggattatcacaatattttttccctaactagtttccatgtctctggtgttttttttttttttccaagtcacccttttattatgctagattaaatactctgaaacactgctttgtataaaggattcattcatttattcaaagccctaagacaatacttcgcataaaggattaattcatttgacaaatatttgttgagtgcatgccatgtgccagatattaaaatctttaactggtattcaaggtctgaacattccagcccttgtctctggctcagcctgactggtctatttgtcgttgcctgaaaatgctatctacattcccatgcgtgagtttttgtttgagaacgaactgtttctaatctactctgtctccctttttgtttagtttgactcttccttcaaagcccagctcttgtctcagtcctccctccaggaagcctcctagttttttttctttggtttttattcttgtcacagctgggcaaaaaatatccatagtagttatgttttactcacccagtaaagtccaaagttcttgaccttgtttttaaggctttctgcgattaccccatttttcatttccaaccaggcttcctattccctaacatgaactgtctcattcacctgaacctctcaactttctgttccctactcacgcccattcccacatccatgcctttctttgctcaagtttgagcccctttgctcatgatttttctttcttccatgccctccacctgtcgaatcacccattgcctttaacaactttttttgttttattttattttttttttggagacagagtcttgctctgtcacccaggctggagtgcaatggtatgatcttggctcactgcagcctccgcctcctgggctcaagtgattctcctgcctcagcctctggagtagctgggattacagacgcccagccaccactcctggctattttttgtattttagtagagatggggtttcacaattttggccaggctggtctcgaactcctgatctcaggtgatctgcctgcctcggcctcgcaaagtggtaggagtacaggagtgggcccgtgcgcctggacttttttgttttaatgtattaatgatatttgcattttgaacaaaaaaccaattcatgtaataatatataattcatgtaggaggccctagacatttattttaaaagtctttttttcttttttctttcttctttttttttttttgagaaagattttcactctgttgcccaagctggagtgcagtagcacgatattggctcactgcaaactccacctcctgggctcaagcaattcttatgcctctgcgtccccagtagctgggattacaaacgtgccaccatgcccagctaatttttttatttttatttattttacttatttttactttttgagatggagtctttctctgtcgcccaggttggagtgcagcggtgcaatcttggctcactgcaacctccacctcccgggttcaagtgattctcctgccttaccctcccaagtagctgggattaaaggcgcccgccaccacgcctggatattttttgtatttttgtagagacagggtttcaccatgttggccaggctggtctcgaactcctgacctcaagtaatccgcccacctcagcctcccaaagtgctgggattacaggcatgagccaccatgcccagccttattttttattttttatttttttgagacggagtctcgctctgttgcccaggttggagtgcaatgacatgatcttgacctactgcaaccccacttcccgggttcaagtgattttcctgcctcagcctcctgagtagctgagactacaggcacttgccaccacacccagctaatttttgtgtttttaatggagatggggtttcaccatgttggccaggctggtctcgaactcctgaccttaagtgatccactcacctcagcttcccaaagtgctgggattacaggtgtgcaccactgcgcctggcctccaatttttttttttttttttcccagacgaagtctcgctctgtcaccaggctggagtgcagtggctcaatctcggcttactgcaacctccaaccccctgtttcaagtgattctcctgcttcaacctcccaagtagctgggattacaagcgcatgccgccgtgcccggctaatttttttttttttttttttttgtatttatgtagagacagggttttgtatgtagagacagggtttcaccatgttgtccaggctggttttgaactcctgagttcaggcaatccacctgcctcggcctcccaaagtgctgggattacaggtgtgagccaccttgccttgccaatttttgtatttttagtagaggcagggttttgccatattggccaggctggtctggaactcctggacttgtgtgatccacccacttcaacctcccaaattgctgggattacaggtgtgaaccgccgcatctggccttaaaaatcttttttctttatttttacaaaagtaatacttaaaataagagagctacaacaaaacatatatatatatatatatatgttaactttctctcttaacatatatatatatatgtttgatatgtattaacagtttggtatgtgtccttgcacacctttttctttgtccctgtacacagactacatgtctttaagtgttgccctttactccaacaagaatagtaccatactggctgggtgcggtggctcacacctgtaatctcaggactttgggaggccgaggcgggtggatcacctgaggtcgggagtttgctaccagcctgaccaatacagagaaatcccgtctctactaaaaacacaaaattagccaggtattgtggtgcatgcctgtaatcccagctactcaggaggctgaggcaggagaatcacttgaatctgggaggaggaggttgcagtgagccgagactgcaccattgcactccagcctgggcaacaagagcgaaactccatctcaaaatcaatcaataaataaataaaataaaatagtaccatactctatatcagcgattctcaaagtgtggttcaggacccttaagggggtccctgagactctttcagaaggtctgcaagcaaaactattctcataatcatgcttatttatttgtctttttcatggggttgactttgcaccaatggtgcaaaagacatggttggtgaaactgctggccctgtaagcatgcatttgtcagggcagtggcaccaaattatactaatcattttgttcttcactgccacacacttgctgtaaatgccagtttcacctaaggatatcattgatgatacaatgaaaatgattaattgtattaagcccagcccttgaatacatatttttttaatgttctctgtgactcatgggaagtaagcatgaaacacttctgctgcataccgaagtaggatggttgtctgaattgcaagctgaacaaactttcttctcatggagcagtattttttacttgaaaaaaaaaaacactgacaaactatggtaattcagacctgactatccaatgatcattttcctgaaaatgaaggaagtgaaagtgaaggaaaacaactgatagtttttctcgccaatgataaaattcaaacacttaggtgaaaattagaattttggaaaacttatttattttatattatatataataatatatatatctattagatatatataataatatatatatctattagatatatataataatatatatatctattagatatatataataatatatatatctaatagatatatatatatctaatatataatatatatatctaatatatatagaaaattagaatttttgaaaacttatttattttatataataataataatatatatataatataaaataaattttccaaaattctataaaatatatatatatatatacatatatatattttttttaattgggttggagtctcgctctgtcacccaggctggagtgcagtggcgcaatctccactcactgcaacctccgcctcgtgggttcaagcagttctccctgcctcagcctcccgggtagctaggattacaggcgcctgccaccacgcccagctaatttttgtatttttagtagagacagggttttgtcatattagccaggctgctctcgaactcctgacctcagatgatccgcccgcctcagcctctcaaagtgttgggattacaggcatgagctactgtgccctgccaagaattttggaaaacttatatttcccattctgagcttgatagcttccatgtacttaaatactttagtgatgagattaatgaatatgatctcttttaaatattgtataataggccaggcacggtggctcacacctgtaatcccagcactttgggaggctgaggcaggcggataatgaggtcaggagattgagaccattctggctaacattgttttaccccgtctttattaaaaatacaaaaaaaaaaaaaattagccaggtgtggtggcaggcgcctgtactcccagctactcgggaggctgaggcaggagaatcacctaacctgggaggtggaggttgtggtgagctgagattgccccactgctctccagccttggggacagagtgaaactccctctaaaaacgaaacaaaatgaaacaaaaaccaaataccctttaaatacatcctcgtgtactggtgtgtatgtatctatggtatgaattcctaaaagttgacctatttttttaagttccatctaaataaaatttctcctttacaacatccgctattgtcatttctcctccccgtggtttttgtgtctttttagcctcttgttcatttactgcctttcatgttcccatgctattgccttggttttttaacaaaattcttcctctgtgcctatcctgtcttacctacaaatagaatcttcttgagggcaaggatggtttcttgtacggtgtattggcactcggtaaataaataatgagagagggattgagtgttggtatgagaaaaggagcctaatggttgcatttggatgaatgggtgctgagagatggtatgtacatttatacattcttgtctcatcttgtaaaatgtttgaaaataagagtaattttcaacttgatttttcttattttaggcaagtatatcgcgtcaacacagcgacctgacgggacctggcgcaagcagcggagggtgaaagaaggatatgtgccccaggaggaggtcccagtgtacgtggttaggctttgcgtaggggttttctgatggggtccctacagaaggatagaatatccttatgcctacaagttcagggaggactctcctaagccccaaggaaatggaaggaggggcaactatctgagaaaggagagaaagagtctgggattcagggatgagtgagggttacagatcactagtcctatacttttgacctctgttcattagaacctccagagctttaggttctagggacttcgctgcatctttcctgcagagcagaggaaagttggggagggaccataaagagagaaaggtggtcaggcccagtggcctacatctgtaatctgagcactttgggaggcctaggcaggtggattacttgaggtcaggagttcaagaacagcctccccaaagtggtgaaaccccgtctgtactaaaaatacaaaattacaaaatacaaacatcagccaggcgtggtggcacgagcctgtaatcccagctactcaggaggctgaggcaggagaatctcttgaacccgggaagtgggaggttgcagtgagctgagattgcgccagtgcacttcagccctggcgacagagcgagactctgtctcaaaaacaaacaggcaggcgcagtggctctctgtaatcccaagcactttgggaggccaagatcggtggatcacctgaggtcaggagttgaagaccagcctgaccaacatggtgaaaccccatctctactaaaaatacacagttagccaggcgtggtggcaggcgcctgtaatcccagctacccgggaggctgaggcaggagaattgcttgaaccctggaggtggaggttgcagtgagctgagattgcgccattacactccagcctgggcaactgagcgagactctatctcaaaaaacaaacaaccccacaaaaacaacaacaaaaaaaggaagcaagaatgtaatgaggatgaagtgtttggaagtttaagaaaagggatcaaaaagtcagtaattctctgaaactcttgacatcctttgtttcctgcagatatgaaaacaagtatgtgaagtttttcaagagtaaaccagagttgcccccagggctaagccctgaggccactgctcctgtcaccccatccaggcctgaaggtggtgaaccaggcctctccaagacagccaaacgtaacctgaagcgaaaggagaagaggcggcagcagcaagagaaaggagaggcagaggccttgagcaggactcttgataaggtgtccctggaagagacagcccaactccccagtgctccacagggctctcgggcagcccccacagctgcatctgaccagcctgactcagctgccaccactgagaaagccaagaagataaagaacctaaagaagaaactccggcaggtggaagagctgcagcagcggatccaggctggggaagtcagccagcccagcaaagagcagctagaaaagctagcaaggaggagggcgctagaagaggagttagaggacttggagttaggcctctgaggcctttggggaatagggaatggactgcagaacaaaccgtggggctctctggggtctgggggaatacgggcaacagcagtcaggaggggtaccccccatactggcttacttccacctcctgcggcccagctctgtcctccagagcctagcgtctccctcaatccttcccttttcttcccaacttctactttttggactttccccctcccattcccagtgttcaaaatctcagtgactaccccaggtacctttgctgctgatttgggtgtcttgtttaaaagaaaatcaggtgggtgggaatctcttggagaactgaggctgagggtagagggagtatgcccaagtcttggagtcttggttcctgttcgcggtgtttatgggttatttccctctccatccctcattttttttttttttttaaaaaaagcaaaaatgagaataaacacaagtagacatgtctggctttgcctccttattttcagctcctagtagatattgtatctcctgagtttggcacaggaagacaagtattgggagtgatttcttttcttttcgagacagagttttgtgctgttgcccaggttggagtgcagtgacgtaatctgggctcactgcaaactctgtctcctgagttcacgcagttctcctgcctcagcctccctcccgagtagctgtgattacaggtgcccaccaccacacctggctaattttttagtagagatggggtttcaccatgttggccaggctggtcttgaactcctaatttcaggtgatcaacccaccttggcctcctaaagtgctgggattttaggcatgagttaccgtgcccagccgatatatatttttttctttttctttttttgtgagatggagtctcgctctgtctgccaggctggagtgtagtggcgcggtttcagctcactgcaacctctgcctcccgggttcaagcaattctcctgcctcagcctcccgagtagctgggattataggcacccaccaccacaccccctctaatttttgtatttttagtagagacagtttcagcatgttggccaggctggtctcaaactcctgacctcaggtgatccacccagttcagcctcccaaagtgctaggattacaggtgtgagccaccacacccagcccaatatttcttttaattttttttttttctcttagaaacttcgttggtcctggagaaagggaggcaaacggcccctgcctcccgccgagtgtccccccagccctcactgtttcccgttgccattgatggggtggttcaggtgctcagtggaggccaggaaggccttgagcttgggccggacgctgaggtgtgccatgtaggccgagagcagggggaacacatccaggcagctggtggccaggacctcatggatcagcaagtccagcaggttgtagtaagcgagggatatctggtcgcccacaatgaaggcctatcctccctggttctgggacggcagggtctcaaaaggcttcagttgcctggggagtgccttcacataagtcacccttgcccacctcgtagttggtatagatgagggtgaggtatttatttatttactttatttttgagacagagtttccctcttgttgcccaggctggagtgcaatggtgcaatctcggctcactgcaacctccgcctcccgggttcaagtgattctcctgccacagcctcccaagtagctgggattacaggtgcccaccaccaagcctggctaattttttgtatttagtagagactgggtttcactatgttggtcaggctggtcttgaactcctgacctcaggtgatccacctgccttggcctcccaaagtgggattacaggcgtgagccaccgagcccagcctgaggtatttaatttttttttttttgagatggagttttgctcttgttgcccaggctggagtgcagtgtcatgatctcagttcacttcaatgtccacctcctgggttcaagcgattctcctgcctcagcctcctgagtagttgggattacaggcgtgcaccaccacgcctgactaattatttttatttttatttttatttttagtagagatggggtttcaccatgttggccaggctggtctcgaactcctgatctcaggtgatccacctgtctcaacctcccaaagtgctgagattacaggcgtgagccactgcacccggccagaggtatttaatttttaaaaattgtgagtttatgaccaaattagcaacactaatttctgcatgtttgctgagacttcagtagacgaattagtgttataatcaaatgaaacttagaacaaatttaacttgacatgttaatttatatgttgccattagtgtgctgaatagcaacgggagttctgtaccttccttactgtttctgaagataatcttatttcacagctgcacctaggacaactcttttgaaatttcaccttcttagatgccaccccaagatggcattgtggggcaaattagtgatacatgtagaggaacttacacccaaaagatctgtcacttaatttttacatgtcctctggtttccataccctcatttatcgcagcctttttctctagccagctgtgggggtggagatgaaaggagtgggaagtcagctgtaatgaactatctcaagagttcagagttcttagcctgactcataagctcacatataatctggccctacttaactccagcgtcatgtctttccattctccaactctgatcaaactcattgctgcagctatactgaacttctttcagttcttcagatgaaccatattctgtctgagtctcagtcctttgcctctgcttgtccctctgcctagaacacttcctgaccccctaatgaactttttttttaattgatagaaacggggtttcactatgttacctagggtggtctcctgagctaaagccacctgcctgcttcagcctcccaaagtgctaggattacaggcgtgagccaccgagcctggcccctaatgaactttttcttagcctttggctctcttaaatgttattctctctgggaagccttcctttattcatatatacacacacacacatacatatatatacacatacatatatatgtgtgtgtatatatatatactatatatagtgtgtatatatatgcacatatatatgtatatatacacacacacaaataatatgtgtatatataaatatatatatatatatatatatatttttttttttagatggagtctcgctctattgcccaggctagagtgcagtggtgcaatcttgactcactgcaaccttcgcctcccaggttcaagcaattctcctgcctcagcctcctgagtagctggggtaacaggcacccaataccatgctcagctaatttttgtatttgtagtaagagacgaggtttcaccatgttggacaggctggtcttgaagtcttttttttttgagatggagtctcaccctgtcacccaggctggagtgcagtggcatgatcctggctcactgcaacctctgcctcacaggttcaagtgattctcctgtctcggcctcctgagtagctgggattacaggcgtgtgccaccacaccgggctaatttttgtatttttagtagagacggggtttcatcatgttggccaggctggtctcgaactcctgacctcaggtgatccgcctgccttgtactctcaaatgttaatttatgcacctttatttgcttcctttttaactccaaacttacttttttttttttttgagacagtcttgctctgtcacccaggctggagtgcagtggcgcgacctcggctcactgcagcctctgcctcctgggttcaagtgattctcctgcctcagcctcccaagtagctgggactacaggctcacgccaccacacccagccttcttcttttttttttttttatttttttttttgagatggagttttgctgttgttgcccaggctggagtgcaatggtgtgatctcagatcactgcaaactctgcctcccaggttcaagtgattctcctgcctcagcctcccaagtagctgggattacaggtgtgtgccaccatgtctggctaattttgtatttttagtagagacagagtttcaccatgttggtcaggctggtcttgaattcctgacatcaagcgatccaccagccttggcatctcaaagtgctgggattacaggcgtgagccaccattcctggcttcttttttttttttttttttttcagatgaagtctcactcttgtcatcaggctggagtgcagtggcgtgatctcagctcactgtcacctccaccttccaggtccaagcgattctcctatatcagcctcctgagtagctgggattataggcgtgcaccgccatgcttggctaattttttttttttttaatttttagtagatacaggttttaccatatttgctaggctgggtttgaactcctgacctcaagtgagtgcccgcctcagccttccaaagtgctgggattacaggcgtgagccactgcgcccagctcaaacttaacttttgtagtagcatttattttttatttttttctaagataaagttttgcttttgttgcccaggctggagcacaatctcagctcaccatgacctccgcctcccggcttccagcaattctcctgcctcagcctcccgagtagctggaattataggcatgcaccaccacgcctggctgatttttgtatttttagtagagacagggtttctccacgttggtcaggctggtctcaaactcccaacctcaggtgatccgccagcctcagccccacaaagtgctgggattacaggcgtgagcctctgtgcccagccagccctcctccttattaaactatgaactcctcaagccctgggattgtatttatcatcattgcatcctcagtccctgacatagtacattctcaaatatttgactgaatgaggctgcaagtcatgtgcagaacagaagatgggggataattagtgcctcacgcacagctgaacagttaatgagtacttgactgagcaccccagtcaagtgtgagaccaaaagcagcctgagttccctttcataggatccctataaaattatagagattttatatgtgagatttaattggcttatacagagatgtttgatgctttgtaaatttagatatcttacaggaatctatactttaaaaaccattattggccaggctcagtggctcatgcctgtaatcccagcactttgggaggccgaggcgggtggataacctgaggtcaggagttcgagaccagcctggccaatgtggtgaaaccccctctttactaggaaatacaaaaattagccaggtgtggtgacacgcgcctgtaatcccagctacccgggagactgagggaggagaattgcttgaactgggaagcagagcttgcagtaagccaagttcatgccactgcactccagcctgggcaacagagcgagaatctgtctcaaaaaaaaaaaaaagttaactgtaaaacagcctcaggaagatccttcaggagatattctagaaggaggcattgttataggagatgacagcaccatgtgtgttattgccccagaaaaccttccagtgggacaaaatgtggtggtggaagacagtgatattgatgatcctgatcctgtgtaggcctaagctaatatgtctgttagcttttgtttttgtttttgtgaggcagcacctctctgtcattcaagctggagtgcagtggtgaaaacacagctaagtgcagccttgacttctgggctcaagtgatccttctgcctcagcctcctatgtagctgggaccataggcttactccatcatgctcagttaattttcttttttttttgagacagagtcttgctctgttgcccaggctggagtgcagtgacacgatctaggctcactgcaacctccacctcccgggttcaaatgattctcctgcctcagcctccccagtagctgggattacaggtgcaccaccatgcctggctaatttttgtatttttagtagatacggggtctcaccatgttgtctaggctggtctctaactcctgacttcaagtgatctgcctgcatcggcctcccaaagtgctgggatacaggcatgagccaccactcccggccttctttttttgagacaggatctctgtcacctaggctggagtgcagtggtacgataacggcttactgcagccttaaatccttggactcaggtgatcctcccacttcagcgtccttagtagctgggactacaggtatgtgccaccacactccgctaattttttaaatttttttctagagatgggttctgactatgttgctcaggctggtctcaaactcctaggctcaagcagtcagcccacctcaacttccgaaagtgctgggattacaggcatgagccactacgcccagctcccatgtcttaggggttttttgtttgtttgtttgtttttgttttgttttgttttttgagatggagtctccctctgtcacccaggctgtagtgcagtgatgctatcttggctcactgcaacctctgcctcctgagttcaagaaattctcctccctcagcctccctgagtagctgggactacggcgtgtgtcaccacgcccaattatgttttttttttgtatttttagtggagactaaaagttactaaaacattactaaaagttactgcgccctgtcccatgtcttagtttttaacaaaaaagtttatacaatacaaataaaataaaaattttttaaatagaaaaaagagtcgggcgtggtggctcacgccttgtaatcccagcactttgggaggccgaggcgggtggatcacttgagatcaggagttcaagaccagcctggccaacatggtgaaacccggtctctactaaaaatacaaaaaaattagctgggcactgtggtgtgtgcctgtaatcccagctactcaggaggctgaggcaggaaaattgcttgaacccgggaggcagaggttgcagtgatccgagatcacgccactgcactccagcttgggtaacagagcaagacaccatctcaaaataaataagtaaataaataaaaatagaaaaaagcttatagaataaggatataaagaaatatttttgtacggctgtacaatgtgtttctgttttaagctaagtgttttttacaaaagagtcaaaaagttaacaaaaaatttaaaagtttgtaaagtaaaaacatcagttgggtgtagtggctcacgcccgtaatcccaacactttgggaggccgaggtgggtttatcacttgatgccaggagttcgagaccagcctggccaacaaggtgaaactctgtctctactaaaaagacaaaaacttagccaggtgtggtggtgtgtgcctgtaatcccagcttctcgggaggctgaagcaggagaatcacttgaacccgggaggtggaggttgcagtgagctgaaattgcaccactgcactctactgggtgacacagtgagactccatctcaaaaaagaaaaaagaaaaaaaaaaacttatagtaaactaaggttaaattattattgaagaaaaatactttcttataaatttagtgcaggctaagtatactttaataaagtctacagcagtgtacaataatgtcctaggccttcacattcactcactgactcacccagagcaacttctagtcctgcaagctccattcatggtgtaccattttttaccttttatatcctaatttttctgtaccttttctatgtttacatgtttagatacacaaataaattactattgtgttacatttgcctacagtattcagtagatgcttgtatatgccataggggtttgtagcctaagagcaataggccatactatataacctaggtgtgtaggaggttataccatctagtatgtaagtacactctataatgtttgcacagtgatgaaaaggcctaatgatgcatttctcagaacacatctctgttgctaagcaacacataactgtacataatactatatatatatataataaatttgatagccactgataacaatcaattgtgagaggctgaggtatcacgcatcctttccttcttctggttcctatatttgggatgtgtgaggtagaaggatattattttaattacttccccaatgggcccgtgtagtttatggcaaattaaattatcccttgactttcttttctatttctaaggctatttatttaatcttgctctccgccttgcatgtgattctctcatgatgtgcaaatagcaagattctagggatctggaagtgagttgttttaggactggtcatttactttcatgggctcagaacctatgtgttagtttattattgtccactaggtcgtactaggaggagccaatgtttgcaagttaccttgaccctaaactccagctttttttcagagtagcagataggtttattttgttagataattttttctccccaggctcccaataatttcaggaaagggtatctagatcttcctctccttcccaaatataacctagatgaacaaattgaggaggatagaaaatctaagatgaagcaggtacattttttggtcaatattgccacctcttaaagatcaggaatgcattccattctctcctggagattaaagaagatgttctattgcagtggaagggataggggttataccccaaatgaacaactggctgtgtggggtaatataattggctgagaggaggagaaaaaggaaatgttaaaggatctcttctttgggaaagcaacaagtcatagaatttgaataaatgaaaatattgaatataaaaacatttttcaagagcattctataggccagaataatagaaagttgaataaattttcctttctagaaactaaagggaaacacaggtcaatacccaaccacaatacaaggtgataagtaccctaatagggacatacacagggtgctatggaagcagagagtggactctttttttgagacagagtcttgctcttgtcgcccaggctggagtgcagtggcgcgatctcagctcactacaacctccatctcccgggttcaagcgattctcctgcctcagcctcctgagtaactgggattacaggtgtgcaccaccacgcccagctaatttttgtacttttagtagagatggggtttcatcatgttggccaggctggtctcgaactcctgacctcaagtgatccacccacttcagcctcccaaattgctgtgattacaggtgtgagccaccacgcccggctgagagtggactcttcagtcagctatgaagatggggatggggagatggtgctcagggaaggcttcccagaggagatgacatggaggccaaggctgagtctggaaaaattaatagtatctctctaacatcctgaaaatccacacatttctgctgtactcaagtctcccttggtgtcttcatttactcctgtgatttcaataattacatctatgctaataatgcccaatctttttctagcccagtcatctctctaaaaccatcagatatctcctattttggtgttgatgcttaaaattcaacttgtctaaaaaccaaacactgaaggaagcctgaggctatgagcttttatggtgatcataataatttgtatcaatatttttattacccaggtggatatcttagttacttctcatttggactactacaaaccagtggtccacactaactggtcttcaacttaggtctctccccaccacccacttccccagtatgtcctaaacactttgattttcaacaagatttacttccctaaagcccaatgttgatggtacatttcattgaacaaccacctttagtagttcactttgctctacctggtggagactaagttcgtccattgaataatcaaggcacactatgttctggtcctaaattactctttcaatcttataccgtataattcccttaagtgccttttacagacaaacccacctacttactacttcctgaacatagctaatgcttttctacctcagggtctaagtttatgctattcctcttatcttgcttgtcacaacactcttttggaaagggaaacgtttcctaagcataacatttatatataacaaaggctatattatataacaaagaatttatattttaatatacaaagagctgttgcaaatcaacaagaaaagacaactactccaacagaaaaacaggcaaagtacttaaagagacaatttctattgagacggttgggtttaagtctaccataatctcccatagtgttgtttgttttctgtttgttccatcctttttttctttttctttttttttttttttgacggagtcttgctgtgttgcccaggctgtagtgcagtggcacaagcatggctcactgcagcctcaacctcctgggctcaagtggtcctccctcagcctcctgagcagccgagactac

SEQ ID NO: 2639 - DNA, 1234 bp, Homo sapiens
gggcccagcccgaggaggcactcagggttaggaggtctgggcgagaagcaactagggccctcatcacttcgccgccgaatccccggcgccgcccagcggggcagagccaggccagggccgcccgcccaacctggtccgctgcctcttcggccatggaagctgccggcagccctgcggctacggagacaggcaagtatatcgcgtcaacacagcgacctgacgggacctggcgcaagcagcggagggtgaaagaaggatatgtgccccaggaggaggtcccagtatatgaaaacaagtatgtgaagtttttcaagagtaaaccagagttgcccccagggctaagccctgaggccactgctcctgtcaccccatccaggcctgaaggtggtgaaccaggcctctccaagacagccaaacgtaacctgaagcgaaaggagaagaggcggcagcagcaagagaaaggagaggcagaggccttgagcaggactcttgataaggtgtccctggaagagacagcccaactccccagtgctccacagggctctcgggcagcccccacagctgcatctgaccagcctgactcagctgccaccactgagaaagccaagaagataaagaacctaaagaagaaactccggcaggtggaagagctgcagcagcggatccaggctggggaagtcagccagcccagcaaagagcagctagaaaagctagcaaggaggagggcgctagaagaggagttagaggacttggagttaggcctctgaggcctttggggaatagggaatggactgcagaacaaaccgtggggctctctggggtctgggggaatacgggcaacagcagtcaggaggggtaccccccatactggcttacttccacctcctgcggcccagctctgtcctccagagcctagcgtctccctcaatccttcccttttcttcccaacttctactttttggactttccccctcccattcccagtgttcaaaatctcagtgactaccccaggtacctttgctgctgatttgggtgtcttgtttaaaagaaaatcaggtgggtgggaatctcttggagaactgaggctgagggtagagggagtatgcccaagtcttggagtcttggttcctgttcgcggtgtttatgggttatttccctctccatccctcattttttttttttttttaaaaaaagcaaaaatgagaataaacacaagtagacatgtctggctttg

SEQ ID NO: 2640 - protein, 204 aa, Homo sapiens
MEAAGSPAATETGKYIASTQRPDGTWRKQRRVKEGYVPQEEVPVYENKYVKFFKSKPELPPGLSPEATAPVTPSRPEGGEPGLSKTAKRNLKRKEKRRQQQEKGEAEALSRTLDKVSLEETAQLPSAPQGSRAAPTAASDQPDSAATTEKAKKIKNLKKKLRQVEELQQRIQAGEVSQPSKEQLEKLARRRALEEELEDLELGL

SEQ ID NO: 2641 - DNA, 1479 bp, Homo sapiens
gggcgagaagcaactagggccctcatcacttcgccgccgaatccccggcgccgcccagcggggcagagccaggccagggccgcccgcccaacctggtccgctgcctcttcggccatggaagctgccggcagccctgcggctacggagacagcttctccactcttcctcctcctccacctccgcccatgaaatggtgcactctccctttaagactaagatggtggcttgctacgatcgggactccacttccggtggggaggggggcgggaccccagcccgctcacgccggaagtggtttgcgttttcaagatggcgactccctatgttactgacgagaccggcggggtgggaaccgccaaacctctcccttctttttgacttcacccttggataccatcaaggccagaggatggaaccaagataacataaaataggcaagtatatcgcgtcaacacagcgacctgacgggacctggcgcaagcagcggagggtgaaagaaggatatgtgccccaggaggaggtcccagtatatgaaaacaagtatgtgaagtttttcaagagtaaaccagagttgcccccagggctaagccctgaggccactgctcctgtcaccccatccaggcctgaaggtggtgaaccaggcctctccaagacagccaaacgtaacctgaagcgaaaggagaagaggcggcagcagcaagagaaaggagaggcagaggccttgagcaggactcttgataaggtgtccctggaagagacagcccaactccccagtgctccacagggctctcgggcagcccccacagctgcatctgaccagcctgactcagctgccaccactgagaaagccaagaagataaagaacctaaagaagaaactccggcaggtggaagagctgcagcagcggatccaggctggggaagtcagccagcccagcaaagagcagctagaaaagctagcaaggaggagggcgctagaagaggagttagaggacttggagttaggcctctgaggcctttggggaatagggaatggactgcagaacaaaccgtggggctctctggggtctgggggaatacgggcaacagcagtcaggaggggtaccccccatactggcttacttccacctcctgcggcccagctctgtcctccagagcctagcgtctccctcaatccttcccttttcttcccaacttctactttttggactttccccctcccattcccagtgttcaaaatctcagtgactaccccaggtacctttgctgctgatttgggtgtcttgtttaaaagaaaatcaggtgggtgggaatctcttggagaactgaggctgagggtagagggagtatgcccaagtcttggagtcttggttcctgttcgcggtgtttatgggttatttccctctccatccctcattttttttttttttttaaaaaaagcaaaaatgagaataaacacaagtagacatgtctggctttg

SEQ ID NO: 2642 - protein, 195 aa, Homo sapiens
HKIGKYIASTQRPDGTWRKQRRVKEGYVPQEEVPVYENKYVKFFKSKPELPPGLSPEATAPVTPSRPEGGEPGLSKTAKRNLKRKEKRRQQQEKGEAEALSRTLDKVSLEETAQLPSAPQGSRAAPTAASDQPDSAATTEKAKKIKNLKKKLRQVEELQQRIQAGEVSQPSKEQLEKLARRRALEEELEDLELGL

SEQ ID NO: 2643 - DNA, 44734 bp, Mus musculus
  misc_feature (1)...(44734): n = A, C, G or T/U
ctatgtattaaatagtctcagatcttgtatattgtagtattatgctatactgtatatgatgcaatgtaaccttctctgccctcctttgccaagacagggtctcacaaagcccagactagtgtgaaacctactatgtagtcaagtatggatgacctttaactctgatcttttgccttcctctgagggctgagatcataggtatgcacatggggactaaatccagggctttgtgtgtgataggcattcaggcattctatcaatttaagctacattctgttttcttaccctttttttttttttctcgagacagggtttctctgtgcagccctggctgtcctggaactcactttgtagaccaggctgacctcgaactcagaaatcctcctgtctctgcctcctgagtgctgggattaaaggtgtgcaccaccacacctgtttcttacccattttttaaaaaaatatttatttattatatgtaagcacactgtaggctgtcttcagacactctagaagagagcatcagatttcgttacggatggttgtgagccaccatgtggtttctaggatttgaactcaggacctttggaagagcagtgggcgctctcaactgctgagccatctcaccagaccctttcttacccatttttaaggacaggcacttaacagaccaggctggtctagaactcattttgaagctaagaatgactgaattattcaacttctgaccctcctgcctctgccttcggagaactgggattgcaggcatgtaccttcttgtctggatttaaggattgttggaatgaccccagggctttgttcaagctaggcaaatgctttgctaattaaactatatcccggaccctcaaattaatccctcacttctgtgtgtgtgtggggggggggggaggggtggggtgtggggtatggttgtgtgtgtagttgtgtgtgtgtggtgtgtgtgtgtgtgtgtgtgtaggatcaatcccacaagctttgtgcatgctaggcaagaaatctaccaattgtgcttcatctctagttcctctttggtctctactgtgtagacttggctacctcaaacttactggctttaaatttgtgacagttttcttcctaggtattgagattgcaggcatgtaccaacacatctggctagtaaatacttttttaaaaaaatatttatttattattatacataaggacattatagctgatgtcagacgcaccagaagagggtgtcagatctcattacgggtggttgtgagccaccatgtggttgctgggatttgaactcaggacctttggaagagcagtcagtgctcttaaccactgagccatctcaccagccctagtaaatactttttaaaattattatttttaatttcttagatttcttatgtatatgaatgttttgcgtaaatgtatgtttgtccaccatatgtgtgcaggtggccaaggaggagaaaagggtgttagatcccctggaattggagttacagaaaggtgtgagctgcagtgttggggctggaatggaaccctgagctctctgtacgaggaagaaactctccagccccttacttagttggtgtgtccactaattggcatatggcagtcaaagaataaataacctgtagggtgtgggactaacgccagttccagggaatttgatgccttcatctggcctccataggcacccagtaagggtggcatacactcagatacacacacacaccatacagatagatttctttttccttgagacagagtctgaccatccctggcttgtgtgggatctggggctactactgaaggtcagtcagaagctgagaagcagtagagacacccataaatctgctgagactaatgggctacaggagattaatgttggtctatgtacactgaagctgttatagaggtgtgctgcagtaatctgcttacttacccattagatgaatgttggtcagcaccaccagtgccaggcacagacagccagcagcttcgacctaggaagtgcagccaaggacagggtgaagaagttttgctacaaatgatcaggaaaacctttcaattatgaaaacttcaagtacgaatacaactcccatggctgacttcaaataggattgatgtgtaggcagccctttttattttatgctcattcctacttgtacctgtgtgggctgaattatccctacttctcccaagttcatgttctgtagctcacccccacagtttcatgaggtgactgcatatggcgggggagcgctttaaagaggcacctaaatgtttcttgttgattgtttttgagatacgatccctagcttaggctgtcctaagcttagtagcccaggccagccttcaagctgtggaaactctattctagcctcacatagtgctgaaattagaggcatgcaccaccatacttggcaagagatgcttaagtttaagtggtgtacctgtggctctctgtgatctgatttgagttgcattcttatgagaagagacagagacacagtgtgggatccaggaagaagatgctagccaacagcgtgcataggagaagcctaggagaagtagccctgccgaccttgagtttccagctcccagcactgggagaaataagtttcagccaatcaagtaagccttttttttttttggttttttgagacagggtttctctgtgtagccctggctgtcctggaactcactctgtagaccaggctggccttgaactcagaaattcgcctgcctctgcctcccaagtgctgggattaaaggtgtgcgccaccacgcccggcaacatctgagttttttaccatttgtttatgatatgtctgtgtggccctgggaagatcgatcgacctatttatctatctatctatctatctatctatctatctatctatctatctatctatctatctatctatctatctatctatctatctatctatctatactactttaagagagagggtttctctgtgtagcccctccctgtcctggaacttgctctgtagaccaggttggcctcaagctcagaaatcctcctgcttcttcctccgtagtactggaattaaaggcattcatcaccaccagcttaggaagattttttttttttttaatgtcttcccttcttcttcttttagtgtgtatatgaggagggaaagggaaggggggagagagtctgtgtgcttgtgcatacttactcaggcgtacttgtacacatggaggcagagattaaacactgtcttcctctgttgctcttcaaacttacagggtctcagtgagcctagagctctgtctcagttaaggttggctggccagcgagcccctgtgatagatcgtccactcaccagctattgggttgcacacacatacatccacacatgcacacgcgcacacgctcctggatgttacatgagtgcctggggcttggacttagggatctgttcttgtgcagtaggcattttgcccattgagccatctcagcccctttagcagggtatcttgagaatgactcgagaggacagtctgtaggtgggaagactctgttcctagggaggtttctgtttggctttggacaagctcttggtgtatttggtaaggaccacaggctgcatctcactctgtttgagggaacttgagatagtattttaccttgttcctgggtgcctctgaattcactgtatatgtagctcagtctgctcataactcatggttctgatccacctcagcctcctgaatgctgggactgtgggcatgagcgatcatatggtcaaggaaccacacagagtattttgggtgtagactccacggtggaacacattttgtctttgggggtctgtattaggagaggctacctatgacctgcataaatcacaatgtaagcctgggtcccttcagtgtgcttgctgctacaatacttgtctcagtctgagagaaacaacaggattttgtcttgttgttaatgagacaggatctatgtagccctggctggcctggtactagctatgtaaaccaggctgaccttgaactcagaaatatgcctgcctctgtctcctagtgctagaattaatggcaagttcttggccgcagcagcagctcctcatttgactatgagaagtgaagggtttgtgtttggattgtccagtgagacagacagtagatgtttgggttttggttttttttttttttttttggtttctgacactgagggttgaaaaacccagggcctcatgcatgtcaggcaggggctctatcactaggtcacacccccaagccaggtctttttcttttctttttccagtacaaataggaaacttttttcctttcctctgtgctggtgccaaatatgtgacacttttttcctctcaagtgtacctgattggtaacagttttttgtttggattgtgtgaagaactaggcttttgactacaggcattaagtgtatacaatgaaagtaatcctctttaataagcacagaaggaagttggaatttggcttttgtttggggcttaaggtggtgtattgtgtcacccacggaggtagaaagaatggctgagctctgccagtgagcagtggtcagcctaagcctgcctgttcccgttcttaccttgcaggactcgagcgctgtcacttgggtgtagagtacacttcatgtgcgtgatgacttgtagctttgaggggtgaaaaagaaaaatgtcagtatgcatcctatagtttacaattccaggagagttttcctgacacgagccctgcatcctctgtgacttagaactctgtctcctttgttactttacatggagtgagttattaaggacactaggggctgggcatggtggtgcacacctttaatcctccaatgatttggaggcatagacaggcggatggaggccagcctggtctacatagtgagttctcagccagtcagggtcacatagtaaggctctgtctcaaagggctggatatggcgcattggtaaagaaagaatactgactacctactcacctactcgtccagagaacccaggtttgactcccagaataaacatgctagaagctgtttgtgaccctatctgacatctgctttgtagccttcttgggcaccaggcacaaatgtacacagagacatacatgcaagcagatcacacaaacacataaaaataaaaaaatttaaagagaaaggagacaacctagattgacaggctcacatatgcaagtatatcctggtctgataatgtagctgtgtgtgtctgctgttcagtaactcccttcctagctcctggcagctaggcatccgctctcagaccccagccagcttctgtcttgagattccaccagtgtcatctttatcctgaaacccacagtgctgggcttctgatcttctttctcttttctttctttgcttttttgtttgttttctgagaagggatttttctgtgtagccctggctgtcctggaactcactctatagaccagactggcttcaaactcaagaaatccaccagcttctgcctcctgagtactgggattaaaggcgtgcaccacattggccagctgttgtccttttttaacccagctgccacagcagcattttattttatttttaaacatttatttatttttattttatatgcataaatgttttgcctgatgtgtgtgcaccatgtgcatgcagtgcctgtggaggccagaagggcattgagtcccctggaactggaggtacaggcatttgtgagcggctgtgtggtgttggcaattggacccacatactatgcaagagcagcccgtgctctaactgctaagctgtctgcagcttgttagcatttcattatgagttactagggactgaccatggctatttcactgacccctctcatctagctccccgaagctctgcactaggctggggctggagttctccccagggatggagtgttggtgtgtgtggctgcagtggccatgacaggccccaaagacagtgtgtcacagcacccctcatcttccagctctttcgttctttctgttccctcatctgcgttgttcctgacccttacaggggtgccacagatgtctggtttcggggctgagcacgcaacacttactactctcttggtgctttgaccggttatgagtctgcattaagcacggccactgtaaaagaagcatctctggggctggagagacggctcagcgggtaagagcaccagctgctcttccagaggtcctgagttcaagtcccagcacccacatggtgccttgaaaccatctgtgatgggatctgatgccctcttctggtgtgtctgaagacagctacagtgtactcacatataataaataaatacaacttaaaaaaacaaacaaaaagggagcttctctggccatggctgagaacatcacagatctgtgagtgcgggggtacacgtttaggggctggagaggggctcactgctcacgagcacttggtagtcacaggtccctgtaactccggttacaggggatccagtgccctcttctgacttcttgagcaccactgatgtggtacacagacatgaatgcaggtaaaacattcacacatacaataaatgtatttaattttagaaatttaaacacacacacacacaccctcacccacactcattcacagaaggcagtttggcagcatgtccatttgccaaaacagtagtagatccctctcagagctcctgggctgagggcagattttcagccccaggagtaaattctctcctgtgtgtggagcaggcttcagctctcattcagaaagttagacaaggtttcatgtgacagtccacacttctggaacttaggagttcaggctgtcctggaagtcgtgactgtctgctttctttagcctcctgatgataggtatgagccaccatgccaggcaaacacgagtgtgcttcttttcctttgtaatacaaggctttgtacgtgcgtgggaagcactcgcgctcagagctgggtcctcagcctttctcatgttagtagctgctttttaaaatagtttctttgagaattttctacgatgaccttttactatattcacccctcccccagctcctccccatgtcctatctgcttctctaccccccacatttgtctttttttaaccccctatctaccgagttcagtttgtgctgtccatatattcatggccttcaactggatcatggtttacctaccaggagcagctatgaattgccaataacaccctgctatgtaggagtgggattccatgtccacttttccctcttcataggactagtcaccaagcacacttcctgtagggggggctaaagggacctatctctcaagtgctgagattgcaagtgtgtgccatcattcctggtataaatgtttacttgtaaagtgcgactagtacaactgtagtggcccctgagatctcccatggagaacgagctgatcagactcagtgtaagaaagactgcccttgcaggaaccaacattcaagctgcttccaggatgtgtttcacactggaactgctcggagatgcttcgtggctcatttacagtgtgctggaggagggtggtgaccaagatttgggcctgcaactaggggaagagtgcatatttagcatacacaaggccttggggcttcgatctccagcaccagaaaataaagacaaacatttatttgtatttttggtctgtaagcaacgggcagatgttggccaatcccagtctgtccaactccaggtcattcattcgtcttggtttagctatttctgttttattaccctcctgaacttctgtaacgtctaagacagcggagttgtcctctttcgtagctgtctgttcttgttttgtggtgtagctctttctttttttgtcctggtgctggtacttttatgtctttgtgtacattaggccacgaattcgtatggaatggcctccaacagctcaggcccttttccgttagtcctcacaaagtgtgcttctctgggtggtgcaggctggcgcttcagctgcacccaggtgcccttctctttggcttcctttttcttctggtcgttctccttcacccgcttcaggaagctgtccctgctctttgagtgtttgatgtgctcaattcacacattgatcctcttggccagaattttgcccttaacctgcttgttgacaatgatgcccacggcatgctgggtgacactgtagactcttccggttttgccggtagcacttatggggcattcctttttgaacagtgcccgatcccttgatgtctacaatatcacccttcttgtagatttgcatgtatgtggccaaaggaacaatgccatgtttcctaaaaggcctagagaacatatacggggggcctctcctctttccctttgtgttcgtcattttggcgagttactggaagatggctgctgtggtgtagttcttaaacagctttccctgaatgcctctccctgtatgctggtggccttctccctcctgctgatccactgggcttgtggagaaaggatcaagttggttggtggagtagtgctattaccttctaagtcaccctgttgaggtggggctggaaagacaaaaacaatgtggcctcttggagtctcacttggttgtcctccacacccttcctgaccgttgttaaggtcagtgttacttggttcttttctgtaaagtttagaaagtatcccgaggctgtggctgctcttgtttaaagaggtcatgacaggccgttggtgtcaggtgttgagtcatgagtgagtgggactgctcttccactcttctgtgctttctgagttttttgggacacaggtgaataagtgaaacacagaattggtctgtggtaacagttttttggaaccaggaaggattaaatttatttgttgtaggtcagtgaagcaaaactagatgaaattgccctttttatggacaaagttggacaggacacattagccttttgattcagttcagcgtggaattcatgaagtggctcccatgcttccttataggatggtctagcttagtggatttatgatgacacaaaggtacccacacagctttcactttcagtatatagaattcagtagattacaaacatacctactgctgggttaggtggtattgtttgacagggctgatgtaggcaccatgagaccagttaaggcggatgcagctacacaggggctgaggtaggttaaatgcattttgacttaatttatgatggatttactgggggctgaattcaccatagggccaggaacatctgcttttgttatatttgcttattggtctatggatatatatagtcatactaattagttaaatagccatttctattgcaagctattctggaacattcaactaactgtaagggtcttttatcaacaataaatgttaacttctcctttcctggatgaagaagtttaactgtgaggaaattaaaacaacttgcttatgaacacattgttttattgcaagttggtgacttaaattcaggtctcctggccctgggctagtataggctgagcacttagcacaactggaaaaggacctggaaatgcacctattcataccttgctgctgtggccacgtgttgaaacagtatatggagcaggcttgtccttgtcctcctgccaccaggaccacagggcccggggtcctccctgatgatgtggccctgcagtgtgcctatggtcaggcttccaaagacacgtccatcagcaatggattgcaacactgcagagttggatggaaatggccacggcctccgctgcctgtgggattctgctctgcgcagtgggagaatgaatgttcgctagttactttgtatctcttgcaggcattcttcttggaattggctaacagcttttggatgctcttgctctttaagctttctcaaaactgtaaacaacttcagtaagctttgcagaaggaagctgtggtttctggtcttcctgtgtgctcatgttttttagagggagggcttagcatctgatcatatttttcaaacgtctcaaaggggactagaagaggcacagcagctgtccgcagaaggggaggaaccaggattcctccaaagaaacttttgcaactgcagtgcccctggagatctcccatggagaacgaggtaggttcagactcagtgtaagaaagactgccttgtaggaaccacattcaagctgcttccaggatgttctttcttttacactggaaccccgagccctgctcggagatgctgcgtggctcattttacagtgtgctggaggagggtgggaaccaagatttgggcctgggtgtgggtggctgtcatgtccagctgaggttggaccgatgcactcattcatctgaaggaatgagaggccatgggttttatgtctttcagggaaaatatttcctgcaaacttgtagtttcttgagtactaaggtcacagtgaaaagctggtggaagggaaagggttgagaagttaagggaactctggggagcctgcccctagagtgcacaagtccatgagtgcataacagacctgggctgccaccggaatcctggcctgcccctagcatagcccgccatggggttaagactcctgggacttccagtagagcaagagtaggcagagatcccattcgattgcattcctccagaactaaggagccgtgaggagggatgtatgcaggggatattgtgcccattgtcttggcccataagcccaggtcctcttcccttggtaggggctggagtactcactctattccctcacccttccttcccttccccagagtctccatcatcccagtcttctattagttgaggatgacctagacctctgatcttcctgcctccatctgcagagtgctgtgatgatagaccagtgccacctcgcctgatttttatgaggcgctggggactgaaccaactgccttgggcaactgaacttcatccccatcccttcattttctttaaaaaaagaaaaagaaaaactgaatgtgtcactcacgggtgttgcagagttcctggagctggttgccgtgtgtgaggctgtggttcggtagggtcagcagaaggagcttccttttgtttggtttggttttggcttttttgagacaaggttttactgtgtagccctgactgacttggaactcagagatctctgcttctgcttcctgggtgctggaattaaaggagtgccccacgtccccaccccacctctcacccctgccccagctaggaattctttctgttagagtttgtgtaagatgcagcctgggcaggacgtgattgtgagggatgctaggtagactctgtagggaagagctcctgcggccctgctggacagagctgtgcaggaccgcccacaggcctccttccagaccctctcactgggcctcttccccttacagtccctcgtccctccctggcctgctctagctggctcagtgcagttgctgtttgtcttcccattagactggggtggggtggggaagcagtaccttcactttcgctgtctacagccatcctgtgtggcatgtggcaggcacgccaaggccttttgctttgagcattggggtagtcttagggtgagatgaaacctactgagtagctggtggtgaagactcaatgacatgcacctgtcaaactattgagggccctttgtaccttagtttgcttctgtctcaggcttgctagtgctttctccagaataatgtgctgagcttggggctttgcaaggagaacacagttggcatatgtgactgtgttacttactggtcctcaaagaaagagcttgcttcccaggagtctagaggtattggcttctccccacccccagtaatgcttttattacaaaaagaattaactgctagagagagccctctctagtctttctgtgtgtcctcttcttttccaatatatacctccaggggaggtcagaggtccattatagaagaggtgtttgggagaatgaaatatggtaatatttttttccagagtcctccaaatccttctaggtgctgctgagaatcttctggtagaagaggtagatgtgggctggagagatggctcagcagcaggtaagagcgctaactgctcttccagaggacctgagttcagttcccagcaaccacatggtggctcacaaccatctctcatgggatccgatgccctcttctgctgtgtctgaaagcagctacagtgtactcacatataaataaataaatcttcaaaaaaagaagaagaagaaaaagaggtagatgtatgaacgttagctcttatctccacatccacatcctggagatcttttatcttcttttgtcgtttgggctgtggctgactagtcctggttaacttggagggggcttccactaccatggctgctttttctttctgggcaagttggatctctttcaagagtttcctgtgcttcttagatactgtgatgttggcatgtgtactggatgcccgcttcttgaggtatcttgtagttagccctgctatatcacagccccaatcgcctggtgcttccatctcccactcctgcttaggactgacctgcggcgcttgaacaacttctccagccccacctcctggaggtctcattgctacacttggaggctcactcctggagccgtcgtatgagatatagatatataacactgcgtttgtgtgtgtgtctgtgtccatgtatccatgccatagtgcatgtggaggacagagtcactacatgaagagaccagcgagttacttccagagatttgtatgtttctgaaacaggatctcctcgtgtggcatcaagctcaggcctctcctgctcccagggccaatatcatggggcaccaccacggctctctgcagagttgtgagggttttgttactgcttttagattcctagtctcccccccacacacatacacgcacctttcttctttctgtgacactgaagattaaacaagggctttgtgttttctagtgaggtaattttccactcccgtttccaacttgaaggactattttgggcattgacaggcattgacagggtttgagaggcttttcagagagaccctagaaaagctcttctcactgtgtgtgcaggagttttgtttctgtgttccctactcctttcccagctttctgtcttggaccctggcttgcccccttccatctgaggactcagtttcttcagggaagacttggtttggaagcctctgcctgtgttgggatccactcagcctgctgctcttctggggtccaaatcatgcacactccatagcatgctgcagaatgaagaagagcagtcgctaaatccgccttttatttttggtgtatttatctacaggacatcacagcaaatgtaagaccttccgatcaattactgaaatctgattctgcccatcaaaatattatttgtccatttccttccttccttccttccttccttccttccttccctccctcnnnnnnnnnnnnnnnnnnnnnnnnnnnnnnnnnnnnnnnnnnnnnnnnnnnnnnnnnnnnnnntccctccctccctccctccctcccttcctccttccttcccttccttccttgaaacaggatatctctatgtagccctggctgacctggaactcagactaggttggtctcaaactcagatactcttgcctctacctcccaatcgaagacctgagccgccatatctagcccctttgctttttaaccccaatctccttttacattctcatgttaagagctagtgtgttagctctcgcccgtaatcgtggcactcagaagtctgcagcaagaaaagttgccaaattctgccctaagtgagcctgagctatagaataaaccctgtcttaaaaaagaaaccaacagggctggtgagatggctcagtgggtaagagcacccgactgctcttccgaaggtccagagttcaaatcccagcaaccacatggtggctcacaaccatccgtaacaagatctgactccctcttctggtgtgtctgaagtcagctagagtgtacttacatataataataaataaataaatctttaaaaaaaaaaaaaaagaaaccaacagaaatagactcataaacaaatcaacgaaacaaaaagcaacttaagatctgagatgcaggctttgccttttttccttgacttgcatgctaggcggaagctctcctacctggtatatcctcagcactccaatgttttatctgagacccagtctgaccttgatcttgcaatcttcctgcctcagtttcacacttctccttgttcaggtttcttgtcctccagtcctgaatgctgtcctccagtccgctgtcttagctgtttgttcccactagctgagaactgaggtaacactaatgggttggtcagcccgtccagagcatcagtcatttcttattatgggctgtgtttcagtgttctacattataggaaccaatttaaataatttgaggcattgagatgagggtagcagcacacaattcttgttatatccaagggtcagtgtagggccagacacatctccctccaccgacagtgttctttccacctacaaaggtgcattgaaggcccactaatggatgcttggaactgagggttttgctaagccagtatctatgtagacttcttccttgaacctacatgtctatgctaaagttctagagtagtaaagagatgagcaccatatgttattatgtagcggctgtaacattgtcctatagtaaatatatttaaaacttacaaattgttactttctggaattctccacttagtcttcagcaatcacagttgattgtgggttacagatctgggaagtgaggccgggtaatggggattgtttcagtttattatctgagcttggttaggaagactcatgacttaggcctgagatttgggaattgtgctttttctggctagtctgtgagtagaccaatggtgacattcaattctggtcagctctccttgttccttgctacttaggaaccctaccacaaaacccaggtggtttgaccttatggtaggtcggcaaaagctgctgagctgctggctgggctggttttgccatgggtttagtttctcttactctgctcttctcctagtttttctgcttcctatagccctcctgagcatagggactatttcatccatagccttcctcgattactgatctggtaggcacacaaaataaaggttctgcactgggatttattacttactgtagtctgtacagactacatacatgctacatatacaggctacatacatggtacatattggatgctggaagccacacaagctgtaaaggccagactaaggatccagctctgtggcaggtcacttgctgggcatgtgtggagctgagagaatggactctcagacagtgagagacatatgttggggcatcggggctgacctagtttctttgtagagtgctagcccatgtcacctcattacagagggtctgtttatcttttaggctgggattacaagacaccccagggcccttcccaacacattttagactctattttatgagctgtttatcactgttaaagaaagagtgtaaaaggcgtgtggtctgtgggcctgttgatttggtgagagcttggttagaggttgatcttggcaaacctctggtttcacagttggtttcctgttgcatccacgtgtaagttaagaatgagttggactgacagacaactggaagggcagacagatggagctgagctgcccgcctatcggagccagccttcagttactatgtactgcagggagctgtggttgaatgaaggagctctgtggggctgcaggaggagggctgtggatactcttctgtctagaatgatggactgtggttgtagagatgtttccaaaggatcgtgtccatgggcgataaacatcaggacatttaaaaactcaggaaaaacaaggtgatgaaacacaacacacttagcataatttgagtactgtctggtcagaggtcccacggtgaagaaatcacaattgtcttcattgggatttaccttgcccaaatatgttcctaaatttggggtcatttctagcctgcagatgactgtcaggttatctggtaagtctcaagtgaccatttctcattgttgtcccatatgaaccccactctgagacccccccctgtcacctgccccatccaccacttgtcgaaacgcatcctggggatgaaagaaacgtttgtgggagctcccagagaatgtgctgggaaggccttcaacctcagcctgtcctcatgcttctcagagtggggacctggcaggtaggtctcttagctcttccggaagtgtctcttgtcctttctgatggttgtcaccttcggatcttggttctcctgacttttatagtctaggcctggccagtggtaagtggcagttgtttatctttctcaagtatgtactgttatgaaaatctaaatttaaaaaaatggagaggcagccaggcatggtggtgcacgcctttaatcccagcacttgggagacagagggaggcggattnnnnnnnnnnnnnnnnnnnnnnnnnnnnnnnnnnnnnnnnnnnnnnnnnnnnnnnnnnnnnnnnnnnnnnnnnnnnnnnnnnnnnnnnnnnnnnnnnnnnnnnnnnnnnnnnnnnnnnnnnnnnnnnnnnnnnnnnnnnnnnnnnnnnnnnnnnnnnnnntgctgggattaaaggcgtgtgccaccacgccagctaagctctgggttctattcttagcactgcagaaaaacaaaacaaaacagatggtgtgcatgttggaatcctagcagtagtccttgggaccaggagacaggactgacgctccgtctcctcagccacacagtgggtttgaagctagcctgagctgtaggagacgtctcaaaaaagtagcggaagtgcctgtgctcaacactcagctacagctctggagttcctgtcatcttatctctctctcttttccacaccagcagtgagtgccagaaactgccctgcatgtgtgaacacaagcgtttatgtgtgcgtgcatgcatgtgtgtgtgcgtatgtatgtgtgtactgatcaagataggactacagggtcaatgacagaccattctaggtcacagaggcagatgcctggtgatagaatcagctcccatgagtggaatattttaatatttacagggccgtgggtcacaatcttttcctactttggattcagagtcgggtgggtggtcatgggtcattatctagtgtgagtggaagacagtctgaggctttggtgctgggctgtaaagacagccgttgaagaggagatggattgttgtgagtaaaaacagtaacggaaataactgctgacaccgttttccattataatcaaatataatcagctcagctctctgtagctatcgcatggattgttcatgagaacatggaacatgcaacaatcatagctcattttagagaccatagctcagctcatatccttgtatgggaaagaatcaggatagctcagaccaccacagaggagttgagccttgagcctggcggaaagcctgtggggagagcagcaggcatgacggctgggcgtgcacagctctaacaccgagactcatgctgctgtcttgtcggatgggcctcctggatctgtgcccatcttagtagatcaatggaataaaaccaagataacaaggaccaaggatgtgaagctaaggaggcagggaagctgtccacagcaggagggcacaggcacaggcacaggaaaggtgtcagggtaattttctgaggctgggtgagtcttatttgattgttggtttcatgcctggtgctgagagctgagcctaagagtgaggctgggaagtagccacatgcggcatctcctgggagccttggccatgtgagtcttgcctgataacttattctctccgttttttgtttgttactagcttggggggagggacggtcagagctgagcctgctgtagtttcccagctgctgcctggctgccaggaacatagtgggtgagtgtaggagagatgtctcttgcagagagaaaacagctagggtatcatctcctcctttcattgctcgtgtctttggcctctgagctgatgctgtagatgatgtatttaagtgtttctctgagtgacaaagaatggctggcagcgccatctttccacagagtgggggatagcttctgttgcggttgtttaggaggcactaggtttgattcccctctccctggcccacaagttcattttgattacaggtcgagtcttcaaagcctcggtactaagctcacatccagcaggggtgaggctgtgaggttagtggctgccttggagccctgcctgagggaaggggctgcatgagaacctggggctcagttagcgcctgggctccttagagctcatgtggccttggctgctgagacagaggccttgtgggtggcagccctccctgtcccacttgcacctcagagctgagatgacatggctcacagagctggcaggagttggaactctgctgtgtggctctcttctgggggactgttccccaaatgacagtgagttgccttctgagtgtgacagccacttaacaggcctgtctgtccttgtgcagagtctgagctggctccagagccatgcctcagcctcatgttggtcctttctcataggctgctgtgcacagtcctattttcatggcgacggtgctaactctgtttgttagtggtaggtacaacacaaatgtgtgaataatgaactccaatcattgccatttctgcctgcagcctggaattgtgtcgccatttaaacgagtattcctaaaaggtgaaaagagtagagataagaaagcccatgagaaggtgacagagaggcgccctctgcacactgtggtgctggcgttacctgagcgcgtcgagccagacagactgctgagcgactatattgagaaggaggtgaaggtaagtcaccatgggccacagggcacgcctgccaaacagttcattgccagctctgcataaatacattagcctgtgtcctaccctctgtcttgcttctggatgtatctaataatgaaaactccaaacccagtcccagtccttagctttggtttctgatcctctgtgtagcagaagactactctgtcttgaaggtcatggatattgtgtaaaacagggaaacctcgtctcctccgatttgcagacagatgacagcaggcgcttgttccaggcccttgtttaggactccgatgctcagcctaacgctggaggccttatatctcaggcctgcctgtgcccaaaagactactcaagctgtgttatgtccctgaaagtaagttaatgaaatgatagaagctgtgagctcagagaggagaggagaggtgttggtcatagaaggccactggaaagaaggaagcggtgaaggtgaagtagcctagttggtggctccagctgggtcaggcccctgcagaggacagactccagtgactcggggggctccagcgctgactaaatatggatttgtaggcaccctccacattgagaggagggcttgggatttactgatagctggcataggagtgggtgggagagccccacctgagcttcctgagtcggagcctgttagggatggtgtgagtccacaaccccttttatgtccaggcttccggaatgtcttggaaaacacagacaggttaccgtcaagtggcgctctccttgatgcagctgagaaattctgcactgacctcggattccctgccattcagctcgaatggaacctagcggatagaaagcctgcccagcacacagcttcagtcagctcttcagggtctcctttaaacacaggcagcagagcataagtgtgcatttcctgcaaacttctgacattgagcccaagacagtaaacatgaatttgaaagcagtggctccaaagtgagggcagcagtgggcattgtgcgtgctgatagtggatcaagttctgaggaaagtgttgttggatagctttgttgctgtgaacatgggagtgtgggaacctatgtgtggataggtgtgccagccagtcactcactggggtaatcagatgaatgacgggctcatctgctgttggctgctagtgagctattttcaactgataagaacaaactgaaattttggttgttaaaattttttaagtgaatgaattgattggttttatacatatagaatttttttttttttgaattttcaagacagggttttgctgtatattcctggctgccctggaactcacgctgtagaccaggctggccttgaactcagaaatccgcctgcctctgccacccaagtgctgggattaaagcgtgcaccaccactgcctgaccatatagatgttttatttacctgtatgtctatgtaccacatgcatcaatgcccacagaagccagaggaggatgtggggtatgtggggttccctgggtctgctgctgagaaatggaacccaggtcttctagaagacctcagccatctctctagctctggtttgcttttctaagacaatatctcactatgtgtcttaggctacccttaactgaaggtcttctatcctctgcctcccaagagatgggattgagggtgtgtgcactacacctggtatataaactgtttagacaggagtactcaaatgctaaaaagtatacctcagtaaatacatagaccagtaacatagttatattgagtacttttctctgctttgacagactagctgatagaaacaacccacaggaggctttcttctggttcctggaaaggcatggcatcaggactatgggcagctggtcccagggttccccctcacagcaggaagtagcagggatgcatggcgatgcgctgctgtgggtattatgacacatatacttaaaaataataaaaataactttaatgtgtcataattccataattcccactttagtagtccagtgtagaagctctctcacaggcatgcctacaggtttgtctcctagactctgtcaggttgacagtattaacatcagtcatttattatgagtgttaaatattatatatgtgctatagttattgtgtagctgttaatgtattccgccttgtttacatcatatcactatgaattgacccatatgggatgttcactgggatgttcagatggccacaaagttcttcagcattgggaaaatgtgatgcctttgtgatcttagggaacctttgttatattagctgttgtaggccaagccatcactaggcagcacatagctgcatatactattctcaaaaagacaagaggacatgctgttcataatgaaataacaaagagtcaagatttgtcttcttaattttatttttattatttttaaggatatgtatgtgtgtgtgtgtgtctgtgtctgtgtgtgtgtatgtgtactatccagtatagtgcctgcagaggttagagatgtgtatgtatgtgggcagatgctgggaatgtaggtcctccaaaagagtagtcatcaggaccctgtgagagaccctnnnnnnnnnnnnnnnnnnnnnnnnnnnnnnnnnnnnnnnnnnnnnnnnnnnnnnnnnnnnnnnnnnnnnnnnnnnnnnnnnnnnnnnnnnnnnnnnnnnnnnnnnncctgactcaaccagcaaggtagacagctcctgagtaaacaaccacctcaggcctccacatatgcatatacaccacctgtacacacacacaccacctgtacacacacacacacacacacacacacaccacctgtacacacacacacaccacctgtacacacacacaccacctgtacacacacacacaccccccacctgtacacacacacatgcacgcacatgcacatccatggaaccaaccccacagtgctgaagagaaagcagagaacatccgagtaaatggagagacaggaggcaggcctggttggagagacagtgtgttgtaagctggaaggtgcagccgagttcatgtcagttcttctcagcatcagaggaacgcatggaccagcaccttgaaaagcacaagctacacaggacaacacctagtatgaaataggttatctgaatagcttgatgacgacggtttctgtcataattcagcaagctgtttctgtagacaaaagcaagattagtcagaaacgtgcctgctaggactgtagacgagaagtcaaacaactgccaggttcaggttgtgttgggttgtccagctacccagatgcagaggctgccgtgaactgggggctagagaagccttgtgaacctagaagtagacccacacagatctgccctccagtcacactttgccaggagtgagagccattctgcagaggaggaggaggaaatgccacgtcagcagacatgctagacagctggacagcgtacacagaaagggaccttgcctaccacttgacaccttcacaaagccaacttagagtagactgtgggcttaagtgtccacttaacaaaacttgtaagggtgttggagggggactgaaagtaattcatggtctccggccaggcagagaggtcttagatgacaccagaaagggtgcttaagaggaaaactgatcatctaggctttcagagactctgcatgggaggatggaagcagcatgtccacagtggttctatcctcataccacagaagaagagatgagatgacatcctacaggctgaacgcaagtatttgcaaaccccatgtgtagatacgcaggctagtatctagagtacaggaaaacctttccagactcaatgtgaaagctatccagttcagtttgggcagatacagagacaccgcagtgaaggagataagtgaagagttataggcatgaaaggttgtttagcaggtctagccgtcgggggaatgcacaaggctcacatcttgatgctagaagggagtctgccctttcttaaaacctcagtgttatttatgatgctactcaacactcacacttctaagaagttgtttattccactgaagtgcaaaattttatttacatgaaaaacaaagttttgtgtgtgtgtgtgatacacacacagagagagagagagagagggggagggagggagggagggagagagagagagagagagagagagagagagagagagaacaaaaaggaaagaaaggattatacgctgnnnnnnnnnnnnnnnnnnnnnnnnnnnnnnnnnnnnnnnnnnnnnnnnnnnnnnnnnnnnnnnnnnnnnnnnnnnnnnnnnnnnnnnnnnnnnnnnnnnnnnnnnnnnnnnnnnnnnnnnnnnnnnnnnnnnnnnnnnnnnnnnnnnnnnnnnnnnnnnnnnnnnnnnnnnnnnnnnnnnnnnnnnnnnnnnnnnnnnnnnnnnnnnnnnnnnnnnnnnnnnnnnnnnnnnnnnnnnnnnnnnnnnnnnnnnnnnnnnnnnnnnnnnnnnnnnnnnnnnnnnnnnnnnnnnnnnnnnnnnnnnnnnnnnnnnnnnnnnnnnnnnnnnnnnnnnnnnnnnnnnnnnnnnnnnnnnnnnnnnnnaaaaaaaaatcaattgtgtatagactaataataaaaaccaccaacccagttagccagaaataatcctataaaccatttacaacaggcagccttgctagagtctgagccttctggtgcatgggtcatgtttttaaaaatattgaatttatacagctattgtttcacttatcatttttaagacattatcttccaggctggcctcgaactcagaaatccgcctgcctctgactcccaagtgctgggattaaaggcgtgcgccaccactcccagccacaattgatttttaatcatgcacatttattactttgataaaataaaatcaacacaaaatctcccagtctcaaggaagtacttctccctactccagtgtggttaagaaaatactttaaggggctggagagatggcggttaagagcactggcagcttgctcttccagaggtcctgagttcaattcccagcaaccacatggtggctcacaaccatctgtaatgggatctgatgccctcaacagtgtactcataaatgaaataaataaatctttaaacaaaagaaaagaaaaaagaaaatactctaagctgggcggtggtgacttacatttaatcccagcacttggccggcagaggtaggcaaatctcatgagtttgacgccaacttggtctacacagcaagttctaggatagccagcactatatagagaaactctctgtgtgtgtgtgtgtgtgtgtgtgtgtgtgtgtgtgtgtgtgtgcgcgcgagagagagagcttgggaatgaacattggtgaacttagtgaatgctgagtctgtatagcagagtggtttgcattttcataattcttatttaatcctcacaaaccgtcatgaactgaaacattttccagtagttttatcacgtgttgagctctggctcagtacttacagtaagatgccagcttgtggctgtggtacactgggaatcttagtggacacgggatgtctgagtggataccgggcctatgtgtggcttcagttctctgcctttcctaccagacaggctactaggttagattgaccactgtggtctgcagtgtggggctgagagcggttttaggggttccaggtggcttcttccacttgagtagctcttgtcccacaagtcagagggccactgtgaagattatgtcctgtatttagtaagtggtgggtagctggccacctaagggacactaggaggtagacccacccttgcactgactccctgacttccttgtgtccacagcacacacagggcttgctggcatcgtccatctcaaatgtgagcatcacctccatcttttattgcagaaacctttgaggattatcacttctcgtgtgttggcagggcgggtgggtggagctctaggagctttgggcatcctgattacccaggggccagcaggtcaagcatggttgaccaaggaagtggggaggttgctttctgctgtgacttttcttactgataaaagttcctttgctgatgtgtgttagctcatctgtaatcctagccctcaagaaactgaggtgggagccagcctagaccacacaagaagttctgtgtcagtctgagctacagagtaagaccctgtctcaaaatacaaccaagaccagtgagatcccttacctacatgaagcaagggagaatctgcactggagagacggctcggctaaggtgcttaccgctcttgacaggaaccaggttttgtgcttagcacccatgtcaggcagctcaagctgttctagatctgacactcttgcctctgcaggcagctgcatacacatagatggaagtaaataaatctttaattttttttttgttaagatttatttatttattatatgtaagtacactgtagctgtcttcagacactccagaagaaggagttagatctcgttatggatgggttgtgagccaccatgtggttgctgggatttgaactccgnnnnnnnnnnnnnnnnnnnnnnnnnnnnnnnnnnnnnnnnnnnnnnnnnnnnnnnnnnnnnnnnnnnnnnnnnnnnnnnnnnnnnnnnnnnnnnnnnnnnnnnnnnnnnnnnnnnnnnnnnnnnnnnnnnnnnnnnnnnnnnnnnnnnnnnnnnnnnnnnnnnnnnnnnnnnnnnnnnnnnnnnnnnnnnnnnnnnnnnnnnnnnnnnnnnnnnnnnnnnnnnnnnnnnnnnnnnnnnnnnnnnnnnnnnnnnnnnnnnnnnnnnnnnnnnnnnnnnnnnnnnnnnnnnnnnnnnnnnnnnnnnnnnnnnnnnnnnnnnnnnnnnnnnnnnnnnnnnnnnnnnnnnnnnnnnnnnnnnnnnnnnnnnnnnnnnnnnnnnnnnnnnnnnnnnnnnnnnnnnnnnnnnnnnnnnnnnnnnnnnnnnnnnnnnnnnnnnnnnnnnnnnnnnnnnnnnnnnnnnnnnnnnnnnnnnnnnnnnnnnnnnnnnnnnnnnnnnnnnnnnnnnnnnnnnnnnnnnnnnnnnnnnnnnnnnnnnnnnnnnnnnnnnnnnnnnnnnnnnnnnnnnnnnnnnnnnnnnnnnnnnnnnnnnnnnnnnnnnnnnnnnnnnnnnnnnnnnnnnnnnnnnnnnnnnnnnnnnnnnnnnnnnnnnnnnnnnnnnnnnnnnnnnnnnnnnnnnnnnnnnnnnnnnnnnnnnnnnnnnnnnnnnnnnnnnnnnnnnnnnnnnnnnnnnnnnnnnnnnnnnnnnnnnnnnnnnnnnnnnnnnnnnnnnnnnnnnnnnnnnnnnnnnnnnnnnnnnnnnnnnnnnnnnnnnnnnnnntcgtctacaaagtgagctccaggacagccagggctttacagagaaaccctgtctcgaaaaaacaaaacaaaacaaaacaaaacaaacaaacaaacaaaaaatagaattctttttgtcccttgagcctaagtaggaagcatggccagatttgggggtgacactaaaaaggattatggccttgtgttagttaccccagatcttggaaccacattagaattcccatgtgattatagacatatcagagtactttgtcttagcacttgacatacaaagataggagggatagctaatgatccaatatcatattgatatgatccagtatcttagttagggttactgttgctgtaatgaactgctatgaccaaagcacctaggagaagaaagggtgtctccactcactcacacttccagggaacattctccactgagggaagctagggcagctcctgcaggcaggagctgatgcggaggccacggagggtgctgcttactggcttgctcctcatggcttgctcagcctgctttcttatagaacccaggaccaccagcccagggatggccctgcccctagtgcgctggacccactgatgacagtttggaaggtgccctacagcttaatcttatggaggcatttcctcagttgacgttccctctttccagattgttctagcttgtgtcaagttgagataaaactagccaggacatcctggaagtgcttttattattttttttaattttaaaattttaaattatttttcctttcctttttaaaaattattttttgctgctttatttcaggcatttgttaattaaatttgtcctttggcagtttcatatgcgtacatagtatatcctgagcactcccatctccatctgtcctcctctgattattctgtctgcaaccctgtcttcattaaacatctctttcctatattcgtgtcttttcactttgttttgtgacccacttagtttaaccagggccctgggcatgaccattggtttggggtcatctgttgaaaagtggtgggctcagcagtgggtacacaggatctgtcagtggccagtaattcagcagtaatggagtagggttggtcccagaagcccctcctctccccatgactgacagttgatggatctttcttgtgcagggccagtggaagtatctgaagccactgtgagtccatgattacagtgaagacagagtttagaggatggtacttcactgtcttctagctcttagcccccaacgccccacgctcacccgtcatcaacaatgtccccagccttagatggggtggtgtaaatgtcttttttttttttttttagggatgaacactcaacagtcactttattctcggcatttttcaaaggtttttttcaagcaaatttttagttttctctcttattgtagagatacacaggcatagaacagagggcatctgaggtactctcaaatccagctcataggacaggtgagatggctcagtgcataaagataattaaattatcacaatcctgatggctagaacttaattcttagaacccagatggctgaaagaaccaactcttccaggttgtcctctgactcctatgagtgccttagtatcatatgactcccttctcacaagcctgaacaatgaatgtagatatggtattattttgtgattctttgttttggtttgagtcagggtctcactatgtagtcctgactggcctggaacttacagagatctgccttcttctgcttcccaagttctgggattaaagacatgtgccaccatgcctggtagataggtattattactataactgattttgtgtgtgctcatgtatgtgtccatgtgaatgtgggtgcatgtgtgtggaagtcagatggcaatctcagatcttggtcgtagcctttagtcctaagtcagggtctcttttgttttgctgtgtaccccagactctgagttctggaaattcatctttctcacctcccatcttgctgtcgaagcccttgaagttattatgcccaagttgatgtagcttctagagattttaactcagggtctcacatttccatgaaaaatgtttttgcctactgaaccatctttccagcctcttagactaaactggccttgaactcctgaccctgcttttatatcccgagtgctttaattactggaatgctcctccgagccctgcttgaaacaccctccaccctcattcctttcttagatattcagtagaattcactattgagctgtctggatctgggattatgtttagaaaggcttttagtttctgagtctatttctttttcttttctttttttaaaaatatttatttaagccggacgtggtggcgcacgcctttaatcccagcactagggaagcagaggcaggtggatctctgagtttgaggccagcctggtctacaaagtgagttccaggacagccagggctacacagagaaaccctgtcttgaaaaaaaccaaaaaaaaaaaaaaaaaaaaaatttattttatatacatgagtaacactgttgctgtcctcagactgaagagggcatcagatcccattacagatggttgtgagccaccatgtggttgctgggaattgaactcaggacctctggtagagcagtcagtgctcttatccgctgagccatctctccagcctgagtctatttctttagtagactattgggccattcagattgtgtgtttctcctgtgagttcttccttctttggtccattgtgtccacaagcagacattgtatggtgacctcttgcaaaggtaaggtgtgtttatggcccagaacatgtaggccgctgtaaatgggtgcactgaagactgtctgcttgctgttgctggatggtgctgatgggagctggcacacagccagttgagtggccgtgctgccgcttctgtcctgattggctgggggctgggggggggggcagtggtcaggacatgagtgtgtgtacatgtggagaggccagaggtcagcagcagatgactccctctgttgctgtccatgttaatttttgaggcagtgtcccttgctgaacctgtagcttgctgatttggctagactggctggcaagccttgggcatcctcctgtctccacctccccagtgggattactggagtgttctccctcctgtgagtgctgggtcctcaagcttgcgcagtaagcgctttgtttactacagagctcctccagctggcctctgagcttttgtttagtagacacagcacattgtggatgatgttcttattgaagaattgactcctggctggcatgagagcacacaccttcaatctcagaagtcagaggtgggcatatttctgtgagttcagagctacatagtgagaccctgtttataaaatgaaacaatgaaaagaagagacttcttcatcagcctgtctgcctcttttatctctaatttcccccctgtggtgctgagattgagcccatggcttcatgaacaccaaacaagtgctctactattaaaccctctcgtccctctactttttctttctcttttttggggggagtgggggtagggtctccccatatgtagtcatgactgtccaatgttgggatcaaaagtgcatgcgcacagcctgactccctccacttcttatgtaaagtcttatattttaaaaaaagatttattactatatctaagtatactgtagctgtcttcagacacaccagaagagggcatcagatcttattacggatggttgtgggccaccgtgtggttgctgggatttgaactcaggaccttcagaagagcagtcagtgctcttaaccactgagccatctctctagcccctaaagtcttattttatctttgttgtttaaactacattgattttctttcactgaacattatttcaagagaactttttctgttttctcttagtctgtatgcatcttcataagcaaaatggttttctttagagagcataactagatcttgctttattttaaaatccaatctaggctgggtagttcttgcctcagtagtggggagacagagacaggagaaactgttggaggccagcctgttccaggatagccagggtaacatagagagaccctgtctcaaagccatcaacagtaacaatgtaaaataagtaacatctagtcgacagtatttgcccttttttccttgtgtgtggcgtgtataatatgcctatagtttcacagagaccaggaaaagagcatcaggtatcctgctttgacactttctactatattcccttgagacagggtttcttactgaactaggctggcagccagcaagtctggtgatcctcctgtctcaaccacccatagcactagggttacaggcacccatgggaccatgcccagctgtttatattgcctctggggatttgaaccaaggcccttgtgtttgcacagcaagtgtttttgctgctaacctatctccccctccttgtgagtatgtgtgccttttactagtattgaaactagggcctcacgtgctatattcccagtacccaatctccctatgaattatgtagaccactcatgttaaagttaatagtggtggagctaggttaacacttagtacatggtggagctaggttaacacttagtacatggtggagctaggttaacacttagtacatggtggagctaggctaacagtacatttagcctttttccttcccttggtttgtgtttccttttttctccttctctttctgctttctctggttttatttgagcattttgtacagtcatgtttttcttttctctgaccatatcatacacatgcatacattcgtgtaagtttaattcaaattatactaatttagtttaatgccttgggatttgcagaaagcatttacaactaaccttgttccactttcagacagaatagtcctgtttcatacgtagctatggctgttttactactgaagacaccttgagtaacccttaccaggaaaacaccaaaagaggttcagatattggcgtttttctggcattggaatgtttgtatgttttgtgtggagcatccttggagatctgaaaccctccacagtttgggacttctgagccttgtcttagttcaggctttattgttgtaaagagacaccatgaccacggcaactctttttttttggggggggggggtgagacagggtttctctgtgtagccctggctgtctggttgtcctggaacttactctgtagaccaggctggccttgaactcagaaattcgcctgtctctgcctcccaagtgctgggattaaaggcctgcgccaccactgcctggctgctgtttttattttcaatcagctgcttttagagcaattaaaataagaaaataaaagatttgattttacctttatttacatattatttcttcatgtagatcacagattgatcaagttatttcctatatttatttatttttattttgtgtatatatgagtgcctgtatatatatgtgtgtgtgcaccacatgtgtgtctggtgcctggagaagccagaaggtagcatcggattcccttgaaatggagttacagatggtagggagctgccatgtggatgctgggagtttaagaccagcctggattgtatagtgagttccaggccagccagaacatatcaagatattgtcaagaaaaaatagaaggggaaggagagacctttagtagttgctgcttttccagatgatctgggtacgattgccagcacccacgtggtagctcacaaccatctataactttagtctcagaaaagtcaatgcccttttatggtccctgactgagggttttacagacaccatgaccatggcaagtcttataagggacaacatttgattggggctggcttacagtttcagatgttcagttattaccatcaaggtgggagcatggcagcatccaggcagatacgatgcaggaggagctgagagttctacatcatctgaaggctggtagcagaatactggcttccaggcagctaggatgagggtcttaaaactcacatccacagtgacacacctactctaacaggaccacaccttctaatagtgccacttcctgggctgagcatagacaaaccataacaatctgtaagtgcagctggagggagagggggacctgtctacagcgtctgcagctcagcgggtaggagcagtggctcctctcttagacagtcctagctttaccctcaccatccatatggcgcctcacatctagtgtgtaattctagttctgggggtcccctgcctctaagggccccaggcacaagtggtgcccagacacgcgtgcaagcaaaacatccacacacataaaaattaaaaagataaaaaaagggcctgcttctgctattgtgtcattaattcatttctaagggcagagcctttgtggcctaatcccccagcccaccgttcagcacttgtacttaagggttaagtgtcaaacacggatttgggggtgcattcaggccatggcactttgcttttccacttgtgtacatttgttgactgaacaacaaaaaattttttaaaaaattttagtggggctatacacagcgccccaacaggaaacatctgccatcttggcccctattctaccaaaaccagtcttgagatatcattgaaagattctcgatgccagttgtgaacacagagcagtaggaaatgtgggaagattatcacagctgctgagacttcagtaagcgcgcagggctcggggctggagagatggctcagtgcttaagagtagtggtcctcttccagaggtccctggcaaacatgcaagttaaaatgcatgccgtgcgcgcgaggcgcacacacacacacacacacacagagcacatgataggttagtaggtgggttggtaggtaggtaaatagacagttaatcaatgaatcaatctggctacagagtgagttccaagacagtcagagctacagagggaaaccccatcttgaaattaaaaaaataaaaacaacaacaacaaaaaccggggctgtgctgacagtgcagaagacggtggtcctgatggctgggggcactctgcagcgacagtagtcctggctgttctcacagtagtactctttcctccctctcttgcagtatttaggtcagttaacatccattcccggctacctgaacccttccagtaggacggaaatcctgcatttcatagacaaggcaaaggtaaaagcctgtcccatcccccgctcccccaatatgcttttctacttagcctgcatcagcccctggtcccctcacctgtgacctcagcctgagagggacggctcagctctgtcactttgtgggtgttcttggctatacaaagtcttcagacaaagatggtttcttagttgggacctttaatctctagacttggttttgggctcctccccaaactcagttttaagatattctagatttccagatactgatcaaaaaaaggtagttccagaagaatccctcacatgattcaaacatgttgacattctcggggcgagtgctacttttttcgcctctccttggcttttaaccgaggactgtagccagcacagtgctcccagaggagagctggacacagtggtccagcgtttctgatgcttgtgattctttgcagcggtcccaccagcttcctgggcacctgactcaggagcacgatgctgtgctcagtctgtctgcctacaatgtcaagttggcctggagggacggggaggacattatcctcagggtgcccatccatgatatcgctgctgtctcctatgtccgagatgatgctgcacacctggtggtcctgaagacaggtatggattggctggctggtctggaggtccacgtccaaaggagaatccctggtttcctgccattgtgatggtttctgcagctccaggctacgcactgccacctgctacggctataaattagatttcctgccatgagctctgtcccagggtccctgtcacactcagggcctttggagacttgaggaatacagtattcagggtcagtgtttaaataaggtttttcttgggccaggtgtgctcagaggcaggtggatctctgtgagtttgaggcctggtctctaaagtgagttccaggacagccagagctacatagtgagaccctgtctcaaaaaccaccttcctcctggtgacttctcagtccctgctccccataattgatgttgcctccactgcttagatataggtgatccccagaaagaagggtggtgaccgaaagctgtaacagggacttcctctgagcccaaccaacatttgttttgttgttttgttgttgttttgtttgtttgtttttaatgagacagggtctctacatagccctggctgtcttagaactcgcagaggtctccctgcctctgcctcctggatactagcgttaaggttgcccagccacatctagtctccagtctacatttgagccccagtgttcccaaagctgggacagcaaagccagttcccccggccccgtgctgcctccttgttcagacagcagggtgctccttccacttgctgtgctcctcccccgggtgctcctcccccagtgctcacagggcccgccttccttcatgttagtgtccaccctaacatctacggcaatgagaaatgaggggagaacctgccctacctgtgtcagcacaggcacactggcctaggcttgctgggtcactccgagtgaggatgatcccaaagccagctccagagggctggtgacaaggcacaagggtcagatggtctaggctttttcacggtatgggaagagtgtcttatgatgctagttcaagtgctatggtcagctccaggcagctggggttgtgaagtgattttagctgctctgccttgtctatgtagaatggctcattccctgcccagcatacttacataccatattttctcttatacaactcacacgtcccatatcacacatactatatacacacagttgcatatatcacactcccatagactggaacacacttgcctgcccagcccagtcacatctacacacatatgtagatgcatgtggtagatacttgccctcacacagaagatagtttgattaccaagttcatctgaacaagctcctcttgaattatttaacttacaaaggcttatttttagttaagatctcactctaatcttatctgacctggaattcactctgaggtccagggtagccttgaacttacaacagttctgcctcagctttctgagtaatggaattacacaagtgagctttttaaaagtggaaaaggcttgtttggctcttggctaatgaggttccagaccaagagaccgttgcttctaggctcggtgcaggtaggaattgtatggcagagcatagctgcttgcttcacagccagaaagcccaaaactaggaacagggttgggccccatggtttcttttgatagcatgcccttgtgaccaaagcacttcctaatttttttctcacttcctggtagcaccacctggaggccaagtctttgtcacttacttagcatccaagtcagagtgttttgttttttttctcagggttgagtgagtctgtctgtttgatgctaggcattgaattaggttaagcagtacgaaattgtcactattttaatctgtaaaaatgtcagtttaacatgactcaaactagtacaaagtatctgacatgaactacctcagttagcaactataatatacctaagaggcgtccatgagtctccgctcacaagtgggtgaaggtaggtggtcttgaactggttccttcctgcttcagacccctgtccagcatcaccaaggtgagcctctggctcttgactctcagagaagagagggaggagcctggctcctgatcaggttcctgtgggtattttaagctgatatggagaagcgttccctatagttctcatgctgcagggatgtttctctgcttgaatcagtacaataaattgttaaggaagagaaaatagaaatttccctccatataaggaacattccaaaaccatgagacacagtgcagagagtctgctcctctcagcagcagagaatgcatctctgtcccagggcggcctcgctgtggcaggagtgtgtgtgtatccaccctgatccgggcttctgggcacaagggctggtttgggttttggcttgtagtttcctcacccagagccaggcagatgcattggtaacgctcgctgggcacctccttgcatgaggcaggcacctgtgtatctcttctgtccagagggttctagtgtttgaggcagtcaagtgtggacagctcaggtccattcacctggagagaggctgaagcagggaacctgcttatctgccagagatggaggagaggcaggtggcaggcaggtctgagcctgtgtggctgtctcggcctgctgcccagagggtagaagtgacatcctctcacagatggtacctggctggtacccacacttcacagctgcccactgagggccaagaagctaatttaaaatgttaacaaaaataaaaacaagtgaaatgacttataataatacattcatagtctctctctgtatgtgggggtggggggtatacatataccagctgaactacatccctagccttctatttttttttgtttgtttgtttgttttgtttgttttggttttgtttttgtttttcgagacagggtttctctggctgtcctggaattcactttgtagaccaggctggcctcgaactcagaaatccacctgcctctgcctcccaagtgctgggattaaaggtgtgtaccaccactgcccattttggctttttttttttttttttttttttttttgagatagtgtttgctgaaggctggtcttaagctcactggcaggcccaggcaggccttgaactcactctgactcttctgcttctggcattgcaggcatgctccgccatgctggctttaacagtgtctctgctttgcctcctgtgtctaatagttgctatgagagcacgtgactgctatgaagctgactgagctcgttgttggctggaaagcagtgaagcacgggtgtgatttgcctgtgctacatggtgcttacactcagaagctctgcggtcagtggctgtcgtcaggacacggctgtcccaggatctcactagtagctcacagccatagtctgtactcccacctccatctggcctaagcctgtctctgcttgtgttcccagggctgtggctaaagccttatgtttctccagttttgccttctgcacactcctgaggagggtgacaacagggccacctctaagcttagcatatagtcccagcacccttcccaagctggtttcagagtgccgctccctggacaactccttgcgtttccagtgtatacgtttttgtgtacaatgtgaggatgtggccttgggccttgtccttatctacagctaggccagtcacaggctttcaggtccctcactttagtttattcttctgcaggaagagaatgccttaggccccaactcccttgaggcgtggacccctgctggaattatttgtagtctgttaacttgagtagtgtacgctcctgccttagctctaagcagttgaaggccagctggcatggtttggcacagtgggatatgaagatgggtgcttaggtgccctgtacctctcacaagctagttttgtttggaaggtctaggggttggattttatttatagattttttttttttttgcttttcaaattttttttatagatttatttttattttatcacacgcacgcacacgcacacacaccatgctgtgctggcgtgaacacctgtgccgtggtgtgcatgtagaggtcagaggacagctgggtggagctgcttctcatcttccaccattattgggttcctggggatggcgctcaggttgtcggccttgcatggcgagtgcttttgcactgagacatctcacaggccctggggagtgaatgttcttgctggtacctcagctgccctcgtgcctgccctccatgcactgcactaactgatgtgtttacttctcagcccaggacccaggcatctctcccagccagagtctgtgtgcagaaagttctagaggcctcagcgcaggttccttgtcagaaagtgcagtggggccagtagaggcatgttgcctggtcatcatggccacagagagcaaggtgagacctccctgttgtgtaccagagctgtccaagccttgcccgagacccagcacatcctggtcctacctgtgattagaggctgccttgcctctagcccagccctacccaagatccgacgccagccttagaatcctggctctagccagcccttccttctgctctgtctagcactacttcacacattgtcccttcccagagtttctccctgaccaagccctgtccatgacctaataaatgtccctacctataaccacagctgcccacactcccaggttccagagggtacctcccatacccagttcatctacctcactcccctctgccagccttgcccataggctctcttggccagtcctcaagcaccatccccaagatggtcagtagagcgtttgcttaccagtctcctctttggaatgcctctccccactctcacactgactgatagtgatggctacaggcatggcgacctgtataccacgccctcctggtacttcaaacaaagatagcgtttcctcagcacatggcagtcacagcggcacaaagatgagccgtggagcctcaggactcacttgacatcttccatgcagtttttgcctcttgctttcattgactaatggtgacttcccacctaaatgtcctctggctcacctcacttagcctacgtgctagtgatgctctcaatcaaatactttgttgtgggcagctaccgaagcactgcagagtctgagcaatgtccccagatactgttctacggttctggacaaaattaaccctctaaagaagccctgttttaaacagcacactgttacagaaggacgctacttcttttggaaatgtctaaggttggaagtgagaccaggatgtcttctctctcttacttgggcttagatgggaattttgaacattgatgaccagttaccggaagaggaggcaaagctgatgccaacacccgtggccttcagatgcctgtaagggccacactgggccatagtctcttctcaggcctgtttctgttttgtgataccctgggctgtgacaggcactgggccctttggttctggtctgctccccatttatattgttggtgcctctgagacattatgggtaccctagagactgtgggaaagtgctgtctgcagcgttagccactgaggacggttgctgttattcactcactctaggtcgccgctgaagagttgtgctccctgctcagccaggtcttccagattgtttacacggagtccaccatcgactttctggaccgagcaatatttgatggggcttccacacctacccaccacctgtcgctgcacagtggtatgttgaatggaaggggccggctaggggtcatgagcagttcatctggaagcataggttcccagacagggatgctggggaactgggtaggtggggcccgttttgggggccttttggtatgcccgagcagctctcagcgtgtggccccttgcaagagcacagcgagatgcttgaagttgttctggctttgtgaaaggccgagaccaggaaactggagagtggcagggccgtacctctgcaccacgataaaggctagtggaagtgctgtgcagacctcctgctagtctgtagatacttcctgtctgggtgtggtgacatatctgttatcctagaacccaggagatagaggcaggaggattgctacaagtttgagaccagcctgggctacgtaggcagaccctgttttacagtagcacacttcttacctgagttacatttctcactgcggtacctaatacctaacaaggtgcagtgtgagggagggatggttatggcctcccctcatgatgaggaagccacagctggagggggaggcatggtggcaggtgtcagaaggctctgtagcatttgtggttgggaaaccaggagggagaggagcaagtggggctaggttgcaacacatcaaagctagtgacccctttcttcagcaaaactccatagatttctcatacagtgccaccagttggagattaaacgttcaaacccatgagtgttgaaacaacctgtgggaaacagttgacattcaaaccagttgctggaggcccatcccagcatgcaaatggcagtcaagtgatgcaaaatgaattcattctaacttcagaagtccctgtggcccttgacagtcccagtactgttcaaaagtccagtctctccccagaacacatgacagacctttaccaaagccaggttacatactttgaatccacttctaggacacagtggcacagggtgaacattttccctccaaaaggaaggatggggcagagcagggaaagatcaaagatctgtaagaccaaaaccaagtgggaagcaacagtatctgggcacatggtgggatagccccagctccaagggtctctggctttttttgtctgcagctcacagcctctttcctgggatggctacgatcaacaatctagctttctttcacagacatgccttagtttctggcctctgcaacatcctgaggtctgtgctgcaacgtaggctttaccttcacagccccaaaccgtggtgtctcatccctgggcttccttgtagggttctgatcctgctaaatgttgcttggctttagcagctttctggaaccatggtataagttaccacggcccctcagtcttgcatttttcatgcctctatcaccaataccatgtggacagtactgtcaagttgtaccccagctcttggacctcatggaccaccatggcagcagcatacactttgttgggtaattgttttcaaggaacacaaagtctcttcagctttatttgaggtcttcctgtcctcctgggtagagtggtgagcagtaccctcactgaagcctaatgctgttccaccttgaaatttcctgttacataaatacattagttcaggacatgagcagagtgctaccagctcctataccagggtgtaacctgaatggcctttaacctagttcccaatagagcctattccatacctgaaacatatgagcagttttcaccatgtccatttctgtcaccattctggttttccaaactgctaccagagtgtcccattaagccctaagttctaggctcttccacattcttcctaccggccagtttccaaggcctatgaaccacacactcaggtttgtttctgcaaaggccctatcctgatactataatctgttagtgttctttagggaacaaacccacagaatgaatatatactacaagggggttcattggattggcccacacaacacaggctgggtagtccagcagtccgtctgcacaatgaaaggctgaattccgcacctgctcagcctgtggcgctgggtgaggctgtcatgtgagggagagctcaacatggcttcctgtgtgtcagtgggaggcgaggccattgggaaaggcagagatatacgtgtggtgaagattaaggaagcctctagggcagcagttctcaccctctgtgtcctctacgtcttttgcacagatgactcttccacgaaagtggacatgaaggacagttacgatgctgacgccagcaccttgtgagtacacgcactaagtgcgtcatcaaatgctgggtcttccgtgtctgctctctagcttggccctgcaagtcctcttagctacagagtctgcctctaggccctgccagtcctttctcatccctaccttccacagaagtaaccttggaaaaggcacaaaatggtgatgccgggcagccttctaaagcctgttagcccagccagagcattcgcgcagccttcctgaccctctactgctgtctgtcagctctggctcggccttctgccctagctctccctccctttgcccatttgagagtcactcaggttggctggctcctgagatctcctttatctccatgtgtggcttatgcacaagcagtcctccttagtcggtgttcgtgcttgtatttgtgagcaggcctgtcggccccagcccacagcagccacaggaggttgggttgtgaggccacccacattgaaccttgtgctttgcagctgcttcccggactctggggatgtgggaggcctgccgcccttacccttctgcatgcagacatcaccccatagcaagactgtcagtgagagcgagctgagcaccagcgccacggaactgctgcaggactacatgctcacggtaggcagtggcctcctcactcgcctggctttactattgggtctgggggggcgggggaggtctgggggcctgagttggtgctaggctgtttggtctggaccatgctggtactgattcgaaacagcagctctgctggtgcctgggcctgatgcctctgtttgaagtcagccttctggttctgtgtacccccaggtcaccctgtgtacccttgctgttccacgcagagctagcttcattctctttagccctactgaggaaccttttgtttcaagacagcagatctgtgtttgccctggttccttgtgtagctcctctgttggccctgatgacagacacatggtggcattctacctctacagcaaggccacactaagccctccttactctgcacttctgttccctcacagttacgtacgaagctgtcatcacaggagatccagcagttcgcagctctgctacatgagtaccgcaatggggcctctatccatgagttttgcatcagcctgcggcagctctatggggacagccgcaagttcctgctacttggtgagtggggcacggagggccgctggtcccctctgggaatgtgcagagtccagaagggaggagctccatcccatgggtctcatcatagcttggctgaggctgcaggactggcataggtacttggaagggcccttctccttctactcagagcctgagccttgagctgagctggttgggctctgccaggaagtgagagaaggccctgagactgagtctaaacaaaaccatcagatctcaactgtgctgctggcaagagtccaggctctttaagggggtacctttgtcagtgggttttggggaacaggtagaaatttgttgagtggagaagcaaagacaccaactagacagaaggcgcctctcttgtacatctttgtgcaagactcacaaagtgcctggcacatccttcagagccactgccagtctcggtgtaaggctgccacaacagcctcggtggaaggaacagtgctgccacatcagcctcccctctgtgtcgtcccctgcttccagcagtcagaacagtgaatggctcagctcacagaaagctctgagggtcttcctgtgctctagtaaaccagggaggccagctggtcttatgttgtataggcccggtgagcatcagcatcagcatctacctggggctgtctgtggtgaggaaggactagagactagacgtagtctgagcacctcactccctgcaggatcaggtacccagcaaggctcacattccaggtccctggcatctagcccagaatgaacattcagaagcctgaagccagcttcttcccattttgttctcggctgctacctctatgtccgaaatggcaacagagccaggcacgacaggacccagatgtaatctgagcacttaggagacgtgaggcaggaggatagcaagttcaagattagctttgagctatatagtaagaatctcagaaaaagtaggttggaagaaagttgagctgtggatacctgctgcttagagtcctgtgtctggcactgtttctaggcctctctaccacctcctggcccccacctaagcaggcttttgtaggaatacagagtctcatgcaggtcaggctggcctcaaactctctgtgtaggggagggtgaccttgagcgccttagcttctgtttcctgcgttctgaaattagtagtgaacatgatatgtcagggttctcttaaaggctccacctcaggagaatgcggtctgtaaactcatctgatgtgttcatgaaacccttatcctggctgggtgggggcccagcctgcctgcccacatcaaggtttgggattctgagataatggtcttcctgagtaggactggtttcggcatgagtcctggctctgaagacagacctcattgccaatagctttgtggcttttgcattctgtcctgttagataggggcttcgagggtctgatggctgatgccatgcctcaaagctagagggtgagattgatagaaggcaagctattcatagctggggcccttgtcagtcaggtttaattaaacctggctccagggcacagcttgtgtggtgtgggggtcctgagccccctctggggttggggtcctgagccccct

SEQ ID NO: 2644 - DNA, 857 bp, Mus musculus
ggaaccaggattcctccaaagaaacttttgcaactgcagtgcccctggagatctcccatggagaacgagcctggaattgtgtcgccatttaaacgagtattcctaaaaggtgaaaagagtagagataagaaagcccatgagaaggtgacagagaggcgccctctgcacactgtggtgctggcgttacctgagcgcgtcgagccagacagactgctgagcgactatattgagaaggaggtgaagcccaggacccaggcatctctcccagccagagtctgtgtgcagaaagttctagaggcctcagcgcaggttccttgtcagaaagtgcagtggggccagtagaggcatgttgcctggtcatcatggccacagagagcaaggtcgccgctgaagagttgtgctccctgctcagccaggtcttccagattgtttacacggagtccaccatcgactttctggaccgagcaatatttgatggggcttccacacctacccaccacctgtcgctgcacagtgatgactcttccacgaaagtggacatgaaggacagttacgatgctgacgccagcaccttctgcttcccggactctggggatgtgggaggcctgccgcccttacccttctgcatgcagacatcaccccatagcaagactgtcagtgagagcgagctgagcaccagcgccacggaactgctgcaggactacatgctcacgttacgtacgaagctgtcatcacaggagatccagcagttcgcagctctgctacatgagtaccgcaatggggcctctatccatgagttttgcatcagcctgcggcagctctatggggacagccgcaagttcctgctacttggtgag

SEQ ID NO: 2645 - protein, 165 aa, Mus musculus
MATESKVAAEELCSLLSQVFQIVYTESTIDFLDRAIFDGASTPTHHLSLHSDDSSTKVDMKDSYDADASTFCFPDSGDVGGLPPLPFCMQTSPHSKTVSESELSTSATELLQDYMLTLRTKLSSQEIQQFAALLHEYRNGASIHEFCISLRQLYGDSRKFLLLGE

SEQ ID NO: 2646 - DNA, 1177 bp, Mus musculus
caaacgtctcaaaggggactagaagaggcacagcagctgtccgcagaaggggaggaaccaggattcctccaaagaaacttttgcaactgcagtgcccctggagatctcccatggagaacgagcctggaattgtgtcgccatttaaacgagtattcctaaaaggtgaaaagagtagagataagaaagcccatgagaaggtgacagagaggcgccctctgcacactgtggtgctggcgttacctgagcgcgtcgagccagacagactgctgagcgactatattgagaaggaggtgaagtatttaggtcagttaacatccattcccggctacctgaacccttccagtaggacggaaatcctgcatttcatagacaaggcaaagcggtcccaccagcttcctgggcacctgactcaggagcacgatgctgtgctcagtctgtctgcctacaatgtcaagttggcctggagggacggggaggacattatcctcagggtgcccatccatgatatcgctgctgtctcctatgtccgagatgatgctgcacacctggtggtcctgaagacagcccaggacccaggcatctctcccagccagagtctgtgtgcagaaagttctagaggcctcagcgcaggttccttgtcagaaagtgcagtggggccagtagaggcatgttgcctggtcatcatggccacagagagcaaggtcgccgctgaagagttgtgctccctgctcagccaggtcttccagattgtttacacggagtccaccatcgactttctggaccgagcaatatttgatggggcttccacacctacccaccacctgtcgctgcacagtgatgactcttccacgaaagtggacatgaaggacagttacgatgctgacgccagcaccttctgcttcccggactctggggatgtgggaggcctgccgcccttacccttctgcatgcagacatcaccccatagcaagactgtcagtgagagcgagctgagcaccagcgccacggaactgctgcaggactacatgctcacgttacgtacgaagctgtcatcacaggagatccagcagttcgcagctctgctacatgagtaccgcaatggggcctctatccatgagttttgcatcagcctgcggcagctctatggggacagccgcaagttcctgctacttggtga

SEQ ID NO: 2647 - protein, 356 aa, Mus musculus
  VARIANT (1)...(356): Xaa = Any Amino Acid
MENEPGIVSPFKRVFLKGEKSRDKKAHEKVTERRPLHTVVLALPERVEPDRLLSDYIEKEVKYLGQLTSIPGYLNPSSRTEILHFIDKAKRSHQLPGHLTQEHDAVLSLSAYNVKLAWRDGEDIILRVPIHDIAAVSYVRDDAAHLVVLKTAQDPGISPSQSLCAESSRGLSAGSLSESAVGPVEACCLVIMATESKVAAEELCSLLSQVFQIVYTESTIDFLDRAIFDGASTPTHHLSLHSDDSSTKVDMKDSYDADASTFCFPDSGDVGGLPPLPFCMQTSPHSKTVSESELSTSATELLQDYMLTLRTKLSSQEIQQFAALLHEYRNGASIHEFCISLRQLYGDSRKFLLLGX

SEQ ID NO: 2648 - DNA, 96250 bp, Homo sapiens
agcttgggtgacacacccagaccccgtctcaaaaacaaaacaaaaaaaacaaaatctgaaaggatgccaaaacataaaaatcacattatcagtttaattgtgattttgctgggaaactgcatgagactggcacaaagagagaaacatgacagcagtattttaactgcttatcagaatactaaaaataactttcttcaaacccacatctcaaatgagtaattccattgttcttccaggccaactagtgacgcacgatatttttcttcttagttcagctaaaatctgggctcttgtctcccgatcaggaaaaattaggcacatggacacattgaagggtcagaatgtattaagtgaaaagaaagcccttagcaaagaggtggtcctgccaacaggctcctactccacagactgaatatcaggccaccatactggagctgaagaagcccggctcccctgcataaagcatgaattcctggtggctccaccccatttccccagtgcacatgtaggcctctaatctgagccactccacactgatttatttcccttactgcacatgtgttaagggatagaatttttcactgtaggcatgtttaggcaagccccctgtgcataatgacctggatggcatttggctgtctcccgcctctatcagtagcatatttaggggaggaaagatgaattttcttgctacccttctaaattctcagctagagtccttgtaacaaaagatagattttttttttttgagacagggtctcactgtgtctcccaggctagagcacagtggtgctatcatggctcactgcaacctccacacccccaggctcaagtgatcctcccatctcagcctcccaagtaactgggactacaggagcttgccacaacacctggctatttatttatttatttttgagacagagtcttgctctgtcacccaggctggagtgcagtggcatgatctcggctcactgcaacctctgccacccgggttcaagcaattctcctgcctcagccacccgagtagctgggattacaggcgcttgccaccatgcctggctaatttttgtatttttagtagaggcgggggtttcaccatcttggccacgctggtcttgaactcctgaccttgtgatccacctgcctcggcttcccaaagtgctgggattacaagtgtcagccactgcgcctggccctaattttttaattttttatttcgtagagatgggctcctgtcatgttgcccaggctgatctccagctcctgggttcaagcaatcctcttgccttggcctcccaagatgttgggattataggcgggagccaccatgcccagctcaaaagattaacaggagaaaaacaaatggagctatattaacatgtatactttgcatatacatgtgagatgcccaagaaaatgagtaattctgaaaggagtggcttagaattcaggtttaagtaccatcttcagctaaaaacaaagaagggagtgaggaaggccagttttgggaaaaagacccggagaagcacacaaaacaagttgctgccttctccattgataagggtctctggtgatttagagtcaactttctcttcctggtacagagagggagacacccttacaaagagcgatttcttttaagactgtgagtttctctttttttttttttagtatttattgatcattcttgggtgtttctcagagagggggatttggcagggtcataggacaatagtggagggaaggtcagcagataaacatgtgaacaagggtctctggttttcctaggcagaggaccctgcggccttccggtgtttgtgtccctgggtacttgagattagggagtggtgatgactcttaacgagcatgctgccttcaagcatctgtttaacaaagcacatcttgcaccgcccttaatccatttaaccctgagtggacacagcacatgtttcagagagcatggggctgagggtaaggttatagattaacagcatcccaaggcagaagaatttttcttagtacataacaaaatggagtctcctgtgtctacttctctccacacagacacagcaacaatctgatctctccttcctttccccacatttccccactttctactcgacaaaaccgccatcgtcatcatggcccgttctcaatgagctgttgggcacacctcccagacggcctggcggccgggcagaggggctcctcacttcccagacggggcggctgggcagaggcgccccccacctcccggacggggcggcggccgggcggaggcgcccccacctcccggacggggcggctgccgggcgggggctgccccccacctccctcctggacggggcggctggccgggcgggggctgccccccacctcccggacggggcggctgccaggcagagacgctcctcacctcccagacggggcggctgccgggcggaggggctcctcacttctcagacggggcggctgggcagagacgctcctcacttcccagacggggtggtggccggggtgaatttctctttcaaaggggtagcttatgctgttttcatagcttctgtttctcaaaattactagctcagaataatccttaggccaaggaggcatattttggggtggcatattctggtctcctacagatgtatgcctgaaaagaaaattagcaatttggctctagaagaataaacagtgttagctaatgagatgtcaaaatggaacttgcaaggttgcttccgttgggggccacacagtgtggctgtatttctgaggggtcattctgatccagagttgatttggtccttcatgatttataggcctggaaactggatattaaaattcactgatagttcactctaatcaactctaaagtgtctttccttcactaatgaagtctatatggttttatcatgtgcacaacagtcaaagtgttgcatgtcatacgtcaaagaataactcagagaaggccaggcgcggtggttcatgcctgtaatcccaacactttgggatgccaaggcgggtggatcatgaatgaggtcaggagttcgagaccagccaggccaatatgatgaaaccctgtctctactaaaaatacaaaaattagcagggcgtggtggcacacgcctgtagtcccagctactcgggaggctgaggcagaagaatcgcttgaacccaggaggcagaggttgcagtgagccaagattgtgctactgcactccagcctgggccacagagcgagactctgtctcaaaacaaacaaacagaaatcagagacatctagttagttatttgcaagccagttctcatatgagggagacaactgatagactcaaggacagatggctgagaggcacaataagaaaacaactgcagtcagtttcgagaccagtgaaaagattcacttaaaaaaattggctggttggctggctgcagtggctcacacctgtgatcccgacactctgggaggccgaggctgctggatcacctgaggtcaggagtttgagaccaacctggccaacatggtgatggtgaaaccctgtctctactaaaaatacaaaaattggctgggtgtggtggtgcatgcctgtaatcctagctactcgggaggctgaggcaggagtcacttgaacccaggaggtggaggttgcggtgagccaagatcatgccactgcactccagcctgggcaatagagcaagactctgtctcaaaaaagaaaaaaaattggctggaaggctgggcacagtggctcatgcctgtaatcccagcactttgggaggccaagacagatggattgcatgagtccatgcgttcaagaccagcctgggcaacatggtgaaaccctgtctctacaaaaaatacaaaaattagccagtgtggtggtgtgcatctgtagtcccagctacttgggagactgaggtgggaggatagctggagcctgggaggttgagggtgcagtgagtcgagatggttccactgcattctagcctgggtgacagagtgagaccctgtctcaaaaaaaaaaaaaaaaattggctgaaatctagcaaaaatgcaaatctgggaacactgtctttgaataggccaattaagtgtaaattttcagtgtttaggggttttcttaaaaccagggaaacattacctgaacagggcctagctgggaagcatctatgagaaactatgttcaggtaatgttgccagtgcccctccacctcagtctggctcagtgtacataatttcccttattagagtttatttcagatacaaggaggaatcccacatagtccgtaccttcaaaggagcttattctagtagaggaaatgtcctaaacctggttaactctagcatcacagacatacagatacagttatctggaaactggaggagggaaaaattgcatccagaaatttagtggaagatgtgattattgagctgggtcacaaagctcaacagccaaattcaccagcagtctaaaagacttgggtttaagccaggcgcggtggctcacacctgtaaccccagcactctgggaggccgaagcaggcagatcacgaggtcaagagatcaaaaccatcctggccaacatggtgaaaccccgtctctactaaaatacaaaaatcagttgggcaaaaagatttgggtttattaacctaccatgaccagggagagcaccccagaggaagaagggctgcttctcattacgagggaataggaaggggactttgtaaggtttgggctggccctgagtaattctgaagaggggacaaggggaagtgagtatcatggctataaagttgctttcatgaagtgtgggcagtttagtaattgggtaccttggtcgcttttgttcaagatgtaggagccacacaacaggctggggaggttattggtaagaaagcagtaatcataagtaggtggctgttaggacactttacagccaaggtgtgacctggagagaaagaaaagattgttttatgttataattgtctcattggtgtctgttacgagagactgaatatacaaatagacaatggctggaccatttgtacaactagaactctgactgacaacctgcagaaacctcctcaggaaaccaattcgttatctacagcaaccagcccaggaaacaagcctgctgtaagtcatacttgcaggaagccaggtgttatctctagtgacaatccaggagtaacttttctaacagcccccaaagcctaggacttaattaataactggcaccctatctctcaccagatacaaaaatcaactcaaaatggattaaagacttaaacataagacctgaaactacaaaactactagaagaaaatataggggaaatgcttcaagacattgaacgaggcaaagattttatggctaaaatttcaaaagcataggcaacaaaaccaaaaatagacaaatgggactatattaagcgaaactaaaaagcttctgcacagcaatggaaacaatcaactgagtgaaaagacaacctttagaatgggagaaaatatttgcaaactattcatgcggcaagggactaatatccagaatatacaaggaactcaaacaacttgacagcaaaaaaccacaaataatccattaaaaagtgggcgaagaatctgagtagacatttctcaaaagaagatgtacaaaaaacaaataggtacatataaaaaaatactcaatatcatgagtcatcagggaaatgcaaatcaaaaccacaatgagataccatttcaccccatttagaatggttattatcaaaaaggcaaaaaataagggtgttggcgcacctgcagtcccagctacttaggaggctgaggtgggaggatccattgagcccaggagcccagctccttagctcaagctgcggtgagctaagatcatgccactgcactccagcctgggtaacagagggaaaccctgtctctaaaaaaaaaaaaagacaaaaaataaggttgagcgtggtgactcaagcctataatcccagcactttgggaggctgaggcgcgaggattgcttgagcccaggaatttgagagcagcctgggcaacatagagacctcatctctacaaaaagtaaaaaaattagccaggtgtgatagcagacacctgtggttccagctactggggaggctgaggtgggaggatctcttgagtctatgagatcaaggctgtagtgagcagtgatcataccactgcactccagcctgggtgacagagtgagacctcatgtcaaaaaaaattagtatatatacacaatagaatactatttggccataggaaaaaaaaatgaaaatgtcatttgcagcaacataaatagagctagaggtcactatgtaagcctgtaatcccaatacttgggaggctgaagtgggaggatggcttgaacctaggagttggagaccagcctgggcaacatagtgacctcatccctgtaaatttttttttaaacaaaaaaacaaagacaagtattgcatttactcactcatatgtgggagctaaacaaatattcatctcattgagatagagactgggatgatagccaccagaggctgggaagggtgtgtgttgggggaaagtagggggctgaagagaggttggttagcgtgtacaaacatacagctaaatagaagcaataatttctcatgggtgtgtgtgtgtgtgtgtgtgtctgtgtgacagatctggcttgttgcccaggctggagtgcagtggtgcaatgacagctcactgcagcctcgacctcctgggctcaaggaccccacttcaggcccctgagtagctgggaccacaggtgcacaccactatgcccagctaatttttgtattttttgtagaaaaaggatctcactatattgcccaggctggtctccaattcctgggttcacgtgatcttcccagcttagcctctccaagtgctcggattacgggtttgagccaccacacccagcctaaattctaatgttccatagcagagtaagatgactatagttaataacaatgtactgtatatttcagaatagctaggagagatctgaaatgtctccaacacaaagaaataagtgttcaggtgacgaatatcctaaataccctgattttattattacacatcatatgcatgtatcaaaatatcacatgtattttggccgggtgcagtggctcatgcctgtaatctcagcactttgggaggctaaggtggacagatcacatgaggccaggagttcgagaccagcctgggcaacatggtgaaaccctgtctctactaaaaatacagaaattagccgggcgtggtagtgggcacctgtaattccagctactccggaggcaggagaatcgcttgaaactggggggtggatgttgcagtgagctgagattgcaccactgcactacagcctgggcaatacagagtaagactctgtctcaaaaaaaaaaaaaaaaaaaaaaaaattagcctggtgtggtggtgcatgcctgtaatcccagctacttgggaagctgaggcaggagaattgcttgaacctgggaggcagaggttgcagtgagctgaaatcatgccactgcactccagcctgggtgacagagtgagactctgcctcacacacacacacaaatcacatgtacctcataaatatgtacaattattatgtgttagctgggtgcgatggctcatgcctataatcccagcactttgggaggctgaggagggaggattgcttgagcctaggagtttgagaccagcctgggcaacatagtgtgaccttgtctcaacaaaaatatactaaaattagccaggcttggtgatgcgtccttgtagtcccagctacttgggaggctgagatgggaggattgcttgagcccaggaggttgaagcttcagtgagccatgactgcatcactgcactctaacctgaaggacagagtgagactttatctttaaaaatacaaaagaaacaaaaaattatttgtcaattaaaaaaaaactggcagctttcctagttttcggtcctgcttccagcttaggagcaaccagagaaagacaaatatgtgcccctaaccaatcacttgggatgccctgccccttgcttccccaggccaacagcctcaaatgaggacatccctggaggcttcccttttttcactataaagcttacccactcctctgcctgacattgagtctcatccaaatacaaatgatggtggctgactcccttgttatagcaagctaacagcctttttgcttttctcattttattgtctttattcccagttatcaccatctgatcattagccagtggacttttgcttgaagcatgaacctgtgtatgcaaagacagggcaaaggtattctgatggataagaacagcctgaggaagtcagcacatccagagttaggctaagagaagttttagtagtgttgtttactgtattatggagtgataaatatgcatttgtggaagacggtggaagactttaaatatcaggcctttgttctgtgaatggtgggaaaataatgacaaccagatgcgctacatcatttgcgtgtgtaaatgtggcaagctggattattgcagaaggcagattgaaagggtgtttccactatctctgctttatcttgcagagaatggaatacttatgcctttggagaggtctagagaccaagtatttcttttgaatatcagtataacataggcccagtcaggagacagaaacacagtaaagaaaagtttaatataaagaattattaggccgggcgcggtggctcacgcctgtaatcccagcactttgggaggccgaggtgggcggatcacgaggtcaggagatccagaccatggtgaaaccccgtctctactaaaaatacaaaaattagccaggtgtggtggctggcgcctgtagtcccagctactcgggaggctgaggcaggagaacggcgtgaacccgcgaggcagagcttgcagtgagccgagatccacgccactggcactccagcctgggcgacagagcaaggctccgtctcaaaaaaaaaaaaaaaaaccaccaaaaaaacacagtttacattctagctgtgctacaaagttcttaccggcagattggtttagtggcaaaatagcagacctgctggtgactccaatttgtagtgtgcttttgggcgaatcacctcattccccggacctcatctggaaaatgtggaaattataccggatgactggtaaggttctacgattttattctgatagggtctgcacatccttgtggttgcacttctattttccaaatgtgtttgtctaaggcaggcagactttataacagagaagtactagaaaacggattccctgtggctcagggaataaagtgggacacaagaaaaaagaaaaccgcaccgcacccagactctcggcgggacgccccgcccctcaacagtggccgcctcctcgcgcccctccttcgccatctgccggccgcgtcccctcccgccggcccccgtcccccgtcccccgccccccgtccccttttcagagacctgagctccgcctccctggacgcgaggcaggctgggaagtcggccgccgtaaagatggcggcaaattgaaaaagttggagctgctcccgcgcgcgctcccgcgcgcgctgagtgggcggagcgaacagggggctggacaggtgcgttctcgcggccgtgcagaagcgaagtaggggtaggagcgtttccggctctcctgaaggacgcggggcggggtgggggtggtgcaaggcaggcgcgttctcggccgtcctgaaggggcaggatcttcagcctgtgggcggtgctctcgccgtgagcggggccaacgggccgtgttctccctgaaggggcggggtctgatcgctgcgggtcggattcccttgggcctgaaagtgaggatgagcgacaaccgtgggcggggcctgcgctggggaaggtggggcctgggcggggcggagggggctcgggcccggaagtgcgggtgtggggcgcggccggggcggagacttcgggcccggctggcgggcggcgccgggagcgcgggggcggcgggcccgggtcgagcatgtagcggctgctggcggcggggctcccggggcgggccgggcgggccgcgggagccgcacgcggcgatatggaagaggagggcaagaagggcaagaaggtgagcgtgcgcgggggcgtcctactgctgtggtcggcgggcggctgggttgaggggccagggtggggtgggcgggtgttccttggggcccgggggggggggcagtgggccagctggcggggcggggcggggcagggcgagaccccggacaatggtcaggtgggctttcgcggccgggcgggcaggaagcgccgcgcctttcctctggcccgggcagcggctcgccccgacctcggccccagacggccttccctgcgcgtcgggacctggggctgcagaggaagtgggcccggcgaggggccagaaagctgtccagggctggaactggagctagtgggctgtgtggttaacgtggagacgtttgctgctcactggacttcgtttttggatatccagtaaaagcaagggtggccttcaccttatggccagctcactcgtccactatcactcagacctaaaaccattgattgattttagtgacgctagctacatttggcagtgggatttaggacatagttcatagtcaaaccccagtttatgtagttttacaaaatgtggctttaattacagtaaagggttatagtagtcgataaagaaacattttaagactggaaaaacgatgtggattgaactaccattaaagtggaaaatggattttaataaaatgtatctttttcaaataaatgctttataatcttcacgtcttggctatcattttctttttgatgtgtgtgtgcgcacttttatccacaagtttaaagcagacctcgataattcctaactatgattttactaccctgaactctgcagggaagtgtcctttaattgacagctactcaccaccttgtttgacagagtgccccatttaaaagtcctgtttgaaatagaatgtagccaggtggccttcagggagtcctgtggtgctggttctctactttctcaactcattgtttcatgttagcaccatgcatgtctaatttaggtgcagtataatttgcggttatctacaaagatgttttaagtctggaaaatagctcaagatagtgattcagcctgcaggtgttagattagagatgcgtgctgcgcacagaagagggaggagccaagcagtgtaaaaggagttagctggaaaggagaggtgctaaccccgtggctgcttagtagggaccatcaggcccgagtgtggatgatgctgagctttgcggaaagtgagccatgtgctctgtggaatgccgggatccaagagcgcgctaaggactgatgacctcattgtgcaccgcttacaggagtacctggcccatctacctgtgtgtgataggcaaggatggaattgagtgatttttttttctagagctgtctatcagctttggtagaaacatgaaacacccagcaaatagggagagagagagagaagcagtaagactgtttttggggtacaagtgaaaaaacagtaaaattatcaagaattttccagttgggtaatgaaaaaatttaggcataaacaggttaattattaatttcattttctcactagaggagataatcagttgttatgtagttgcttaagccaggggttttgtgttttttctgtattctgccacttgtcttagcttgtttcctgtagacaagccagacaaggagctttggggcatggattcttctccaggtcatgacttaacactacctcgtgtactctgccagttgcaagctggcagaaccttcctgctcagctaccacattcaatgtgagatcacctccagtttaataacttcggtggttaaatcattctcattaaggtaaattgcattgctctaaacttatacacaaattcagacataagtagcagaagtactgacaatagttttatgaaggtacagtttggacgcttaaattcttctaagttagcttcttcaaaaaatgcagaattaggctgggtatggtagctacgcctgtaatccagcactttgggaggccaaggctcgatcactttagctcaggagttcgagaccagcctgggcaacatggcaaaaccccatctatacaaaaaatacagaaattagccaggcgcggcagcgctcgcctatagtctcagctacttgggaggctgaggcaggaggatcacctgagctcaggtgggccttttttttttttttctttttaatctcagacacttgtcttggtgtctgccaagcagtgattcaggcttttttttacctcggcccattttcctcaggacacaggaatcagtgagttggcagagaacctatggaccaaagtgagtctcacggaaacttggccccagtgtatcactgccctttctcaagtcacctcagcacatgtggtgatgatgactgtacacctgggtttcctcaagtgggccatggttcgtttaacaaatgtctgttgagcccctcttgtgtcccatgaaactcactgggtgatggggatacaggaagagcttgtggcccccaggagctgatggggagatggatcactcatgggtccatctgaaggaatgagtgcattgacagaaaagtcctctggccactaaaggtgtggggcctggggagtagaagtgaccacttggggctgctcttctgtcctgatgtctacagagtgtctactttttagcctacaagttctgttttggggtttggagaataaggctcctacctacggtatggactcatgttctgtgcattgtggcactatgtaattcctttttttttgagatagagtttcgctcttgttgcccaggctggagtgcaatggcacgatctcagctcactgcaacctccgcctcccgggttcaggtgattctcttgcctcagcctcccgagtagctgggattacaggcgtgtgccatcatgcccagctaatttttgtatttttagtagagacggggtttctccatgttggtcaggctagtctcaaactccggatctcaggtgatccacccaccttggcctcccaaggtgctgggtggctgagccaccgcacctgacagtaattcctttttattagaaacttggatgcacttaagttgggttgtgtggatttttatactcagatcacagcccaaaaaagctgtcttgtcagggttgggtgtaggtaatcctaacactttgggaggccgaagcaggcggatcacttgacaccaggagtttgagaccagcctggccagcatggtgaaaccccgtctctactaaaaatacaaaattagctgggcgtggtggcatgtgcctataatcccagttaggaggctgaggcaggagaatctcttgaacccgggaggtggaggttgcagtgagctgagatcatgccactgcactccagcctgggcaacagggcaagactccatctccaaaaaaaaaaaaaaccatcttgtggccttaaccttgtgggtctcagcttctctgctgcctctggtcttcggttgccccaccaggtggctatgatttcacactgatcaaagttaaatatttttacattcatctagtttatttgcattgtttaaggtagaaaaaggttataggttgagtgtagtggctacgcctgtaatcccagcactttgggagactgaggtgggaggatcacttgagcctaggagtttgagatcagcctggacaatgtagtgagaccctatctctacaaaaaataagaaaattagctgagcatggtggtgcatgcctgtagttccagctacttgggatgctgagaagggaagatcgcttgagccctggaggtcgaggctgcagtgagtgtgattgtgccaccacctgagtgacagcaagaccctgtctcaagaagaaaaagagaaaaaaaaggttataaagttccctagaaatgtaggactagatattaaataataaataaggaattattaattttgttgggtatgataattaagttctgatctgataggcatgtattctgagatatttgtaggtgaaataatatgatttctgggatttgctttactcaaaatagaagaaacaaaggggatagctgaatgctttggtaatggttatatattgttctgtctacttttatgtatttttgagaatttccataataaaaagtggaggggaaaagatcctctaggttacaggccctgaactatcagctgctgtagtcactgctggaccagtgtctgtgaggaactgaaagcttggattggaccagtaccttttaaaatttggtcactgcaggcaccaggaagccataccttctccatgctgacctgatgcagacataaatgtgtgtgtctgtataaccgaagtgaaagtttaaaggaaccacacttaaacgctctgattttttaattctatttttttttctttctattaaaactggtggttggccaggtgcggtggctcacactggtaatcccagcactttgggaggctgaggtgggtggatcacctgtcaggagtctgagaccagccatggtgaaaccccatctctactaaaaatacaaaaattagctgagcgtggtggtggggcctgtaatcctagctacttgtgaggctgaggcaggagaattgcttgaactcgggagatggaggttgcagtgagctgagaatgtgccattgcgctccagcctgggcgacaagagtaagactccgtctcaaaaaaaaaaaaaggctcatggtcatgacccactaaaccgattctataactgtcacaagccatacttgggttcagaaggtgaattggggctgctatattttgttttatttttcctcttgggtagctattgcagtgattcttggatggcaacttggtaactcagggtcaggaggctggagaaccaggcaggaggtgctcagcagagaacctaaggcagccagtaggtgaggccagaatgatcggcaacataaggctggttacttttctgtcttgaagagttaccatttacatagtatgtatttgttaattttcaacatattgtcagattctgtcataatttagattcagaaagcacatcagaaccttccagggctgctctgagcatcctttcagaggaagatagtgtaaagcaaaacgtttctcttagcaatattattgcagtgaagggcttccctgcagacgagaagggcgtctgcagtctgccccactggggcgcttactcttgatcttccagttttttcatttccgtcagcagtgccccctccttgttgtcactgcagtgtaagtaaatggtcatgattaagtcctataaacctaactattgagcatttaaatcaccctctattgttggtttacgtggtggcgatacaagtttttagtgagataacttggtcatgccttgcctattatgtgcttagcccactgagaagagggttagggacattgcactttggaaagtaggtcacttacacctaaaattagagactaagggcagacctaggatgtcagaagagacatggggcaggcagcagccacttccagccaggttgagaccgggactgtgtcctgcagttcagaagcagagatgaggtggagaggaccccccagtcctgggaagtccttgggctgggaagttgggtgttggttctgtatgcacttgaagccactggaggtgttccacatcatgcattcacttgtccattaaactattgtttattagcaccaatggtgtcagacacagatgctggagactgaaatgtgtacggtgagcctgtggctgcagagcaggaagtggagcccggggatggatggtgggagcaggctttggtaagagtgatcaggaacacctttatgaaaacttcaaaagcaaatgtaaagaaaaaaaatcatgtaacgaagtcccctgtgcccatgtgtgggcagtcagtttcatgtgcaccttctcctcattcctgcttcctgcctgtgtgggccgaatagtgtcccctcagagtcatgtgctgaagcccctacttccaggacctcaggatgtgactgtatttgaagatggagtcttttttttttttatttgtttttattttagacggagtcttgttgctctgtcacccaggctggagtgcagtggtgcgatcttggctcgctgcaagctccgcctcccaggttcccgccattctcctgcctcggcctcctgagtagctaggactacaggtgcccgccaccacacctggctaatttttttgtatttttggtagagatggggtttcaccgtattagccaggatggtctcaatctcctgactccgtgatccacccacctcggcctcccaaagtgctgggattataggcttgagccaccatgcctggcctgaagatggagtctttaaggaggtgattgaggtaaaatgaggtaattgtgtgggccctaatccaatctgatggatgtccttataggaagttattaggacacagagaggaatgatcattggaggactcatggagaaggcagccatctgcaagccaaggagagacctcaggagaaaccaccctgctaaatttaccttgatcttggactttcagcatctagactctaagagaataagtttctattattgaagccactcaagtctataatacttagtcctggcagcccaagaaggctaatgcaccaggtgattttgaagcaaaccctagagttcagtttgtagatagaagtgcagtagtaactcatcaagacagaagagtaacaagccttatgttgctggtcattctggcctcatctgctggctgccttagggtctctggggtgagttctgaggaccaagtctacactgtcaacatggccacggacgagctgctcagagtgacaggacaaccctcactgtgctgtatgtaaaccataaatcacagcacactctttgtggttgggagaacatgtatggtgttttgggagctggcacagtcagggatgtcattcatttcatctgggacaggctttgtgctctgggatctgtggcgggagcagtgagcccagccatgtcctctgcatgcatcgctgtgtccttgtgaacagtggatctttgttagcgcgcttcgcactccttggcttttttatctttcaatcaagaacagcaactgctcttcaaatgattctacaggtatgagggagtttacatttggatttgtcaatggaaccattaggattttttgtttgtttgttttgtaaaaataagaacttttttccttagccttgtgtctgtgccaaaaatgtgacctttttttttctcccaagtgtgcccaaacagtaacaattttttgcttggattatgttaagaattagggcatttgaccataggcattagatgtatgtgcaatgaaagtgatcccctttaataagcataataggaacatggaatttgggcttttgtttgcagcttaggatgatggtgtgtcttgtaacccaaggaggtttttcacttttctgaaagtgagaagactggtcagcctaaacccgtggtgtcactgttcttaagggaaacctagttgaggagtgggagataaccatttcacatgttgtttttgtaccttggagaaaaaaaagagagaagcctttatttaaatctttatgtctattctatagtttaaaattccatacaggtttttttcaaaaaatcaaatttgcttcctgtgtgttgtcaccatgagctctctggtcaggtgtggaaactgaaatgtttcccttgttggtttatgtggtggggtacatttttttttttttttttgaggtggagtcttgctctgctgcccaggctggagtgcagttgcatgacctcagctcactgcaggctccgcctcctgggttcaagcaattctgcctcagcctcccaagtagctgggactataggtgcgtgttgccatgcccggctaatttttttatttttggtagagatggggtttccccatgttggcaagaatggtcttgatctcttgacctcatgatccacccgcctcgccttcccgaagtcctgaccaatgtgtgccactgtgtgccaccgtgcctggccaagggtacatgttctttttttttttttgagacagttttgctcttgcccaggctggagtgcagtggcgcgatctcggctcaccacaacctctacctcccaggttcaagcgattctcctgcctcagccttcccaagtagctgggattacaggcatgcgccaccaagtccggctaattttgtatttttagtagagacggggtttctccatgtgggtcaggctggtctcaaactcccaacctcaggtgatccacctacctcggcctcccaaagtactgggattacaggcgtgagccaccgcacccggccaagggtacatgttcttaatgagatgccttggtcaggtctaagtgtcagttatggtgcatgttgattttctgtcagatgtctgaaaatgccctagatatgattatgtctagctaatttattactgccattagatacatcacctttacatagcttttacttttcatgctactgggtatagacaataaccatagcccacctgcctgtgcacttctaatatcaggctgagttcaagttcctttctaaggctccccctctcacttagtattgtccgtctttcttgaaagaggtatgtgcagcctccgtgtttgctttttccagcacattcttccaccctcagcattttatgatgaaaatttttgggacaggcacggtgctcacgcctctaatcccagcactttagaaggccaaggcaggcagatcacctgagatcagaagttcaagaccagcctggccaacatggcgaaatgctatctctacaaaaatacaaaaataagcagggcatggtggtgtgtgcctgtaatcccagctactccagaggctgaggcaggagaatcgcttgaacccgggaggcagaggttgctgtgagccaagattgcgccattgcactccagcctgggcgacagagggagcctctgtctcaaaaaaaaaaaaaaaaaagaaaatttttgagtacaccaaagttgaaagaattttgcagtgaatacttgcacctagattctgccactaacgttggctatacttgtttttttttttttttttttgagacggagtctcactctgtcacctaggatggagtgcaatggcgtgatttcggctcattgcaacctccgcctcctttgttcaagcgattctcctgcctcagcctccccagcagctgggattacaggcatgtgccatcacgcctggctaagtttttgtatttagtagagatagggtttcaccatgttggtggggctggtctagaactcctgacctcagatgacccgcccacctcggcctcccaaagtgctgggattacactcatgagccaccctgcctggcctggctatacttgttttatcccatatctagcatttgtttatcactgtacctgcccatcaactcattttatttttctgatgcattcctcaataaattgcagacattgtttcactttgatctaaatacattagcatgcatgtcattaactagggttcaatatttgcttacagttttcttttgatgtaaaattatgtaacaatgaaatacacactttttttttttttttaaacagggtctcactctgtcacagaggctggagtgccgtggtgcaatcatggcacactgcagccttgacttcccagactcaagtgatcctcccgccccagtctcctcagtagctaggactaaatgggtttgtcaccatgcccagctaattttttttattttttgtagagacgaggtctcactgtgttgcccaggctggtcttgaattcctgggcttaagcaatccttctgtctcggcctgccaaagtgttggtattacaggcgtgagccactgctcctggccaaataatacacatcttcagtgaatattagctaaattttgacaaatgcatactcctacgtaactgaaacccctactaagaaataaaatattacctaccatcactgagaaaattcccttatgccccttagaaagtccttcccccaaggtagtactgttctgatttttttccaccataggttaattttgttcattctagaacttcatacagatggattcatacagtatacattgtgttgtgcagggatcactgtactcagcataatgtttttgagatttatccatatattgctgcatgtttcagttgctgagtaatattttgttgtatgtttatgctgtgatttgtttattcatttgttggagatttagtttctttctagtttgtgtatatatatatatttttttttgagatggagttttgctcttgtcgcacagactggaatgcaatggtgtgatctcagctcactgtaacctctgcctcctgggttcaagtgattctcctgcctcagcctcctgagtaggtgggattataggtgcccgccacgatgcctggctaatttttgtatttttagtagagatggggtttcaccatgttggccaggctggtctcgaacccctgacctcaggtgatacacttgccacggcctcccagtctactttgtattttgaaaaagctgctgtgaacatttgtgaatgagtcattatgtgaacatgttttcatttattttgggtaaatacctaataatggaattgctgaattttatgggaactatatgtttaactttataagacactgccaaactttctgctaaatttttgtctcctaattctttgtttttttctctttccagagacagggtctcattctgtaacccaggctggagtgtagtggtgcaatcagagctcagtataacctcaaactcctgcagttctcatgcctcaacctcccaagtagttaggacgataggtgtgtgccactatgcccagctaaattttttttttttttgagacggagtctcactcttgttgcccaggttggagtgcaatggtgcgatctcagctcactgcagcctctgcctcccacgttctagttattctcatgcctcagcctccctggtagctgggattacaggtgcccgccaccacacccggctaatttttgtatttttagtagagatggggtttcaccatgttggccgggctcctctcgaactcctgacctcaggtgatccagctgccttggcctcccaaagtgctgggattataggtgtgagccactgtacccagctgggctaatttttaaaaatttttatttttatgttttattttttaatggttgctttatttatttatttatttactgagatggagtctcactctgttgcccaggctggggtgcagtggcgtgatcttggctcactgcaacctctgcctcctggtttcaatcaattctcctacctcagcctcccaagtagctgagattactggtgcccaccactatgcctggctaatttttgtatttttagtagaggtgaggtttcaatatgttggccaggatgatctcaaattcttgatctcaagtgatctgcctgccttggcctctctaaaagtgctgagattataggtgtaagccatcgtgccctgccctggctaactttttaaaaagtttttgtagagtatcagtattttagtatgttgtccagggtggtcttggacacctggcctaaagccaccttggcctcccaaagtgctgggattacaggcatgagccactgcatccagctaatcctgtcagttattgagagagagggtgttaagttctctagttattattttggatttgtttttccctttagttagttttggcttcatgtattttgaagctctgttgttaagtacatacacatttaggatcataatatctttttttttttttttttttgagatggtagtctttctctcttacccaggctgcagtgtagtgctacgatcttggctaactgcaacctccacctcctgggttcaagtgattctcctgtctcagccttctgagtagctggaattacaggcatgcaccaccatgcccaggtaatttttgtatttttagtagagacggggttttgccatgttagccagcctggtcttgaactcctgacctcaggtgatccacccgcctcggcctcccaaagtgctgggattacaggtgtgagccactgctcccagcccataatgtcttgttgaaatgaatctttttcattatgacatgaccatctttatttctagtaagacttcttgtcccaatctcttgtctgatattaatatagccacaccacattctttttttgccttagggactttagcaactgccgaagagtctcgctctgtcgccgaggctggagagcagtagtatgatcataactcactgcagccttgaactcctgggctcaagtgatcttctgcctcagcctcccaggtagctgggagtacaggtgtgcgccaccatgcctggctaatttttttttttttagagatggggtctcactacgttgcccaggtcgtctcaaactcctggcctcagtgatcctcttcagcctcccgagaagctggggttacggccttgagccagccacacctggctaccccactttcttatgctgcatgtttgcatggtgtgtgtctttcaacaagtctggagttttaaactgcatgctttataaagagcattttgttacagcttgcttttttatctagtctgatagtttctgccttttaattgtgaagtttacataattgatgtcattatgtttaagtctatcattttgatatttgttttctctttccctttgtgctttcttcctttgtttctcctttttgattatttttaactctgttctattgctactggcttttttgctgtaactcctctatatattgctatatatatccatgtcttgtcacagattaccatccattaatatcatttctttcttgtacactgtaagaacctatcagcagtatcattccatttgtactccctcctgttttttgcaaactttttggcatatattttctttctatacgtgttataaatcttacattagattttttttttgctttaaacaatcgacttttcacctttttatattgaaatgatttaattatatatacgtagtagacttaaagcacacagagtatatacagagtacacagagccctcatacgccttccacccagatccctcaagtgttaacatttctgaaccattaagaataagctgtagacataatgccccatgaccctttaacacttcaactgtaccttccttggtacaaggacactctaaccacaccattctgacatcattaaaatcaggaaattgacatccatttgatcttgctacgtaattcatgaccccacccagacttgctgattgttatgatactttctttatatagctctaggatccatagattttatagattcaggatcatgtgttgcatttggtttgcatgtctctttaggctctttgaacttgaaatggttcctagtcttttcttgtctctgatgattgatatttttgaagattacagatcagttagtaggatgtctctcagttgggtctgttttttcctcacgagtttatgtgtttttgataggactgccacacagatgatgtattcttctcattgcatcatatcagggaaaataatgtcgatttgtcccatgttggtgatgttaactgtggttacttggttaagatagtcttgccaagtttcttcattttaaagttcttatttattcttattttacttacaagactgtagttctctagtatccttatttattttgaagctcaaattgtcccaaactcagccagtgggaagcactttaagctggctctggtctcttatttgtatttttatttattttaattattattactttttttgagatggtgtcttactctgttgcccaggccggagtgcagtggcacaatcttggctcattgcaacctctgcctcccaggttcaagcgattcttctgcctcagcctcccgagcagctgggatttcaggtgcctgccacccatacccggctaatttttgtatttttagtagagacagggtttcaccattttggccaggctggtctcgaactcctgacctcgtgatccgcccacctcggcctcccaaagtgctgggattacaggcatgaaccaccgcgcccggcctattttaatttttaattgcagtaaaaaagcaaacgcataacaaaatttactatcttaaccttttaattttggccatgttgcccacgctagtcttgaactcctgggttcaagctgtcctcccacctctgcctcccaaagtgctggaattacagggctgagctacaactcctggccagtcttaacctttttttttttttttttgagatggagtcttgctttatcacccaggctggagtgcaatggcgccatcttggctcactccaacctccacctcctgggtttaagcgattctcctgcttcagcctccccagtagctgggatcacaggcgtgcaccaccaagcctgtctaatttttgaatttttattagagacggggtttcgtcatgttggccaggctgactgtgaactcctgacatcggctgatcggcccacctcagcctcccaaagtgctggaatttcaggcgtgagccaccatgcccggccagtcttaaccatttttaagtgtacagttcaatagcaccaagaatattcatgttgtgcatctggcatctttttgacaagcccttgtctttctttaaacactttcttacatttgctaaaacaagatgtttcagctaatcttgttctttcctgtcccagccctggaaccagacagtcgtccaaggagtcctccttgcttttagtggaaatggtatttggaaaccaaatagctctttttctggatctatttatgtattaaacattagagttcacactgatacctctaattccagtccatgacacagaatttattccagtcatacccctttccacatttataccttgcttttccaacagtgagaaatctggttcctgttttcttcagtgtatttgcttttttgctcagtctccccataggttaacactcctagctgtgctaggcaaactcagctgaagacatgctgctgttccctccccacagtttgctgttggggatgctgtcctaaagctgaactaagaaatattcccttccccttccccttcctggattcactggccaaaagcttgggtttgatgaaagggagggggaggtgaggaagaaaaaagggtaaaggtcagttacacagctcagccctgaccaacatgttcctgtgccttgctgaacacattggcttaagctgggccctgggtatctcaattttccccatgtcttgcatgttgaggcagagttggtcccagacatgccttctctaatcctatggcatgtgtgccagtccagaggtggcccaggacgtcctggttccttaagcgtggccctgatgaaggggaagggatagtgagaagacacaggagaaaaagccagttagagagctcatctctggacatgcttcccgtcttgtccttgacatgcatgctgacccactgctgggccttgggcattctgcccttttcagcttgacagactgatgctgcccccacctccccatccgaaagccatgatttgacatttttaaaagaccgaagaaaagaaagaaaatttatcttttctgtttatccctccttttatcatttttagcacttttatttcctctggaaaatttccatctggaataatttacctttggccttgtcaacttaaaaattcaagaaatgtacatatttggaaaggatactttatttcttacaaagagttgcaacctgtaggctggccatcccacaggctgggaagcgtagcctttggcagagcctgaaaggtaggcacttcagaggaggaggggttggaacaggaatttgtgctgaatgggtttgtgctgaccaagtatatacatattcaacaggttataggaggagttatgaatattcatggagggggtcctgatgcatgtgtactgaacagacatgcaatttattttattttatttattttttttgagacagtttcactcttgttgcccaggctggagtgcaatggcgcgatcttggctcactgcaacctctgcctcccgggttcaagcgattctcctgtctcagcctcctgagtagctgggattactggcgcatgccaccaggcctggctaatttttgtatttttagtagagacggggtttcattatattggtcaggctggtcttgaactcctgacctcaggtgatccacccgcctcagcctcccaaagtgctggattacaggcatgagccactgtgcctggcccaaacatgcatcttttttttttgagatggagtcttgctctgttgcccaggctggagtgcagtggcgcgatcctggctcactgcaacctccgcctcccaggttcaagcgattctcctgcctcagcctcccaagtagctgggattacaggcgcctaccaccacgcctggctaatttttgtatttttggtagagacagggtttcaccatgttgaccaggctgatctctaactcctggcctcaagtgatctgactgcctcggccttccaaagtgctaggattacaggcgtgagccacctcgcttggctaattttttttgtatttttaggagcgacagggtttcaccatgttagccaggatggtctcgatctcctgacctcgtgatccacctgcctcggcctcccaaagtgctgagattacaggcgtgagccactgcatctggcccaaacattcatttttaaaagaacttttaggttcaggggtacatgtgcaggtttgttatataggtaaacatctgtcatggggatttggtgtatagattatttcatcacccaggtactaagcgtagtatctgacagttattttttccagacaggcatgttctttgcattccatgttcactttgaggtggagacaacattatattcaggccccatacctcaaaaggtgaagcaaggagacagggcactcaagtgcacagcctctataaactggctagaaccagtctgtggctggtggtcttcttgtcaggagagagttactgaagtcagtctcttatacagtcacagctatagttttggcttgtggaacaggaggtcagttggcatctggtggtgagttgcagttgttttcctattgcttatccaggacagtgcttgtttggctgctagagaaaaagaagaaccctgtggcagttagaacagagttgatcttgaagagtcagactgtgtggctgaatccttacctggcacggtcgtaggtcttgtttataatttggtgtctttttttccccatgatcttcatgaacacatgtaatttggtattttattgccacagagtccattctgtcagttttgtggtctctattttaacattaatgctggtcagttgtgcctgaactacaaaagggagggaatataatgaggtgcgtcccaaggcatcttgtcatggctggaaccaaaacaggctttgttcagtcagttggagtgcttaggattttatttttagttcttagcctgaagaccttgcttagaatttttcatggtgtaggtctgacacattgtttcaccttttattatctgaaaataccttcatttcatcttcatttttgaaggatagttttacagcagcagtccccaacctttttgacaccagggaccggtttcgtggcagacagtttttccatagaccaaagtggggaaaaggttttgggatgaaactgttccatatcagatcatcaggcattagattctctaaggagtgcgtaacctagatccctccaacacacagttcagggtttgtgctcttatgagaatctaatgcagccactgatctcacaggaggcggggctcaggtggtaatgcttgctggccctccactcacctcctgctgtgtgcggcctggctcctaacaggccacggacccagaccagtctgtggcctgggggctggggacctctgttttacaggatatagaattctaggttgactgttttctttcagcattttttattatttatttatttatttattttgagatagagtctcgctttgtcacccaggctggagtgcagtggcgtgatcttgctcactgcaacctccacctcctgggttcaagtgattcttttgccttagcctcctgggtagctgtgattataggcacataccaccacgcccagctaatttttttttgtatttttagcagagatggggtttcaccatgttgatggggctggtcttcaactcctgacctccagtgatctgcctgcctgagcctcccaaggcgtgagccaccatgcccagcttcttttggcattttaaagatgaagactcattatcttctggcatccattttttctcttgagaagttacctgtcatttttgttgtactgaatgtcttttatttgacagttttaagaatttcttttttttttttttgagatggagtcttactctgtcgccaggctggagtgcagtagcgcaatctcagcttactgcaacctctgcctcccagattcaagtgattctcctgcatcagcctcccaagtagctgggattacaggcatgcaccaccatgccaggctaatttttgtatttttaatagaaatgtggttttgccatgttgaccaggctggtctcgaactcctgacctcagatgatctgcctgcctcggcctcccaaagtgttgggattataggcgtgagccactgcgcctggccttttttttttttttttttttttgagacagggtctcactctgttggccaggctggagtgctgtggcgtgatctcggctcactgcaaccttgcaacctccgcctcccgggttcaagtgattctcctgcctcagcctcctgagtagccgggactacaggcatgcaccactgtgcccggctaatgaaaaaagttttttaaatatagatggaatctcagtatgttgctcaggctggtcttgaactcctggcctcaagccatcctcctgcttccgcctcctgggattacaggaatgagccaccgcacctggctgggttttatactttggtttggtagatcagttttgatctttgtccttactcttagggtaaatttcttagtcctggaatgtatgttttactcctaagatgtggcctttgtggggtttcaaatggatagtctcaagtgtttaaggtacttattaagcccctttaacttggcaggacttggactccaaactcttatctaccctgcagctagggagagctaaaatctcagctttttttttgagacggatcttgctctgttacccaggttagagtgcaacggtgtgaacatagtttactgtgaccttaaacttctgggctcaagcaattctcctaccttagcctcccaagtaggtaggactacaggcatgcactatctgactaatttttatttttgtagaaatggggtctcactatgttgcccaggctggtttcaaactcctgaactcaagtgatcttcctgccttggccgcccaaagtgctgggattataggcatgagctcccgcacccagccatcagcttgctccttcaaccttcaagctatcgtgtcctttctgggcttgtgggagtctcacctccgcttacacagttcagggttcagccaaagatttgaggggaccttatactcagactttgggttccttttttagtgggttcctcctttcctatatttccctctcaatttccagcttctttagcagtctcaaatcctcctttaacctgtcaggccaataaaattgcagctttttttcctctgctccactcctctgagactggggcatactctcaggagtaaagcaatataaaagtggatcttgcccagtgatgttcccttctttcaagggtcatataaattccaagcttcttttttatttcttgtttgtctccagtgtctttagaagattgtttttcacattttatctagagttcataatctcggtctgtgagaaagttattttgatacagtctacttctctcttaagggaataagaacttctttgggtttattttttcttgacagtgtgttttggagctctttcattatagatatatagtttctttattcttctttagggtggaatggcatttttatctgtgggctactgtatttaaacagcagccctcctatggacttttaggttgtcattttgcttaaaaaataatgaagcaattaattttctaacctgtcatgtatgtaatgcatctgtaggattaattcccgaaaatgcacttgctgggaaacataagtgcatttgtaattttagtagatgttaacaaattgttttgtatggtagaaccaaggtttattctttttttctttacccacctctcaagagaacagtttttattaggtgaaagtggtatttgctaaaaattttgagtattttccaaaatgaacttgttaagttttcttactaaaaaatacatttgtatctcagaagaaagtagcaaaatatattatatgaaaaaaatcacacccactagaaacaactgttattagagtctttcacgttgctttcctgtttgtgtatgcttttctgtgttagcagtaataatacagtcttattaccttggtatttatttcaaacacttgcttagtgcccactgtgtaaagagctttctggggagctgtcactgcctgcctgaatctccctcactgtctgagggtggtcttagtgctcatgaggtcgagaatatcgagtgctgtgtcagaagggcagaggtcaggtggatttaaagctgttgcaccaaagccaggtgtggcgacatgcctgtagtcccagcctactcatgaggctgaggtgggaggatggcttgagcctaggagttagagaatgcagtgagccatgattgtgccactgcactgcagcctgggtaatagagcaagaccctgtctctaaaaaataaaaaaaataataaataggctggcacggtggctcacgcctgtaatctcagcactttgggaggccgaggcgggcggatcacctgaggtcaggagttcaagaccagcctggccaacatggtaaaacccccgactctactaaaaatacaaaaattagccaggcatggtgacacatgcctgtaatcccagctactcgggaggctgagacagggagaattgcttgaacccggaaggtagagttgcagtgagctgagatcgcgccactgcactccaatctgggcgacagagcgaggctctttctcaaaaaaaaaaaataaaataaaataaataataaataaataaaactatgcatcaagcaccatctccctgtcccctgggtatgcctttggaagtgcagtttgcagagtgagtgagatgaggcaggggagtaggaggaggagctgaggaggagaatggggcaggggaagatgagacagggaggaggaggaggggaggagaggggaagggatgagagagggaaggaaggtggagtcattgttcctgctgttgccttgcgtggctgtgacagctgttgaagctgtcttctcacagttttgcacactgtgggttatgattcattagtggcatgtgaaatcaaccatgtaggtagcaacctttttttcatgtaagaatttaaaggatacaagtataaagttaaagaacttaaggaaaaattttgctagattcattttgaattagagctgtcacgtatttcttagctatctgcatggaaaacacctagaagcaatgacagtccaatagcagtggagcacacctaggactttattgtagtctgaattgtatgtcaagtagtgtggttacagtaagtgaggggatgtagctttttgccacaaaatctgtactttggaaggtgaatgtgaagcaatgagaacaaatggagattattaatctgtgctgtggttggcgttcagaattaggccacattttagtatgtttcatgtggggatcattatttttttttggaccagcttttttttttttttttttttttttttttgagatggagtcttgctctgttgcccaggctagagtggagtgcagtggtgcgatctcggttcactgcaaactccgcctcccgggttcacgccattctcctgtctcagcctcccgagtagctgggactacaggcgcccaccaccgtgcccggctaattttttgtatttttagtagagacggggtttcaccgtgttagccaggatggtctccatctcctgacctcgtcatccgcccgcctcggcctcccaaagtgctgggattacaggcatgagccaccgtgcctggccttttctttagagtttctgatgaattgcttttcttttttctttcaaaagaaacattaaattttaaaaaatttcagtagcttttggggtacaagtggtttttggttacatgggtgaattgtatagtgatgaagtctggcttttattttattttttgagacggagtctcattctgttggccaggctggagtgcagtggtgcgatctcggctcactgcaacctctgcctcccgacctcaagcgattctcctacctcagcctctcgagtagctgggattacaggtgcccaccaccacgcctggctaatttttatatttttagtagagacggggtttcaccatgttgaccaggttggtctcgaactcctgagctcaagtgatccaccagcctcggcctcccaaagtgctgggattacaggcatgagccacctcaccctgcaagtctgggcttttagtgtacccatcacccaaaaagcgtacattgtatccagtaggtaatttttcatctctcacctccctcccactttctccctttctaagtctccagtgtccattatatcactctgtgtgcctttgtgtagccatagtttagctcccacttataagtgagagaaccatgcccggcccagacttctttttttaaatgttctaataaaactttatttacggctgggtgcagtggctcacacctgtaatcccagcactttgggaggctgaggagggtggatcacctgaggtcaggagttcgagaccagcctggccaacatggcgaagccccatctctactaaaaatacaaaaattagccgggtgtggtgttgcgcgtctgtaatcccagttacttggaagcctgaggcgggagaatcgcttgaacttgggaggtggaggttgcagtgagctgagatcgtgccactggactccagcctggatgacagagtgagactccgtctcaaaaaacaaaactaacaaaaacaacaacaaaacacaagaaaaccccactttatttacaaaaacaggtggcttgcctgtgtggtagagtttactcagcctttttctagagaatgccttgttattgtgaatgagattcagttttattatggtaggcagtgagattactgggaaatctttttttttttttttttgtcgtgtgcatctttgtttagtcattattttgatagctctgtatcagtttttttttgtttttttttgttttttttttttttttatgagacagagttttgctcttgttgcccaggctggagtgcaatggcacaatcttggctcactgcaacctctgcctcccaggttcaagtgatcctcctgcctcagtctccgtagtagctggggttacagacatgtgccaccacgccctgctaattttgtatttttagtagagttgggggtttctccatgctggtcaggctggtctcgaattcccgacatcaggtgatcctcctgccttggcctcccaaagtgctgggattacaggcatgagccaccgcacccggcctctgtatcagttttgaatttagttctgggtgttttccttacacctaaagtgtggactttttggatttctactgagtagccagttcagcaaagtctcttcagctgattataatgttcaggaaagactcttcagctgataataacttctggcatcaccattcagcagtcagtcaaacattaaatgattacctgtaggcattgtggagtttcatctctgcatgtccaggccagcccttagtcaaggcccaagaaacatgtttttatcgtcaagaacttctaggctcttagtttacataatggaatcttacagattttcctttgtttgcttgctgaacactgtcattgtcaccctgggatttcttttctctgcttcctgggttggttccactgtttcttggagtccacatctttttctctcttggatgatcctcgttttgctgggagtagatcctctagtatgtttttcaaaagggggtttgtagagtgtaaagatcccaaggcactgcaggtgtgaaaataactattttgcaccttgattgacagtttggttttaaattaacttccagatttaaattaatttccacacagaattttaaagggattaccatattcccatttatcaggatacatctgatgctgatctgagtcttactgcttttacaggtacttttttttgcattttcttattggaaacctaagattctcttgaaattctgcagttttgtgaagatgagtctaaatgttgagggtttgtctcttacattcagcctacttgttactgtgctttttctgtccataaaattgagttcatcgttgttgtcttctgatatttgtgtccctctttgattctgcctgctcttattctcctcttaggaaactgttagactcgatggacccagcttctgtggcctttaatttttctcatgttaaactttttaccttttcactttatgttctaagacagggttggcaaacttcatgaaaaggaccagacagtaaatatttcaggctgtgtgggccagggggcaaaattgaggccattaagtaggtacttatataagagagaaagcaaattttcgtaaatttttttattgatgaaattcaaggtataataattgagtacaattttttgtaatatggttctactactgagaatggaattctttttgggggctaacattttgcttaatcagggttcaaagttggtgattccttttatcgaattggtggcaaatgttcatctgtaaaacatttgcagctgtggccatcagcagcaggcaggcattggccaaccccgcagttctccttcacatcattctttgggctctccgctatgtccttgttattattctacgaattttttattttggcagtcatatttgtaatttctaagatatatttcttgttctctgttctctctttttctttttttttttttttgagatggagtttcactcttgttgcccaggctggagtgcaatggcgtgatctcacctcaccgcaacctccgcctcctgggttcaagtgattctcgtgcttcagcctcccgaatagctgggattaacaggcatgcgccatcacgcccagctaattttgtgtttttggtagagacggggtttctccatattggtcagtctggtctcaaacttctaacctcaggtgatctgcccacctcagccttccaaaacgctgggattacaggcgggagccactgcacccggccgttttctctttttcatagctatctagtcttattttatggatgcagttcttctcaagtgtctctaagtatactagctagaatgtaggttcctgtgcctgtctcttcccatttgttctttggcttttctctctcatgctgaccgtggggatcactgtgtttgtgagggaaggttggggttgactagtgttcagagcatgtgggttttctttttagtcacgtctatttccctggaatccttcccctccctgcagtagccaaaatagaggtgaggctgctcagctgagtggcacctctttctgtatctccctcctggtttgcctttttccctttgagcctacctgaaggtcagggtcagctggttctgccctgtataggcaacttttaggaaggagcaatctgaaattgtgactctactctggtttttaaagacagaaagtgacagtccagttaataccggatattgactcaaatctagttctgatgctgcttttccaactttatgacagtttctacatctgtggtatatggaataataattgaagcactaaattttattctgaagcaatcagtctttttggaatcaggaaatattaaactttatttgttacaggttaatgaaatagaattgtatgaaagtaccatttttatagccaaaacactgttgaaaatcagcactttgatttggttcaacctaatatttaaaaaattatattgtaattgttatgtttatttattgatctgtgaatatagtcactctaaccagatttttttttttttttttttttttgagatggagtctcactctgttacccaggctggagtgcaatggtgctatcttttcttactggaacctctgcctcccaggttcaagcgattctcctgcctcagcctcccaagtagctgggataacaggtgcccatcaccacgcccggctaatttttctactttcagtagagacggggtttcaccgtgttggccaggctggtgtcgaacttcttacctcaggtgatccacctgcctcagccttctaaagtgctgggattacagacatgagccaccgcacccagccaaccagaatatttaattaagtagccctccctatttgcaagccattctggaattatcagagttctaagagccttcaccagcaacagatccaacttctgcttttctagattaggaaatttgccttgaagaagtgagcttggccagaggcacgctgtttaatttcaaagtgctgctgactcaaactcatgagtcctggaggcaggtagaggcacttgtaggctgaggacccgtagagcccggtgtgccctgcccaagccccacctgggaatggagttatctctgtaaagatcttgctgcctttgagcaagcactgcaaacggggtaactggaacagccttgtcgcgtgtttccacccttcgtatgaggcaggtaccatgggtcttcaccaacagcacggcctgttgtctccaggaaatggtagcccctcacagtgctttctgtctgcttgtttagctttggcatttgaatgtgcagaatggtggactttgaaattaatgtccttctgttgactgcagagtttctgctggaaatgcagggaggctgcttgtggggttcgcgtgctgtgggaagtagggaaaatgagctggtttactttgtgtctttttgtgcatgcagactgtttggattttgccaacagtttctgggtgctgcctgctttttaaacttttaaaaaattgtaaacagcttcagtggctttgcagaaggaagctgtggtttctggtcttcctgttcagtcatgtttttttcagagggagggctaacatctggccatatttttcaacaaattcagaagtgagtagagaatgcatagtagctgtcggcagaggaggaaccagaatctctccaaagaaattcctcaaacagaatttcacacagggtattccatggagaatgaggtaggtgcaagtccagtgtggaaagcgccatttagaatgatgatggtgtgagtcccttgtgggtggctttcatggctgcttcccagggcttgcccattgtgagctagggtagcccagtctccatgacccctgctttgggaggatggggtgggtggagggttcatttgctggcttcctggtctgagaccctgtggcaaggggcgtgtatggagaagtgccgttccacccaggtggggagtataggttgttggattcatccatcttgactcaaggaagaagaagccacaggttttacatcttccacggagaagtaattttcctatggatttgtggtcgggacccaagagcctggttgaaaaatgatgtagggagatggccaagcaagagagcacccaaagctggaatttcatccacgaagcctgcaacactagtggggttctgcttgagactccaccagcatggatcctggccaccgccagtgtggcctcctgtgggcactaaggtgcctatgcctttctcactgaagcaaacaggcggtagtgggcagagctctggttccccttgaaattcgctctgtcagccgggtacagtggcttatgcctgtaatcctagcactttgggaggtggaggtgggtggatcaggaggtcaggagatcaagaccattctgactaacatggtgaaaccccgtctatactaaaaatacaaaaaaattgccgggtgtggcggcacgcacctgtaatcccagctatttgggaggctgaggcaggagaatcacttgaacccgggaggtggaggttgcagtcagccgagattgcgccactgcactccagcctgggtgacagagtgaaactccggctcaaaaaaaaagaaaagaaagaaattagccgtgtcctgagatgcgggtgcacaccggctgtgtcatacttatcatttagacctctccagcaccgaggaaaggtcctttttccattggtaggcaccaaagcacttaaaaaaaaaaaaagctaatctgtcaactgacactgcagggagtgctggaagtttgtggaaattcacataggcaggggtgcaatgtgggtgtccacagaggagttctttgtcatggagcttgtaggaggggatttgtcgtagtgcctcggatgtgcaccttaggcagtgtgatttatgaggatggcaggtgtctctctgggactatagcctatcactgtccagctggacagaatcatcgctccaggttccactgtcttctcagacccaggcactgagtttggtgcctcttccagtcattttccctcattcctgctgggccctcatgtggctgtgcagttgcggtttgtctgtctccctctttagactgggggttccctgggggcagggacggtggctcctacagccccagtgtctggcgcatagtgaatactcatgagatgtactgaatgttggccttaaggatacctaggcctttttataatactttaaacatctttgttcagaggcggttttgttttattagataaaacccaccttgtagtttattcataagggttaaataatttgcgcaaatgaaaatgcctgaaccctgtagcagagacatgctgggtactgctcagtgtgactaagtgttcttctctttcttccttcatagactttttagcactttctccagagtaatactgagctcaatgttttgcatggagaatgcagctagaaggtatagccatactatttactttggtccccaagtagaggccactgtttcatgagtctgcttttgctggttcttttagtggattcatttctccttgtaaattaataaacaggtgccctgacttataagttagtttctgagaatttgttgagcagatccagttactccagatcctgttcacccaagtgagctgataatgttgagcttcagatttaacaaaactcaagacccgcagttggcatctgagggccagccttgcccagagcctgagccttggctttgtgtgaggagggcattctcactaggtaagccctagtaggccagatttagttttagttttttaactcagaagtacattttaggtttccaactttaagagttgttttaagcttaagacgttaactttgtaagaatttgtaaggatctaggcatcttccagagtgagtttagaaagttctgtatagttatctgaggtggcatatattccatatggatgtctttgcacagcgctgcatggtgactcagagccctgtgttccctcctcctggctccgtactgtggactctggcaggtcccttcgatcctcacagcctcagtttcttcaggagagacttaggctgggatagactccacacctcactttggtgctgggactccactcatggaagagaaatagcacttagcctggtttccttctggggactgaattggtcctttggtctctgaggttcaaaggtgacaagatcatttagtggtgatgaacaggcatactcaatcaaatacatgttgaatgaagaatggttgcctgggctaatcccaccttttaaattctatgtgtccatctatagtacattctagtgagttaaagaacccatgatggtttactggaatcctgattctgtacattaaaaatatgctaaaccatttaattatttccctcgttccttccagacagggtctcactctgtttcctaggctgggtgcagtggtgtgatcacaactcactgcagcctcaacctcccaagctcaagtgatcctcccacctcagcctcctgagtgcctggaactacaggctaatttttaatattttttagagacaggtctcgctatgttgtccaggctggtcttgaactcctggcctcaagcgatcctcttgctttggcctcccaaagtgttggaattacaggtgtgagccactgtgcctgccctcaatttattttatttatttttttcttgagacagagtctcactctgtcacccaggctggagtgcagtggcgtgatcttggcttactgcaactgctacctcccaggttcaagcaattctcctgcctcagcctcccgagtagctgggactacaggtgtgcaccaccatgcccagctaatttttgtatttttagtagagacggggtttcaccatgttggccagggtggtcttgaacatctgacctcaggtgatccacctgccttagcctcccaaagtggtgtgattacaggcgtgagtcattgcacctggcctcgatttattttttaactagaactttcctttaaatttattttctttctttttttagatttaaagagaacagggccttgcccaggtgcagtggcttacacctgtaatcccagcactttgggaggccgaggtgggtagatcacttgaggtcaggagtttgagaccagcctggccaacatggtgaaaccccatctctataaaaatacaaaaattagccaggtgtggtggtgcacacctgtaatcccagatactcgggaggctgaggcaggagaatcgcttgagcccgggaggtggaggttgcagtgagccgagatcacaccactgtactccagcctgggctgtatagtgagactccaggtcaaaaaaaaaaaaaaaaaaaagagggccttgcttagtcacttaggctggagtgcagcgggcagtcatagcccactgcagctttgagctcctgggttcaagtgattctctccccccagtctttcaggtagctaggactacagacgtatgccaccacgctcagcttttttctttttaattaataattattatttgttttgagatggtcttgctctgtcacccaggctggagtgcagtggtgtgatcacagctcactgcagccttgacttcctaggctcaagtgatcctcccacttcagcctcccaagtagctgtgactacaggtgtgtgccaccatgtcctgctaatttttatgttctaatttttgtattttttttaaaagatgaggtctcaccctgttgcccaggctggtcttgaagtcctgactctagtgatcctcccatcttggcctcccaaagtgttgggattacaggtgtgagccactgcgcccagccatcagcttaaattttgtgttcaaaagcaacttcttttccaaaaatctgaggtggcttcttgttcagttttgtatctggaatagcagagagctcttccccagcaccggctgtccctcctaccaccccctgcagctgagagctgagcaaacattacctctgaaaagccccatcatcctcagcgagaacagcagctaccctgcattccgtgctgaatgggtaggagtggcagagggaggctgcagcagatgtgcaaagatgcatttctttacttaatagtgttaatattccactttctaggaaggcttacccatcaattaaaattatttgagacattaaaaaaagaaacttagggtagctgctattgaagactaaggactagggccagagagaagcctgcctccaagtagtccacagaatctgcttgttaaaatgttcgtgatttggaggcccaggtagaaggggcaggttcctctgaagcgccttggcatgccctatctttggcgttccggggtcgccctcctctgctagtctgtgagcagtcagaaggttgtatctcctgttcattcctctccttgtctcttgctgctcagaacagcagctttaagaacagggtggctgagccctaagtgtacctttggagcatcctgtgtgtcttcagcattgattgactgtttttactgtggatttaatttcagttactttactctggtcttactacttcggcttgactgtgacatcgttgagggcaggggctgtgtcacctctaaccaaagggcctccccagatgcctagcctggtccaagcgttccatcaagagtcagtaccagcgtttattgctgtccagtctgtgcaagctccatgctggctgctgggtaagagccaagggcagccaggcctaatggctcatgcctgtaattccagcactttgggaggctgaggctggtggatcacctgaggctgggagtttgagaccagcctggccaacatgttgaaaccccatctctactaaaaatactaaaattagccaggcatggtggtgggtgcctgtaatcccagctactccagaggctgaggcaggagaattgcttgaaccggggaggcagaagttaagtgaaccaagattatgccattgcactccatccagccttggtgacaagagcaaaactccgtctcaaaaaaaaaaaaaaaaaaaaaaaaaaagagcaaaggccagaggaggaaagagctgagctcgatgtagggaagaattgatgtgatgcttgggcaataagaggcatctacagatggccgtcctggtttccttgccctgcaagagttcctactatttctcactgcctaactgcagagggtctctctttaggggtgggattgtaggacgggggagcgccagagtccttcccagtgcagactgtaattctgtgtggagactataattttatgacctgtacatcaacattaaaataacagtgtaggttgcatgtggtttgtgggacctgttgatttggtgtgggcttcttggttagaggttgatcttggcaaatctcctgtctcagagttggtttcctgttgctcccataggtagattagtaactagtttggctaacaggcagctttcagaagagccaacaaatggagccaggctgcttgcccacactgtcagattcagagctcagtcactgtccatgacacagctagttatcatttaggaggaatgagctttgggggctagcaggcagaaatggtttagggacagccattttcctgtggctgatgtgagattatccatgtctgtggagatgcaagcttccgaaaagctgggctcatgggccaaatgcctctgtatttccataacctccaggccagggtcttgcacatcatagggcctgggagaataagtgagtggtcaagcatacacatttgaaaagtaattcatgtgccatctggtcacttgagagtgccagaagagaggaaatcacaggcaagcaaagcctggtgtgtttttagtgaggctagagaaacatgattttttgcatggctaaaattgcatcactaaattttgagggccgtttttaacttacagtttaccatgatttcttggctgacaaatcataggtgaccatttctcaccattctcccatgagaaccccgcactgcaaactacctgtcatgtccaaacttgtcctggggctcaaagcttgtcagggattaaggagaatgaagcccgaaagtgccttagggacatcctgtcttcactgctgtcatagagccagggcctgggcagcacaaggccacatgctttctgagcccaggccagtcccagcaagctcttctggaagcacttttttttttttttgttttgagacggagtctctctcttgttgcccaggctggagtgcaatggtgtgatctcagctcactgcaacctctgcctcccggattcaagcgattctcctttctcagcctcctgagtagctgggattacaggcatctgccactacacccagctaatttttggtattttaagtagtgacggggtttcaccatcttggccaggctggtctcaaactcttgacctcaagtgatttgccagtcttggcctcccaaagtgctgggattataagcatgtgccaccatgcctggcctttttttttttttttttttttttttgagatggagtttcactcttgttggccaggctggggtgcaatagcacaatctcggctcactgcaacctccgcttccccggttcaagcaattctcctgcctcagcctcccaagtagctgggattacaggcgcccgccaccacacccagctaatttttgttatttttagtagagacggagtttcaccatcttggccaggctggtctcttaactcctgacctcaagtgatctgcctgcctcaccctcccaaagtgctgggattacaggtgtgagccactgcacccagcttctggaagcatttttaaaaagtttttatttttcttgagacaaggtctcactctgttgcccaggctggagtgcaatggcatgatcacagcttaccgcagccttgacctaccgggctcaagcaacctcctgcctcagcctcccaagtagctggtactacatgcgtgaaccaccacacctggctaatttttgtagtttttgtagagatggggtcccaccaggttgccgggctggtcttgaatccctgagctcaacaatctacccacctcggcctcccaaaagtgttgggattataggcgtgagccgctgcacccagcctgggagcactttctgtcccctctgtggttcgtcttagagcggatcatcttgtaaggatgttggtgatcttaattttttatgcttttatattttgcctcagtttaagtgtaatcagcaggaagcagaaaatatattcatcattttcaaaaaatatttaaaaattcaaatattaaaaaaatacagagaaaagttaacaaagctactgtatacatcatctggctccaactgttaccaactctgaggacctttagtcatccttactccatgctctcccctaccaccggatgtactgagcagcagagaatgggacctgggagggggcctattccaggtcaaaggggagagactactcctggtcaacggggaactactctgggtctatgagaggactagttcaggtagatgagggactactccaggtcaatggggaaccactctgggtcaagggaagactattccaggtcgggcaaggggagctattccaggtgaagaaggcggatgcaggggtgggtccagtcagcccaagtgagagaggaagcattttagcagattatagggctttaagcctgggtcacaggtgtgtcacctgttgggggcacgaatgaagagcttaggctgtgatgctggtccaactttattatagtctgtggtagtgatgagtaggagacagtctgattatatacatatatacatatatatatatatgtatagacagcagtggaagaagagataaattttaacttattgtgaaggtaaatacagtcataaaattaactggtatatattttgcttgttcacaacatatcagacgtgctcagaactttatgtagattattgtattgattgcctgtggcacttctctaaggattgttagcctgttgtgcagatggtgagagctcatccaaccagtttgcttagtaagtggtgcagcccaatgcatgccggagcggagatcatgcctaggacctgaggaacatctatctttactggtagaagaaagagagctggcaaagggtgcgtgagatgcaggaaacacaggggacagagtgacagaggcgtggtggcagcgttagtgcacttctctggaagcaagactttctgttgtgttttttgttttcgtttttattgaaagagcttcctgattccatgtctgttttagtgggtgaatggaataaaaacccagctatgaaagggtgaaataaataaaggtaagaaggaagctgaggagcagaaagctcagccttggctgtcaggaggcagcagggtcaggaaaaatgttgggttttgctctttgaggatttgttttatttggggtggcttttgtttgcttatttacttttcccgctaatgctggagagctgagcatgatggtggtggtggggaggggctcatacagggcagggtccaaccccagcctcattagggaggcagctgcagggcctgctgggagccactggacgaccaatttctgcttttttcaggagtggttactgaatagtgtagtccttggctgcaattgtctgtgaaattggtgggtttgaggaggtgtccttataggaccacaggttctgctacaccgttttatattggattttgcatatgggtgaatttcccatatgctggagagagacagaaatgagagcttttaatgaaagtttggtggtttattgtatatatgttttgttagtttctgtgtttggtgataaggggggtctgagcttggcctactgtgggggtttcggctgccatctgtgcactgggtcaccctatcctggcaggcacctgcaaaaggagtgttgtcatctcctcctgcgtttcctctgttgagagttatggaggagatggtggggaataagttctcactcttagtcacggctctggtttttgcaggcctgcgtgatgtttccttgctgcggctgcacatcagtgtcttgttttctcgggtttatgttcctttgggtgactgtagatagggattgtagcatgatctctcagcacaatttgggattgcttccccccagacccccaccccccgccgccattgtcaaaggtggtgatgaaaagctttcttacggagttattgtgaatgaagtgtcaggtcttttcctgggttctgcaggcgaggcttgctgtaatcctctcttgctctctcactgattctcactctttaaggtgactttgattgcaggattagccttcagaaccctcatgaaatgctggatagggtgtgaagtcatcagagttaggggctggccagctgctgatcagggcttctccccctacttttttttttttttttttttgagacagtatcttgctctgttgcccaggctggagtgcagtggcatctcggctcactgcaatctccgcctcctgggttcaagcaattctcctgccttagcctcccgagcagctgggattacagacatgtgccaccacacctggctaatttttgtatttttagtagagatggggtttcaccatgttggccaggctggtctcgaactcctgaccttaagtgatgtacccgcctcagcctcccaaagtgctgggattacaggtgtgagccaccgtgcctggcctggtttctcccttgttgatctgcattggagctcaacacactcagtgtccccacttggagtgttccccactggggaaagaattgcataaaaaacatatgctccacttgttgatgctagcactggccacaccttccacctgccttcctggagttctcagaaatgaagtgtcccagctgagctggaaagagttggagtgatgttatgttttatcttctgtggggaatctcccccttctatcattgtcttgccagataaggttacctggcttctatgtgttgtaggaacaggtgaagaacaaggtgcctccatgccagaggctgcatggcagcccagccccaccgtgccggcctgcgtgctggctgtggtccctcaggcttgtgtgctgttggtacctttctcaccagtctggcagtcagtgatccctgttgcatgggggccatggtagtagttttggctacttctgtttgttaaccataggtacaacacaaagcatttgtaaataatgaactccaatcattgccgtttctgcctgcagcctggaattgtctcgccatttaaacgagtattcctaaaaggtgaaaagagtagagataagaaagcccatgagaaggtgacagagaggcgccctctgcacactgtggtgttgtcattgcctgagcgcgtcgagccagacagactgctgagcgactatattgagaaggaggtaaaggtaagtcgtcatgggccacaggacgtgcctgccaaacgacagtgacggtcatgcttgtatccaccagacactcttgagtttataagacacagccacacaaacaccttagtagttgattatcccacccattgtcttgtctatgctgataaatttaataattggataactgaaaacccagattctgtctgctgaccccagtttatttttttctgtagtagcaatgccaccttctttctctcgaagacttggctgtgtgagtagtatgtgctgctccaccagaagagggttaaagagctgggagaaaactcacatctcctgtagtttgcagttgaaaagagttacctggtcaaggccatgaccttgcaggtctaacagtcaccgcctagaattcagaccatgtgtttgaggctcatcattgggtctcaaaggcctgaggccaaaatactgtgcataaaccatgtgacgtgcataagttgatttttaatccctcccctaaaatgaaaatatatgaataaaaaggtataaagccatgaggtcagagagaataggaaaggagacaacagtggatgaggtggtccgtaaacatggaagaaggaaaccgctgagggtgagatgagttagagctaatgcagccagacccgagttcctgcagaggacccagagtccagggggctcaggaggggcatggggcagttcgaatgtccatgggagggatttccactctcacctggctcagccagatgattaactcatccccacccactggaagatggggctttggacgtgcagaaacctggtacaggggcaggtggggagagaccaagacagaagataaggaagtcaagtcaaagcctgtatgtggaatggagagaattcccaattcctttttctttcaagcttctagaatgcctgcaaccaggcctttcccacaaaggaattcttggaagggtgctcattggggaagttaagcagcccctactggcccttggggttacccaaccaaccagcctgaataaactccaacagtcaggactcccgccaggcatccgacgtctgtcagctttttggagcctcatttcaaacacaggcagctgagtataagtacacatttgaggacaactttcaacctaaaggcagagctcaagacaaatacacaaacatgaataaacagcaacaatgcagaaaataggggaagaaatgtaaaagtatataatattttcagaaagataagaggaaatattgttgacagtgacaacaggattctacttttaaataaaaaggtgagaggaagagcttctggaattaaaactgttaattaggccaggtgcggtggctcacacctgtaatcccagcactttaggaggccaaggtgtgcggatcacttgaggtcaggagttcgagagcagcctggccaacatggagaaaccccgtctctactaaaaatacaaaaattagccgggcgtggtggcaggcgcctgtaatcccagctacttgggaggctgaggcaggagaattgcttgaacccgggaggtggaggttgcagtgagccaagatcacaccactgcactccagcttgggtgaaagagtgagactgtatgtcaaaagaaaacaaaacaaaacaactatgttatttatatatctttaaaaaattcaatagaggtgttgaaagataaaagtaaaaaaaaaggccaggtgctgtggctcatgcctgtaatcccagcactttgggaggccaatcacgaggtcaggagattgagaccatcctggctaacacagtgaaaccctgtctctactaaaaatacaaaaaattagccgggcgcggtggcgggcacctgtagtcccagctactcgggaggctgacataggagaatggcgtgaacccaggaggtggagcttgcagtgatcccagattgtgccacttcagcctgggcaatagagcgagactccgtctcaaaaaaaaaagtaaaaaaaagtcccagaaagaatattcaaaaaacaaagaaggttaataaacaaaagatgagaaagagaaatgaaattagatgaccaattcaggaagttcaacatctgactcccaagaaaaaagaatgaagggaagagtgagaagaagttattaagacagtaaaggaagaacattttgaataattgactgatggacatgactccccccattgaaaggatcctgtcatgatgactagacaggtctctaaaacctcaactcacagaagcctgttcttagaagttactggaggatgtgctgcatcaaaacataaggggaggccgggcatggtggctcacgcctgtaatcccagcactttgggaggccaaggggggcagatcagatgaggccaggagtttgagatcagcctggccaacatggcgaaaccctgtctctattaaaaatgccagaaaaattagccaggtgtagtggcacacgcctgtaattccagctacttgggaggctgaggcacgagaatagcttgaacccgggaggcggaggttgcagtgagccgagatcgcacccctgcactccagcctaggcgacagcgtgagacgcggtcttcaaaaacaaaacaaaacacaagggcaaaccaagaataggaagacacggattcatagcccaaggggtctgccagggaaaggaacaaagataattcccaggatgacaggaaagtgaagtcccaggaaattaatctaagaaacaggccacagaagctctgggataagtaagtatagactatatgtttgggtagaataatgtattgagaagttgctgaagaaatagaatagtacatagaaacaaagcaaatagaggtgtggaggaattgataataaatcattaaaaatgaaaacttaaatgttggaaactcctgtttctgggaagatgaagtagacattcttttccctattcttctagttaagtgcatctaaaatctaaaatccttggacactatatgcaataacgtaagaacactctgaaaggtaaagagaacgcagaccacccaggacccagaaaatgacccagtagtgatttcttcaggttgtctttttgcctcatgtagcccagactatgagccgaagaaactggcagcccagaaacaccaacaggtacagacagaaccccctgccaaagccagctccttctgaccaaaggaccaggaaaggggcagcctagcacaaaacagagaatatttagacaactgctcagtgcaaaccaaacatgatagaaaggactgtggtcctacctctgtgcctgctaccagaggctaagtgagggccacttactcctccagagaaagttgaatagggaccatggacttttatccctgttgggcagtaacaaacccctaaggaaccttgtgtggttctggagtgttagtggagaccacattgggtggggcagtaatgaggccctcctattccttccaaccagggaagaatcagtggaagccacatggggaaccagaactcttatcatacccagcagtaacgaggaaggagccctccacgcaggaggccaagtagggaatctgacctttgacccctacttggtggtaaaggtggtgttgtcgagcgccgtggcccatgcctgtaatcccagtactttgggagactgaggcggacggatcacgaggtcaggagttcaagaccagcctgaccaacatggtgaaaccccatctctactagaaatacaaaaattagccagttgtggtggcacacgcctgtaatctcaggaggctgaggcaggagtattgcttgactccggaagatggagattgcagtgagctgagatctcaccactgcactccagcctgggtaacagagcgagattccatctcaaaaaaaaaaaaaaaaaaaggtgccgttcccttcccttctgagggcctaggttaaattttctagcatttgtattgttgaagtcctgaaaagagaggagaaagagggaagggctgaaaaacttttcaaagatcttatgggttgaaacgtttggcaaaggacaaacttaaaagattcagaaagctgagcaaacgccaaacaagataaatccactactaaagcccatcatagtagaatttctgaaaagtaaagacaacaacaacaaaaaatcttgaaagtggcaagaaagaaacactttactcataggggaaaacagaaagcagatttcttgttacacataatgaggaccagtggcacaacattcttcaagttctgagagaccctgagaatcaaaaggataatgagagaacacaagcaactccacacacagtgggccaaaaaatagaccaattccttgaaaagcacaaactcctcccacagtcatccaatatgaaatagatcatttgaatacccctataattattaaagaaattcagtatctaatttgaaaactcccattaaaaaaagtctttaggcccaaatggtttcactggagaattctatcaaacatttaaagaattaatgtcaattctacatactcttccagaaaaacagaaagggagggaactcttctgttctctcttctcttctctgctttctcttctcttcttcttctttttttttttttttttccttgagatagggtctgtctctgttgcccatgttagagtgcagtggcatgatcatggttcactgcagcctcgaccttccaagctcaagcagccctcccaccttagcctcctgagtagctgagactacaggtgcctgccaccatgcccagctaattttttattttgtagagatgaggtctcactgtgttgaccaggctgtcttgaactcctagactcaagcagtcctcccacctcagcctcccaaagtcctggaattataggcatgaaccactgcacttggaatattttctgactcattttgtaagggcagtattgccctgataccaaaccagacaaaaaacagtgcaaaattaaaagaaataacagacaccaatacaaacataaaattcctcaggaaactattaggtaacatattcagcaatatagaaaaaattatacctactgtggctgtgagaataaacaacaaaaaaattatacaccgtgaacaagtggagtttgttctgaggatgcaaggctggtttgatacttgaaaatgtaatccattggcaggagaatcacttgaacccaaggaggcggaggttgcagtgagctgggattgtgccactgcactccagcctgggtgatggggtgagactccatcccaaaaaaaaaaaaaattgtggagaaattttaattaacatttcttcaaatatttaactttatttttttctttccttctagggctcccattaatcacatattgatatttattttatttttcatgccctttcatttttctctcatttttcctattctttactcttcccaatgccttctgggaatgtttcaaaccactctccgtcttatgaattcattcctcaactgtattcattcaaccctgaattaaattgtttgtttctactatatctgattggtccttttttataactccttgtccctatttgtttccagtgccctcctacatgcccttgagaatatttattaggattattgtaaattcttgttttctctggcttatcagttcttctccctccagaattagttgtttagtttgtgatcttgcctttccagtgcttgaggtctgtgttccacagatctgtctttattttttccattccctccagaatatcagctatagtttttttgttttgttttgtttcgttttgggatggagtctcgctctgtcgcccaggctggagtgcagtggtgcaggctccgctcactgcaagctccgcctcccgggttcacgctgttctcctgcttcagcctcccgagtggctgggactgcagaagcctgccaccacgcccagctaatctttttttgtatttttagtagagatggggtttcaccgtgttggtcaggatggtctcgatctcctgaccttgtgatcctcccgcctcggcctccaaaggtgctgggattacaggtgtaagccaccacgtctggcccagctgtagtttttatattacgttctgagttccatctatagcccacttgcttctgaggcatctccaggatgagattcaaaggagggaaaccccaattgctgtaagttccccatcttgactcttgacttccttacagcataaactacacttctggtcctcaagatttagcccaatttgactgggctgtctttttatgttcagtagaattagactatatcacagaaccaccaaacattttttactagtttatggagagaattaccattttctagaggtagggaagagacattagtgacctcatatggcaaattactatggagaatataattatttccaaattttcctagaaccataatactttgtgattgttacagtgattcttattttccttccttccttccttagacctcttaagtataccctataatatgatttttaattcaaaagttattaaaattttgttttgaagatttcataactaaactctaaccgatccccaagatgactagaaaagcctcttggttttacaaaactagtttggatagtgctgttctgaaggtataatagaaattggtgaaattatttgtggcctgtctttgtgttcttgctgtatcaatatttgtatcttatcagatacctttacatatgtctagccttttctttctatctgacattaacttattcaacaaatatatgttgaacacttgctccactatcgttatagctgctaggtgcagctagaagtgacagctgatagagcaatttctttagagtagtttgtgcagtttcagttgaaaaatcagcgcctggtttccattcaggccctgctattgtgcatgggaacttgaatcaccttggaacttttgtattgatttccataaatgggaagttagatgaattgcttaataataccatatgtttgcagaaataaaagaaaaatcaccgcttaaaaaaatgtaatccatcatattaacaagctaaagaagaaaaatcacataattatatcaatcagtggcagaaagtttatttgacaaaattcagcacccattcttgattaaaaactcagacaaatggggctgggtgcggtggctcacgcctgtaatcccagcactttgggaggccgaggcaggtggatcacaaggtcaggagatcaagaccatcctggctaacatggtgaaacactgtctctactaaaaatacaaaaaattagccggacgtggtggcgggtgcctgtagtcccagctactcgggaggctgaggcaggagaacagcatgaacccgggaggcggagcttgcagtgagcccagatcatgccgctgcactccagcctgggtgacagagtgagactttgcctcaaaaaaacaaaacaaaacaaaacaaactcagacaaacaagatatgtttttgaacaatgaatatgtggatatcaaaattaaatcaataccattcacaatcacttaaaaaatgaaacacgggtataaatcttacaaaacatgaataagatttgtatgctgaaaactatagaacactgatgaaagaaatcaaagatctgaataagtggagagacacactgaattcatggattggaagactcaacctaattagtatgttacttgtccctaagttgatataaatggaccaactccttgaaaagcacaaactactactacaagtcatccaatatgaaataatttgaatagcttgtaactattaaaagtgaattctacaattcctatcaaaatttcagcaagaattttttgtagatataaacaagactattcttaaagtgcagtggcacgatcttaaatttcaagctattcttgaaatttaaatggagaggcaaaataagtagaatagctaaaaataattttgaaaaagaagaaaatgagaagagtcagcctgtctgatttcaagatagatcatactgctatcacaatcaagactgtggtatctgcagagggactgacacagagatcaggggagcaaaatgaactagaaacagatccacacatatatgcccagctgattcttgacaaaggttcataagcaattcagtggagaagggataggatagccttttaacaaatggtgctggagcagttggacatttgtaggcaaaaattgaaccttgccctgaatttcacaacttaaacacaaaaattaactcaaaatggatcataggcttaaatataaaatacaacttctaggataaaacatagaaaatcttcaggatgcagggctacgcagagttctgagacttgatacctaaagcataattcataaaagaaaaaactgataaactggacttcatcaaaatttaaaactcttgctctataaaagacaatgaaaacatatgctacagactgagaggagatatttttaaaccacatatctgacagagggttggtatctacagtatataaagaactctcaaaactcaacagtaaaacaaacaatccgattaagacataagcaaaagacaggaggagatacttcaatgaagaggatatacagatggcagtaagcacatgaaaatatgctcagcatcattagccatcagggaaatgcacattaaaaccataatgagctgccaatacacacctaacagaatgtttaaaaaaagtagaacacaagatgctggagaagatgtggaggaactggacccctcattcattgctggtagggatgtaaaatggtaccgccactctagaaagcagtctggcagtttcttcaaatctccacgtgcaactacgaacaacttggcaattgcactcctaggcatttatcccagggaaatgaaaatttatgttcacatgaaaacctgcctactaatattcaaaacagttgtattcatagtagcccaaaactggaaacaactccatgtcctttggtggataaatggttaaacaaaatgaggtccatccatgccacagaagactattcaataatacaaagggctgggcatggtggcacctgcctgtagtcccacctactggggaggctgaggctggaggattgcttgagcccaggaagtccaggctgcagtgagccatgatcatgccactgtgctccatcctggatgacagtgagaccctgtcttaaagcaacaacaaaggaacaaactacacagcaacctggatgggcctccagagaattatgttgagtgaaaaaagccgttcctaaaggtttcacactgtatgttcctttctgtaacatctttgaaatgacacagttgctgaggtggagaacagattagggtttgctaggggtggagagaagtaggtgtgcctataaagggcaacaggaggggtcctcacagtgatgggtgctctggctgtgtttacatccatgtcctggtgtgatgtgctgtagttctgcaagatgtcactgctgggggcaatagggtaaagggagcgatggatctccctgtatcatttcttataataagagaatttacaattaccttaaaataaaagtttaattataaagaaattgcaatttgactactacttggcatgtcagtgagagaatgtagataataaaatgatgtaaaaactaagtaatgattaagaaaaattatctaagttgtaagaaaagagagggaaagtgggaatggtgatacaattggaagtcaatatcttaaattgataagcaataggaatataagcccattatttagaaaaatggctctagatcctagaagaatcagaagacttcagtgtggctgcctcttggaagtggtttgtggatggggttgtcccagttagtaaaggagattgttgttgttttgttttacaattttttgaactttatttgcctttttaaactgtatacatttcataaaataaaaacaatcacaataataaaatccaccagtgataggagacatttaatcccacatactccagtgtggtgtttatgggaagtattttgtttttagaatgaacattaatgaacaagttgagagggatttaatagtagcttctgttttggaatgcttactgtgtgcagcaacactatttaacattttaaatatatttttctcatttaatcttcacaaaaccttcataaagtagaaacattcctctgggaggccgaggcaggcggatcacgaggtcaagagatctagactatcctggccaacatggtgaaaccccatctctactaaaaatacaaagattagctggatgtggtggtgtgcacctgtagtcccaggtgcttgggaggctgaggcaggagattcgcttgaacccaggaggtgaaggttgcagtgagccgagattgtgccactgcactccaggctggtgacagagcaagactgtctaaaaaaaaaaaaaaattctttctgtagtttccatcacaagctgacattttccccagtaggatttggtgcagtgcaaggctcacgtgggctcacctagtgactatgaatggactcatagcaggcttgctgtgtggttttaataatgggacagggtaattaatcacatttgtgataacaaacccaagaagctcttctcagatttgttattattttttgagacagggtctcactctgtcacccaggctggaatgtagtgacacagtcatgactcactgcagcttcaacttccctgggctcaggtgatcctctcacctcagcttcctgagtagctgggaccacatgttgcaccatcacacctggctaatttttgtatttttttgtggtgatggggtcttgccatgttgcccaggctggtctcgaactcctgtgctcaagcgatcctcctgcctcggcttctcaaagtgatagattacaagtgtgagccaccatgtccggcctattatttatttttatctaattgaatatgtaatttatgtacatggttcaaaattcaaatgataacagagattcttggtgaaaagaaatcatgtgcaccctccgtgggaggaattgctgacaccagcttcttgtgtctttacagtctgtccatatatgagcttacacatgcatttgtttcccaaatgattacacggtatacactgtttgcaccttgctttttacactgaacagtgtatcttgatttatcgccgagtgttcacattagcacacataaaactgcctcgtccattttaatggttgcatgatattccattagatagctgtgtcatattctatttaaccagtgatttattaatacatatttaatttattttcaactgttatgtatgttttactgtacctataggataaattacaaaagtggagtttctagatctaaggctaggttactttttaatttgacagacatttccaaattgctcttcataaagggttgaagtcagtgcatacgtgaggactctgtgagtgtgcaggcggccctgtacctctgcaggttcttcacctgagtcaagcaactgtgggttgaaagtattcaaaaaaagaacaataaaaaaaccactacaacaataaaaaataatacaaatttaaaaaatacagtgtaacaactatttacataacatttacattgtattaggtataagtaatctagagataatttgaagtacagtcttggccatataacaacatattggtcaacgacagaccacacatatgacaatggtcccatgagattataagggagctaaaaaatttccattgcctagtgacatagctgtcttaacattgtagcacaacgcatcaccttttctgcgtttgaatgtatttagagtcacaaatacttactattgtgttacagttgcctgcctgcagtattcatacattaacatgctgtacaggttgtagcctgggagcaataccatatagcctaggtgtgtagtgggctataatgtaccatctgagtttgtgtaattacactctgtgatgttcactcaatgatgaaattgcctaatgacatatttctcagaatgtatctctgttgtcgagtgatgcatgactgttacacaggaggagtgtaggttatgtgcaactaatactgccatattgtatgaggaacttgaacatctgcagattttggtatcccaagaggctcctggaaccaagccccagcagatactgagggacaactgtacctgtttctccaccctctgaggaacgcagtgtttattcaaactttttggtctttgccagtctgatattcttaaaatgttttctcattatagtttgtacttataagtgaggttgagtgtctttcaaatggtcaaaagtcaggtctctttcagactacctttctagatccattgcccattttttctgttgggttattgcttcttttcttatatctttgcagtagctctcagtgtgtcgggtaagttagtcctctgctgtaaagttagttttaaatgttttcccctagtttgtcatttgtctttgttcatcattgtcttcaattggttctcttgcagcagagcctgaaactggggatcatgttccactgatctgtaaagggcatgctcaagagaaagagtgaagggggtagggtagggcagaggggaaagatgcctgaaaatcatagactcgggttaatttcaacctgatcatgctctaaagcctagaatgccacagctcggtgaagacagaagtagctcagggtgttacccatccaccctcagagcagtggggggatcctgggtgagacaccactgcctgtactacactccaccctgcacttcctcatccacatatttctcacgttaagttcattctatccagactcagcttctccagaggcatttggtcatgatttctggaaacctttccagatgaactacagccctgactacttcagtgggtcccaaggcctcattccacccactggggacatagcaccatgtagcaactattggtttagatgtatactgcatcctaaagaagagggggcatcctttcagggtgtcatctcccagctggccacagctctatcaagatgacagctccaggatgcttgggtatttatttatttatttatttatttatttattgagacatagtctcgttctgtcgcccagcctggagtgcagtggcgtggtcttggctcactgcaagctctgcctcccgggttcatgccattctcctgcctcagcctcccgagtagccgggactacaggcgcccgtcaccacgcctggctaatttatttatttattgtgagacggagtcttgctctgtctcccaggctgtagtggtggcatgatctcagctcactgcaagctctgcctcccgggttcatgccattctcctgcctcagcctcccaagtagctgggaccacaggcacgtgccaccacacatggctagtatttttgtatttttagtagagacggggtttcactgtgttagccaggatggtctcgatctcctgacctcgtgatccgcccacctcggccccccaaaatgctgggattataggcatgagccactgcgcccggccacgcctggctaattttttgtatttttagtagagacggggtttcactgtgttagccaggatggtcttgatctcctgacctcgtgatccacccgcctcggcctcccaaagtgctggggttacaggcgtgagggtattttataggacattgaattccgtgatcatgtgcctactgctgtacctcctttagcactaagtgagtcccttgatccaaggtgatgatggtacttgctgtcccacatcggaaaccacatgctccacaagcccttggagagtaggttggcagctgctgcaggcaggagaggcaaacccttatgtggaggacatgctaatttttgccagaacaagtgtttcttattgcaggatcaaaggagttctgaagtattcagctggccagcagacaggacaactggttggtctcttggaggggatgatgccttatcagggctgcagaattggtatcctgctggcaggtctgccacggtgaagggctgtagtgtatttgcttgtgcctaagtatgtgaaccaggcttggggttttctttctgtcagctgtgtattgggaaccctttctgaggctgtgggtgtaatttaagggagaggcttcagaacaggtccgctgggaagtgtttaggtttgggccacctgttcctgcagctggcactgttagcacagtcctgcagtaagaacgtgaacatgtactgttgtccatcccacatgaacatcagtagttcctgattggtttgaggaagaagtgtttaccgcatcagtagctacaaaccatgtacccaagattgtttatccacttgaataaagattccatttagctcagtttgtggcagtctacagtcatctaccacaatttatccaccataatttctataggagccagactgggcatgagatgggggcccctaccctgtgtcatttatgttttcaagagcagcattaatctctgcttttcccactgggaaatgatactgtttttgatttactatggccaggggtcaggggccggataaatttcaggggcttccaaatggccttttctacttatagctcttattctttagacaaaggaccaatggaaggattctgcaaagtgctaagtatgtccgttcctcttgtattacgtctcttatattcagggaagtgggcagatggccaccagtggagtctttacccagtggatgtactttcaggtggacctggctgggcttcatgtattatctgactcccatatgttcctactctgcagaggacctttttgatagtttgggtccctaagtatgtgcattgtctcagaccctctatttcaaaaacctctgaagacttgcagttcctatggtacttttacccaggtgaatgaagtccctttgggaagagctggggaaatcactgtggtgtgtacttgccttggtgttgcaggtcgactcccacgcaggcttggtctctccttcagtcagtgtttctgagtctgagagctgctccagatctagaaacggagtcagggattgatactttgcattgtagaagctcaccttagccttctgcttattccgttttgattttcttgtttatatatagtaagcagcacccttcttggcttcctatctgtcctgcccatggaaactccagcattctgtgagccgtctccatagatccctgcatggatcccaggctcccctggctactattttgactttgctgcctattaccagctgacacctacacctgctctgtgcgagtcagtgctgctccctggcttctgctagggaaggtcttattacccccttgctcctggggagcccagttctgtacacgcacacctgatggttagcttccccttcggaggctggccagtacagagcttcccagtgatgcctgtagaccttctgcacactcattagtgccatggttgatggaatgccatcatgttctcctgagggacatgggccacgggtgggctttcctgtcattttgtatgtcgattatagtatgtctacttccctgagcctttcgatacctggatccactttgccacagcagtcccacaatctctgctttaatatgagccatcactttggctgaactttgaagagcctgccagcagtatctgagaatggcctctggaccccttctcagggtgttaaatgctgtgttatagtacatgccgtagtagagaagatctctcattcagcttaatattctgtccccctggatccagcaccttgaggtcctctcccaggtgcattccccagctctgtcagaactcgttagacacatcccgtagccggtgtcagccatggaggaggacagggcagattctggggagagcaagcagtatctcatgagattcccatttcatttgaggcctatgtgttatattcaagcaaggagtgtgtggggggcttctgtcgtacaacaaaaggggataggtcacttctgtaggcacagtgttaagaagaatttgaggactaaggttctcaaaggcatttacccagctatccccatcccaaatctcagaatcctgttccttccctgttagggcccagaccctgccacgggaactttatcaatcaaggccaataaagagaagttatggggagactgatttaggatcaatattaaaaaaaaaaacacttatatcttgtcagaagttgtttttagaagaattttctgtttagagccaactcccctaccccaccccctagacaaggtgcttgaggaggtggtgagcctgccagcgtggagctgtgtggttggcagtcaggcaagggtgtgtgagaggccacctggccataccgtcttctttcactaatcccagaactgatggagctgatggctggctggtcagatgtccccttgctctctcactgcttcaccgtggtcctctctcttgtagctgtgctcttggcttgctgggacagtgggtgtgggctgggcatggcattgccataggggcactgggtgttggccaggggacacccaggagacagggttccccagggcagatggggagcccattttgagaactgtccaggaggcatacataccgtatcctattcagatattagaacaaggattagagctgtactttttctttattgacaaaagttgttttcctactataaatatttcacagtgaaaaaaatctcaaatgagtaaagattcatccctataggaagaaagtagaatcgtgaatcctctttagagatctgtgagcctgagtttttgaagcatcatggccagattttggataacaccaaagaaaagcaagataatgatggtgatgtcgtgtcaccccagccacagggaggccagggagaattcctgtacaattctgtaaacataattccggggtacttttgtttcagcaaagcacttgacatatgaccccatcttagtcagtattttttattacccttttgagaacagagaataatatttgtggatgatacaaaactaggagggatagcaaatgaaattgaataaagctaattagatgaaattttttattgtagtaaaatatacataagatttattatcggccgggcccggtggctcatgcctgtaatcccagcactttgggaggctaaggcgggtggatcacgaggtcaggagttcaagaccagcctggccaagatggtgaaaccccgtctctactaaaaatacaaaaaaattagctgggtgtggtgacgggtgcccgtaatccgagctatttgggaggctgaggcagataactgcttgaacccaggaggcagaggttgcagtgagctgagatcgcaccactgcactccagcctaggtgacagagcgagactccatctcaaaaaaaagatttactgtcttaatcattttgaagtgtagagttcaatggcataaaatcaattcacattgttgtgcaaccatcagcactatccatctccagagcttcccaccagcccttactgaaaccatgttcctgttggacaatgcctctccatctccctcccacagcccctggcaaccaccgctttactttttgtctctatgatttgactactctaggtatcttatgtaagtggaatcatacaatatttgtccttttgtgactggcttatttcgcttagcacagtgccctcaaggttcttccatgtcgtagcatgtgtcagcatttccattgcttttaaggctgaataatatttcattgtatgtgtagatcacatttggtttattcatttatctgtcaatgaacatttgagttgtttcttgctttagttgattgtgaatcatgctgctatgaacatgggtgtacaaatgtcttttcaagcccctgcttttatttcttttgtatatatacccagaagtggaattactgaatcatatgctaattccatgtttaattttttgaggaaccaccatattgcttttcacaggagtatcattttacattcccatcagtaatgcacagggtttcaatatctccatatctttgccaacaattgtaattttcccttttttaaatagccatctaggctgggtgtggtggctcacgcctgtaatcctagcactttgggaggctgaggcaggaggatcaattgagctcaggagttcaagaccagcctaggcaacatagtgagaccccacccccgtcactattaaaagaaaaaagtagccatcctagtgggtgtgaagtggtatttcattacggttttgatttgcatttccctaataactattgatgttgaaaatcttttctcatgcttggcttattggccatctgtgtatctttagagaaatgtcaagtcatttgcccagtttttaattgggttgtttggtttttggttgttgagttctaggacttctttatatattttagatattaatcccttatcagatatgattggaaacattttctcccatactgtgggttttttcaccgtgttgattgtattctttggcgcacaaaagtgtttaattttggtgaagtccagatttgtttttcttttgttgcctgtgcttttggtgtgatagccaagaaatcattgataaatccaatatcatgaagcttttcctgtgttttcttctaagaattttatagttttaggtctcacatttatatatttgacccattttgagttaatctttgtaaatattgttaggtaaatggtctaaacttcattcttttgcctgtggatatccagttttcccagcaccatttgttgaaaagactgtcttttccccattgaatgctcatcatggcacccttgttgaaaataatctgaccatatacacaagggtctttcttgggctctctttttttctttctttcttttttttttgagatggagtctcactctgttacccaggctggagtgcagtggtatgatctcgactcactgcagcctctgcctcttgggttcaagcagctcccctgcctcagcctcccaagtagctgggactacaggtgtgcgccgccacacccggctaagttttgtattgttagtagagacggggtttcaccatgttggccaggatggtcttgatatactgacctcgtgatccacccgcctcggcctcccaaagtgctaggattacaggtgtgagccaccgcgcctggccttgggctctcttttccaatccattggtcagtgtctgtctttatatcacgctctttccatgactgtggtggtgtagtaagttttgaaatcaggaagtatgaaaatagttgaaatttattactgataaatgtaagcagtatctacatttggtttatatgagcagataggaagaggatggaaaggcctcagctaagggcaggtctgtggaaacattccaaaatgttcactgatgacaggctaaggatgagccagtacttggatgtgctgcttatttgttctgaaactgctctaattatcagaagggtcttaccagcactatagagattggggaagccaatacatacttttgcattcttccctccccacttccatcctcaccttatgaaatataaaacttcttggaataactatacatttccttatggagctgcccagcacacgcaattctgaagtttaggttgcccatctgactaagcccaagatgaacttgtatttgccaccgtgccctgagtgtgcttcagccagttactcttctgcctgtttcctgctccatccagtgagaaggctacattgcatagcaagcagcaggtagactgactcatgtcaccgtgtttacgttgcttggattcggaaatctccagagtgacctccttgcttggttcccagtcagagaggtcatctgtcagcaaagacagtttcccaacctttatactttttgtttccttctcttgcataattgcattagctgagacttctatatgatgttaaatcatagtgataagaggggacatctttgccttgttcctgatcttagggggaaggtatctaactttttgccattaagtatgatgttcgctttagggtgtttttttttaatactttaagttttagggtacatgtgcacaacgtgcaggtttgttacatatgtatacatgtgccatgttggtgtgctgcacccattaactcatcatttagcattaggtatatcttctaatgctatccctcccccctccccccaccccacaacagtccccggtgtgtgatgttccctttcctgtgtccatgtgttgtcattgttcaattcccacctatgagtgagaacatgcggtgtttgtttttttgtccttgcgatagtttgttgagaatgatggtttccagtttcataaatagatgtttttaattagttcaggaagtctctattcctggtttgctgagagcttttgtcatgaatgggtgttagatttgtcaaatgctttttctacatctattgctacaatcatatgatttttctttagccagttgatgtgatggattacaacgatatatttttttttgagacagagtttttgttctgtcacctaggctggaaagcagtggcacgatcttgcctcagcctcctgagtagctgggattacaggcacctgccaccacgcccagctaatttttttttttttttttgtatttttagtgtaaacggggttttgccatgttggccaggctggtctcaaactcctgacctcaggtgatccacctaccttggcctctcaaagtgctgggattacaggtgtgagctaccatgaccagcctaattttcttatttttagtagagatggggtttcaccatgttggccacactagtcttgaactcctgacctcaggtgatccacccatcttggcttctctaaatgctgggattataggcatgagtcactgcccccgctacgattgatatttgaacattgaattagccttgcacacctgggataaatcctgcctggtcgtggtgtataattattaatacattattggattcaatttgctgattttttgtttaaaagttttggccaggcatggtggctcatgcctgtaatcccagcactttgggaggccaaggcaggaggatcacttgagcctaggagtttgagactagcctaggcaatgtggcgaaaccctgtctgttaaaaaaaaaaaaaagaaagaaagaaagaaaaaacaaaaaatacaggctgggtgcggtggctcatgcctgtattcccagcacttttgaaggccgaggcgggcggattgattgagctcaggagttcgagaccagcctgggcaacatggcaaaaccccgtctgtctctacaaaaaatacaaaaattagctgggcctggtggcatgtgcgtgtagtctcatctactagtgggaggatcgcttcagcctgggaggttgaggctgcagtgagctgtgattgtgccactgcactccagcctgggcaacagagcaagaccctgtctcaaaaatgtgtatgtgtgtatatatatatatttattttagtggttgccttagggtttgcaatatacattcacaactaatcaaaatccactttcaaataatgctgtgctgcttcacaggtagtgcaaataccttgtaaccaagtattcccagttcactcctcccactgcttataacattgctgtcatttatttcatttatccttaggctacagtcacccaatacacaaattttattttgaacaaattgttaatgtgttagagcaattaaaataagaaaaataaaagattaattttacctacatttatttcttctctgatgcttttccccttctttacatagatcagagtttctgaccaaatcattttcattctctctgaagaagttcttttaacttttcttgaaatgttaaatccctgagtttttgtttttctgataaaaatctttatttctctttcacttttgaaggataatttcactggatacagaatcaaatagttccctcctctctcttcttgcttggatggttcctgaagagaaatccagtgtcattcttgttcttgccattttataggtaggatgtttttttcctgtggaaaaaattcccagatttctgcaaagagagaatcttcctttctaattttctttttgtctttgatttctgcagtttgatgtgatttgcctcagtgtaaattacctgctttttaccgtttcatgttctctgaccttattggatctgtggatgggtgtctgacattagtttggggaacttctcagctctcattactccaaatagttattgtgttcttttctttctcttgatatcctcattgcacatatgttacactttttgtaactgtcccacagttcttgcatattctgttttctttctttcgttcttttttccctttgcttttcatgtttggaagtttctgttgacgtattcttaagctcagagagtctctccttggctgtgtccagcctcttgagcttgttgaaggcagtccccattgctgttacaggacttttgctttctggcatttcctactgattgttgcttagggtttccatctctgcttatgctgcctatctgttcttacatgatgtctactttttccgttagagccattaccatattaatcgtagttgttttaaattcccaatctggtagttccaaaatctccactatgtctgagtctggttctgatatgaggaacttaggcgtcaggttaataggccttagtgtgaggtatgtttggctggctgggagttgggctgtgtttactgtttgctgcccttgtgatgctgggggataaaaatctcctgtgtatccttgtttttgtcttccattgtttttgggttttcttcaagattccttcttaaatagagtctgaggcctgcagttcttataggtgtgcatccctgttattacacaggggtcctgttgatgtggctttcaggggagaggaagtgttctgtagtcctgggattaggtctcagtgttttagtgaacctgtgtccctgggccgtggccttcacatgtgcttctcagttttgtttttttcctcccccttaggagagacataaacgatagaggaggcaggaattgggtgtttccttacccctaggtggttaggctctggtaaaatagttttccttgaggaaagccctttgttaaggataacagaatgctctggtcatgcctttttctttctttctttctttttttttttttttttttgagatgacctctgagccctttatatgttggttgggaaactggagtgcagtggcaccatcatgactcactgcagcctcaacctcctgggctcaaatgatcctcccatctcagcctcctgagtagctggcaccacaggcacactgccgtgcccaactattttgttgttgttgttgctgttgttgttcttgttgtagagatagggtctcaccatgtttcccaggctggtctcaaactcctggcctcaagcaaacctgccgccttggccatccaaagtcctgggattatgggcatgagccaccacacctggcctggttatacttttaaatgatgtattcttccctcctcctaccagagtatgaggagatgtttctccagtctcaccctgagagcctggtggggctcatggaggtaaaactcagactggtatggggacctccccagtgactattcccctggagtttttgtctcctactggtccatgctcagtctctgccatttgtcagttcccctttcctctctgctggtgctggctctagggtttctgccccgcaatgagctgtgattcttagcattgcatatctgtctctccatctttggggttattgttttttcatgtgacctcaattatctgatggatctgagaacagtcattgattttaagtttgccagctttcttgttgtgaggatgggagtgatgacttctgagcctttacaagctggacaggaaattggaaagtcccatttcattcttttttaatagagaacttaactgtgtgaggtaatgaacaactgagaaatgttgagtgcaagaagcctgttcttgggaagaatcagcaacccattttaaaaaacagaaacattgaaaatgttatggtggttggtaagatgcaggcaggagcacagcaggtacagtgctgctgcccacagccttctacacctgaggccctgcattatggaggtttgctaagccaagtgcctcatggccatgtgtgaccaaaaaaacctttttactaaatgttttgtgctgctataacagataccacagactgggaaatttataatgaatagatatttctaggctgtgcatggtgcctcacacctgtaatcccagcactttgggaagctgcggtgagcagattgcttaagtccaagagttcgagaccagcctgggctacatggcaaaaccctgtctctacaaaaattagccaggcgtggtgacacacacctgtagtaccagctactcaggaggctaaggtgggacaattgctttgagcctgggaggcagaggttgcagtgagccaagatcacgcctctgcaccccagcctgtgtgatagagtgagaccctgtctcaaaaaaaaaaaaaaaatcgtatcgttctggaggctaggaggtttaaggttgaagggcacagctggtgaggggctgcatctgcatcttatgttatcccagggcgaaaggtggaagggcaggagagggaagggggtcaaattcatcctttcatcaggaacctgctcctgagataacaaaccctctcccaggataacagcattaatgtgctcacaagggcagagctctcgtggcctaatcagctcttttctttcttttttttttttgagatggagttttgctcttgttgcccaggctggagtataatggcgcagtcttggctcaccacaacctccgcctcccgggttcaagcaattatcctgcctcagcctcctgagtagctgagattacaggcatgcaccaccacgtccagctaattttgtatttttagtagagacggggtttctccatgttggtcaggctggtttcgaactcccaacctcaggtgatctgcccaccttagcctcccaaagtgctgggattacaggcgtgagccaccgcacctggcctaatcacctcttaaaggccccacccttaacactgttgcatgtggggactaagtttccagcacatgctttttgggggacacattgaaaccatagcacttcatttctctatttatgctcatttctcagctatgttgacctttgcaattgaggaagtttattttttagtgaagttgtgcatgatgccattgttttcagtttccccagcagtgacgagaaaaccctgaccatccctgttttagaatacagattctaccaaaactagtagttttggtactagtagtttgggatactcattgcaggacttttgatgatgaccttcactgtagaatagtaggagatggggcagcactgtcctcagccagtagagatttctgtaagaacccaggactctcttcctagagttgggcctccacgcgagccggaatggagacccatgggcctggtggcctgagtatgaagcacttggtttgtgctctcggtggtagtgatggtggtgttggctcagctcccatttctcatggcatttttttcttcactttctttcagtatttaggtcagttaacgtccataccaggatacctgaatccctccagtaggactgaaatcctgcatttcatagacaatgcaaaggtaaccctatcctcttaaccctgtgcactagccctcagcccccaccagcccttggtccctgtactcttggcctcgtggctgtgaggaatgagccagtcccatcacattatgggtacacttggctcttggccataaagactattccttagtatggacattaagttgattctcgacacttgctccatgtgattttgggctgtttccaaaatttacactttcaagatatttcaaaccatgtgccgtaagtctgaatctgaaggcagttccagaagaatctcccaaatggtttgaacacattggtgtccctggaataagcactgttctgaggggaataacactgaccttattcactcagcatttgtcacatgtgtgacatcggccagcacaatattctcaggagaagcgccccatgccggttgacagctgagtctgtatttctgatgccctgtggttccttccagagagcccaccagcttccgggacacttgactcaggagcacgatgctgtgctcagcctgtctgcgtacaacgtcaagctggcctggagggacggggaggatatcatcctcagggtgcccatccatgacatcgccgccgtctcctatgttcgggatgacgctgcacacctggtggtcctgaagacaggtacaggaggtcaggggtcaggagggtccttgtcctaaggagtacatgtgtgaattttatgaagttctggagacagtttttgcagcttcgtgttgggtgctgctgtttgtcacgaccaataattgtctttcctgtctctgagatcagccagaagagggcttgagatcagttaccagacactgggggtgactgtcacactaagagcctttggggactcaataatactgggatacagtatttaggactggtatcctgttcctctgcccggtggggctcctattgactccctctgggtacagtggagttgcccctctgcccaggtgtggtggagcctagagagagtgcagtggatagggacctcacctcagcttgactgatattttgagctctgcacagtgtcctcaaacctgggacagaaaagatgagacccagacctcccaggagctcttggtcatagaggttactctctgtgtgtccttgccgtctgctgctttcacaatgggatagaattgggcagaattgggcagaattgggcagaatgttatttttggctgtggtgagtacagtgctgcctcactggacccaagcccaagctgcccgttaatttccagcagcttccagcccaggcattcaggccactgaggatgaggggagagaccatggttcgccctacctgtattttgcccctcccagtcctgagtttcgaggctggtgttgcagtggggacagtatcctgggctccttggatctctgctggtgactgggttgatcccaaagcctttcatttccagagggccagtggcagggtgtgaaggggtcacagtgggtctgcctagaccacacactgtgttttaggtagcagagaggggaatttgttgttccacttaaggtcagtagttcattgagaatctggcgagtgtgttcattattgaccccttgagccatgaagctgccagcttgagtgcgctcttgagagcagtccactgaaagcctgtgagtctagatgcttggggttgctgtggtcataaactacacagggaacactggcggggtttatgaaggtggctgttgctctgttttgttctctgtgtagcagtagcttagacttgcgtacaccctccccaacgcaggcacacaccacacctacacacatgtacattactcaccctatctggcttagaaggctgggttggtggctccttccagccatactatccgacaccatggtgaccctcctgtttttctacctttggaccctgcgggaggccttaggcctgggacatccttagggacaaggagtgaggagactggtttctgactcgcttcttgcaggtgtttcaagctggtagggaggggagataggctcctccctttatttcttctgctgcatgacagtttctcagctttaattattagaacacattgctaaaggaaatggatgacagattttttttaatggagagagaatgagcgccataggagaaactttccaaaattagatgaaaaacaggacttctggtctttgagagaacttttgatttaaaggaagagagtgaatccctgtgtcctgggggccatcttccttgtttttgtggatgcaccggagcagttgtgtgtcccctgtgttacataaggtgtgctgtgtttattttttaatttttaaaatattttaaaaatttttgtaaggatgaagtctctctatgttgcccacgctggtcttgaactcctggcctcaagcgatcctcctgccttagcctcccaaagtgttgggactatgggcatgagccactgcactgggccgccatgctgtatttaggattaggcatccagagttctcagcataagagactagcaggtgaatagctaacgtttacttggtgcctgctatgtgcaagcaagtctctgtgcctctttggaccaaaagtacgctggtatttgggatagcacaggagtggggaagttgggggccaggtctagctgcaatagggtccatgtggcaggagctgcttggagggtgatgacttgagttggtgccagatggggcagggtcacccgtgcacccgtggtagcacttcctggatgatataggagaggcacacaactcgctgcccgcatccttaggctgcccaccctgcttccttgagaactaccacaggcacacaccagggagccaacatttaaaaatgtttaaaaggtagagatttcttaccaaactcataccaaaaaaagaaaaaaagtaaagggaaaccagtaaatttttttttttttttttgagacggagtctcgctgtgttgcccaggctggagtgtagtgccgtgatctcagctcactgcaagctctgcctcccaggttcacgccattctcctgcctcagcctcctgagtagctgggactacaggctcctgccaccacgcctggctaattttttgtatttttagtagagatagtatttcaccgtgttagccaggatgatcttgatctcctgaccttgtgatccgccaccttggcctcccaaagtgctgggattacaggcatgagccactgtgcccgcctttttttttttttgagacaagtttggtgcttgttgcccaggctagagtgcaatggtgtggtcttggttcactgcaatctccgccccccgagtagctgggattacaggcatgagccaccacgcccagctaatttttttgtatttttagtagagatggggtttcaccatgttggccaggctggtcttgaactcctgacctcaggtgatccacccgccttggcctcccaatgtgctgggattacagccatgagccactgcgcctggccaattattttcaataatatattttatttacccctccgtacccaaaacattattacatcagtatataatcaatataaaaatcgttgagctacatagcattctttctttgcctacctctgaaaccctgtgtatagtttgcactcacacatttcaatgtgggctcatcacattttgcatactcagtagtcctgtggccagtggctgccatagggacagagcagccccaggagtctcactgtggggtttgaggtacagtttcttatggagcccttgtctctgtgcatgcgctaactttgcatgtggcctgggacggccttcttctccctcctgaggctggcctgccctctgacaccctggcactagtggcacttctaggttttgttttcagtcttgaagtcctcccagggtggtccgaactgatggtgagagccctgcttcctggggattggcctcacttctgccatcaggaaaaccactgagttactccatgtatttcaggagaacctcatttgtctagggaggcaatgggtaggatgttagaaacaagggcactggggtctgaccgtctagattgccatgtggacagtgcaactcacacgccctcaggccaggcctttcactttcccatgcctcagtttacccatctgtaagaagggaactccccagaacacatggaaacctcctggaggtgactgttctcagggttgtatatgtggtctgttgtatatgaacttgaagcgtgtgaaactgcaggatgacatgcagctctggtgcccttggagctcaggggtcgcgtgttcccacccttatttagagaagcgaagtgtgtctggtgcaggcccttcacctgagtcgttctgtgggtgcctgagccaggtaaaggtcctctcagcctgtttccatggcggcctcagctgtttcctcaagtgcccccatgcctgcccttccactgtgctaaactgagatggtgttgacttctcagcccaggacccagggatctcccccagccagagtctgtgtgcggaaagttccagaggcctcagtgcaggctccctgtcggagagtgcagttgggcccgtggaggcatgctgcctggtcatcctggctgcagagagcaaggtgagactttctcgccccacttactcagaactggctcctcccagaccctgctcatggccagccccaccctggccacacccagcacagtgctgggcactgctgggtgccccagctacttcctctgccattgcctgtccctgcctcaccctagtctccacccagccccacctctctctgctcaaccctgccccaggcattgcccccatcctggccctgcccacagctcctctgcgcatgactgcatcccaggtcctgccccaggcccaggctccccaccggttcccacccctgtgccttctgaccctcctacctccaacccccagcaacttctctgagaccacctggccactgagctttttgcttatcattcttcaaggtgcccccacgctgatgggcgggcagcggcggtcacctgtgcatcctagacctgcctggtgttaaggactgtgcttgcagattcctcacaacctggaagagccaagggctgggcccttgtaggctaggatttggggccccctcagccacccaatagctgtggggccttggcagtcacttaacacctttgtttaatttccatatctgtaaaatggatgctagtgaccacccaccttaaatatcctctaatgagcatttctcagtgttggtgctactgtcatttttagccggataattttccattgtgggaggctgccctgtgcactgtagggtgttgagcagcatcccagcttctccccttgtgacagctgaaaatgtctccagatattgctacatgtcccctgggaggggtacaaaaattgccccagttgagagcctctgctttagacagcacactgttataaaactgttttatagctgttagaaatgcctccaggtgggctgtgatactgatggtatctcctctcacctctttcctgggctgggatagggttgtgagggtgttgataggtcaggttaatggaaagaagacgttggactggcagctaacacttgtgccctgcacagtcccctcacacttgcaataccacccctgggccacatggcagtcctagatagagtcctggggcagttggctgggtctctcttttgacacccctttgggtcagtgaaaggcagagggacacattctggtatccactcttcattcatgtttattgagcatctgggctgccccaggtatcctggaagccgcctgggaaggcgcagtctccagccagactgaccgagcagctgctgtcccccactgcaggtcgctgcggaggagctttgctgtctgctaggccaggtcttccaggttgtttacacggagtccaccatcgactttctggacagagcgatatttgatggggcctctaccccgacccaccacctgtccctgcacagcggtatgttgagtgagagtgggcagcgggtgggagcagggacaggaggggctactgcagtggcccccagctccccatgagttactcctggaatagcgcagttactgccgtgacatggtggccttttgtttccagactttgctgttcacattagcccatagggtttcatgaaggcagaagtgtcacctgtccttgagagagttgcaccaggtcagcgctatggcttcctggaataaatttggggtctgtgaacacttttttggaaccacttgtggctaaagtcacttcacttaactcggaacaaagagcttggagaaggctcctagcactggggcctgtgatggaattggggaggctgagagtgggtctggggagcctccttttcagtatgcccagactatggctgctcttaatgtgaaactccttccaggaccatggccagacccatgggaagctgctcaggctgccctgggaggccagctggcagtggtggagcagtggcagatggggaagaatggaaggtaccccagagctgtctcttcctgcatggcccacacagcattttcaggagtctgttagtccattgaaaacacttcatcagcaagctcacttgagttaagtcttcaaaaacatcatctgtttttcagatgtattacttattgaggattaatgggttatataaattgaggtgcataaaaagctgttggaggctgggtgtggtggctcatgcctgtaatcccagcactttgggaggctgaggcgggcggatcacctgaggtcgggagttcaagaccagcctgaccaacatggagaaaccctgtctctactaaaaaataccaagaaaaaaaaaaaggctgttggaaacagtgcggcttgttgagtacaatttcttctttttacggagataagtcccagccctctgccctttccccagtaactcgcacatctcagtgaagagagtaaatggtggagaagcctgtgctggtgtgagggctgctcctcagtgcctccttcttccctttcttgctgctggtgccagagccctttgtgggcactacacgccttgtgttggcccagcagctgcagagagacagctgctgagctctcaggcatcctctctatctcatttagtcctcggtggcccagcgagataggtgcaatcttcatccccattttagagatggggaagtggaggcttagaagtcaacagcttatccagaggaatgtaccatatgagtagcagatgatttatcgagctgtaattaaacattcagttttagtgcgactggtttggcccttgtgctttaaaattcccaaagggcctttttttctttaataattttttttttactgagaagtacacaagtcatacatgtacagttgaatgaattttcataaagtaaacacatcatgtaacaccactactgggggttgctgaagtgggcttcttcccctgccagcctttcccaagacctccccgtgggatccacacacagatgtgcacacgttacgcacatgcatgcattctctgcttatttctgccttggagttttgcttgctgtgttctctctactacagctatgccaaaacatagcagcataaacagcagaaatatattctcttataattctatacgttaagagtccattgtgggtcccactgggctaaagttgaggtgtccacagggctggttccttctggaggctccagagaagaagccatttccttgtctttccagctcctaaaggcggctgcatgccttggctcatggcccttcctctgtcttcacagccagccacgtgacctcttccacagtcacatcttcctttgactgtcagcttcctctgcatttcaggactcttgcaatcacattgagcccacccaaattctccagggtcatctccctatttcaaggtcagctgataagcatcctttactcccctttgaaattggtaacatattcaccaattccagggattaggatgtggacgtctttggggggtcattattctgccctccatacttaccttgttcctagtgccagaaatgtcccttttatctctcagcctctccctctgcttcatttaaaatcttaccctctctgcaacactcacctgcctcgctcacaaagctttcactcactgtctgtgctggtgtgaaatgtgccttcctcaggtttgaaatagcaaattacagtctgtgtcacacggacctaatgtcatttgttgaatgtagctgctcagtgccagaccctttgctggtctgagggtcttgggaatcctgtggcttcactgggttcagatggggagtcagactgcccggctctgactgtggtttctgctgtgtgacctgggccaagttgtgtaactctctgacttacttcctaatctacaagtgaagacaggggtgatatatgcctgggttaaaggagacaaagccccagtaaccctgcctggcacatgagtgatacctcaaagacagcttttgctggctctggccatgggtgaatgtggacttcagcccagcgtgcagcaggatttgcatttgccaggatccccaggaggggtgtatgtgggctcaagtctgggaagccctgccctgaggcacacagcacattccagagtgcgggcagcttgatgaaggacagcagggtccctgaagaccagggctgccgctgtctcctgtaaatacagcagtgggctggactcaaaatgcctccccactatgtccctgaaagtcatcttagttttctgcatcttccttacagatgactcttctacaaaagtggacattaaggagacctacgaggtggaagccagcactttgtgagtgcacatgccaccaagccctgcggtgggacacgcaccaaatgcgttgtctggtgttgtccaggctgcagccagtcagctcccccatctcagctcaccctcgctaagccatccccagacccactgtacccagcttagtgaatggctgaggcctggctcgccgccctctcctcgtagacttctagagcccttgctgtccctcttgtctctccctgcctaccttcccatggcctcccaagagtgagcttgtaataggcatgttggatggagctgttcccctgcccgagcctgccgaggcgctggccttccagcccatctctgccaccacctggggctctgtagtagttcacccactcgcgctctccattcctgccacctccccaaccctggctccttcccctgcccaacaatgctgcccactgccttgacctgtgtactccctctcttcactcagagcccaactcagagccatgcccccggggagccccaggaccaggccaagctgaccaccctgcacgcccagtcagctctcctctcatcatcatcatcatcacttacattcctctgttcaaggacagggacccacacacacggcatggactaggtttcctgaaacgtgtgtgggatggagggtcggggaagccacccgctcacataccacattctttcgcagctgcttccctgaatctgtggatgtgggtggtgcatcaccccacagcaagaccatcagtgagagcgagctgagcgccagcgccactgagctgctgcaggactacatgctgacggtaggcctccgctgcagggacgctgggctgcatgagggagggggtgccccagggaggatggggggaaggggaggaggaggaggagcagtgcagggcaggctgcagtgagtgaggtcacctagagcactcttggtcaattttgctgacatcactgccttttcctggggatagtctaggagagcatcagtcagtggggctgagttgggagtgctgtggccgtcagggctggactgtgggcctgtgcttgggtcctgggggaggggagggaacggtggcccctgcaaggccacatggccagacatttttatcctccccatcttatatagttctgtcattgcaaactcaagtcttcctgatttgcctgtgtgcctgtgtgtagcctaagggcacaggcattggccccgggccaggttgccaacttccaccctgccctgctggctcctgtccctcccatgcactctgtgttccagctcaggagagtggagctgcccgggtgccttggtctcctctgggtggccccgtgccaggtctggtaggatggggacacattgtggtcattctgatgccccagcctgtgcagaggtgaagccagagacagctggtgctctggctggggttagtggctgtggcaaggtgggcccgactgccgactcttgcctactgtgcccagccccctatctggctctgctctcttgcagctgcgcaccaagctgtcatcacaggagatccagcagtttgcagcactgctgcacgagtaccgcaatggggcctctatccacgagttctgcatcaacctgcggcagctctacggggacagccgcaagttcctgctgcttggtgagtgggccctggaaagagggtggcttgtccaaacctggcttggagaggctgatccctcctgggaatgtgcacacggacccctcagtgggtgcagcaggggctccatcagggatgggagatttgaaccagagatggcatgagagcagagtccagagatcggggaatctgctgtgattagtcagaagggcttttcccaggtactgttgggggcccaccgacaggccttcattctcctgggaactcaagctgagctgggtgggccctgccaggaagtagcagagatcccccaggagcagggctgggagtgaacacaaccctgagatttaggaaaacagtgctggaggagccagagaggcatgggttttggtgaatgtgtaggacttcaaggcggaaggaccagcgtttgccaagacccctaaaatgctcggcacattaggtcagtgcggctagagggctgtgtggtctgagcagcagagttggatgttggccccacacctctcaggggcggtgacttagctgtggtttccctctgccgacacttagaacacagcaagtttgcggtaatgtgttgctagtagccagttgaaggcttctgggtcctggcctgttttccctgcaaaccaaggaaggtgggtttgttaaccatcgtaccgacctggcagtggcaaacgtggattgcctgcccagggctccccgctcttaggagcgtgaagggctggaggctggggcagcctgtctgtacaataggttctgtctaagcagtgcctgccccttctgtgctgggccctgcgttgcctcctggcatgggactctgtctgcccctccacatcggggagtagagattctgagagacacactaggcttcccaaataagagggcagccctctgagttgggacagtcacctaggtcatggcagggaaactggactttggcatgaggcctgcctctgaggactgcacccttgttgccgggtgccagcaggtggctttgagcactgctctgggcctcagctttccccactgtaaaatggggactttgtgaggactaatagagaatgagaggaggccacaggttcttggcctgtgctggtgccttgaggccagggagtgtgcatgtggcagaggcagtaagctgtcagggccagcagcagtgtctgtcaagagttgaggttttagccaaactgtctggccccaggaagcatgatttcaaccaggatgctagatgcagtgagcatggcatcagggtccccaaggccatgcaccaggggcagctgtggccctgtcagggggctttgagccctgagagaagagctgagtgggctgagccgaactggaggtgccatgctgggtgttgtgtgtctgcaggtctgaggcccttcatccctgagaaggacagccagcacttcgagaacttcctggagaccattggcgtgaaggatggccgcggcatcatcactgacagctttggcaggcaccggcgggccctgagcaccacatccagttccaccaccaatgggaacagggccacgggcagctctgatgaccggtcggcaccctcagagggggatgagtgggaccgcatgatctcggacatcagcagcgacattgaggcgctgggctgcagcatggaccaggactcagcatgatggacagtggatgggggggcacccacaccttccgcgcagtcgtcataggccttcccagaaggagctgcccagacctgcgtgtcagcccttggtggtggccagggagaggcgcccggtgcagatggccccgggcggcccaggtcctctactgtgaaggagcagggagctgccgagggacacgagcctcagtgcggggtggaaggctctttgccttgtccaccagggctcagccaagccctgcagtgtgtccccgctcggggagggcccggccgagcgggcagggagagccagtcctgtcggctgggcccttggacggctgtcagttttgcacatgatgttcctattgtaactctcagagaccttaaaaagaagtttactgcaatgtgaataatttaatctctggttgccaagcatgtttctgatccagttgggtgaaagccatcggtgccaggaggggtgtccgctctagcctctgtccctgggtccccatctgccctgcagcacctgggactcggcagtggtccctgggggctggggtggaggaggcaacaggctcttgtgccacaggaaggacttgatttggacttgagcagtgtggatgtggggcaggagcgggtgttctgaggcctttcgtgggcagcgtgtgtgagggtagcgtgtgtggcatgtgttgggggcaccttgatctttacatcctgtgcactgaatccttcaaggtcactggctgtgccccgcaccccccctccccccaaccccatgctgcaggttttttcctcaagcagcctgcactaccccgtggaacagaaatgctctctgagatctcgtcaccttggagcctgggggctgggtcttcagaggccagtgtgcaactctgccgaccctccctgtgccgtcattgtgggcctgtctccatccttgtcccgtgagctcttctccccaaaccctgttggccttggtcttgcctataccctttgggcccttacaaagcttccttggatatgggaaggggagaagaggtgacctgggtcaggttgtccggagcctctccctccaccggagagcagccacaaccctgcggagacccccaaggggacagacatctaggaaggagactggctgtcacatctccctcctgcccaggctgggggcctagccttgctggatggaggggctgcatgtcaggccccagggattctctggcccaggcttggggaagcagggagagcctctggggctccatggacaccctgattgtgtccaggccaagccagaggatctggagtatctcaggcaccttcctgaataaggtagacgggtttgtatggtatcacagcttctgaacaggaaggggcctggtcggtgtttttttgtttgttttgttttgtttttctcaagacagagtctcactctgttgcccaggttggagtgcagtggtgcggttttggctcactgcaacctacacctcctgggttcaagcgattctcctgtctcagcctcccgagtagctgggactacaggcgcctgccaccacgcccagctaatttttgtatttttagcagagacggggtttcaccatattggccaggctggtctcaaactcctgactttgtgatccgcctgcctcccaaagtgttgggattacaggcgtgagccaccgcggccggcccggtcagtgttttatgggcgagtttttccactgtactgggctgttgtagagctgcttactcatgggaccccaggccagggcaggcagcaggctctttactgttgacactgtctcttaagtttacatgaaaatggacatgccctggaagcatcaggagaggctgaggacaaaccacacagtctcctgggctcttgccccctaccagagcccaccctgtgccagaaggttcagtgtcccccttccatccctctggttgaacatggccttgcatgggccttctgtgtggagtgtcaaaggaaccacatgcttgcccctccagggtccatcccaggtgtggcccccgtgctgcagtcgctggtctttgctagcagaaagagtagaggacatggagcagatgaagggacaccagagggtaatgaggggacaccagagagtaatgaagggacatcagagggtggtgacaggacaccagagggcagtgaggggacaccagggagtaatgggacatcagggagtgatgggacatcagaaggtgatgaggggacaccagagggtggtgaggggacaccagagagtagtgaggggacaccagagagtaatgaggggacactagaaggtgaggggacaccagagggcggtgaagggacaccagagagtaatgaggggcacgagagggtggtgaggggacatcagagggtgatgggacaccagagggcgatgaggggacaccggagagtattgaggggacaccagagggcagtgaagggacgccagagagtactgaggggacaccagagggtggtgaggggacaccagagagtaatggggacaccagaaggtgaggggacgccagagggcagtgaagggacaccggagagtattgggacaccagagggcagtgaggggacaccagagggcgatgaggggacaccagagagtaatgaggggacatcagagagtaatgaggggacatcaaggcggtgaggggacaccagagagtaatgggacatcagaaggcggtgaggggacatcagtaatgaggggacgtcagaaggcggtgaggggacaccagagagtaatgggacatcagaaagcggtgaggggacaccagagagtaatgggacatcagaaggtggtgaggggacatcagaaggcggtgaggggacatcagaaggcggtgaggggacaccagagagtaatgggatatcagaaggcggtgaggggacatcagaaggcggtgaggggacatcagagagtaatgaggggacatcagaaggcggtgaggggacaccagagagtaatgaggggacatcagaaggcagtgaggggacatcagagagtaatgagggcacatcagaaggtggtgagatatcagaaggcggtgaggggacaccagagagtaatgaggggacatcagaaggcggtgaggggacaccagagagtgaggggacatcagaaggcagtgaggggacatcagaaggcggtgaggggacatcagagagtaatgggacatcagaaggcggtgaggggacatcagagagtaatgggacatcagaaggtggtgaggggacatcagaaggtggtgaggggacatcagaaggcggtgaggggacaccagagagtaatgaggggacatcagaaggtggtgaggggacatcagaaggcggtgaggggacatcagaaggcggtgaggggacaccagagagtaatgaggggacatcagagagtaatgaggggacatcagaaggcggtgaggagacatcagaaggcagtgaggggacaccagagagtaatgaggggacatcagaaggtggtgaggggacaccagagagtaatggggacatcagaaggcggtgaggggacaccagagagtaatgaggagacatcagaaggcggtgaggggacatcggagagtaatgaggggacatcagaaggcggtgaggggacaccagagagtaatgaggggacatcagaaggcggtgaggggacatcagaaggtggtgaggggacaccagagagtaatgaggggacatcagaaggcggtgaggggacatcagtaatgaggtgacatcagaaggtgaggggacatcagaaggcggtgaggggacaccagagagtattgagacaccagagggtggtgaggggacaccagagagtattgcggggacaccagagggcagtgaggggacaccagagagtaatgaggggacaccagagagtattgggacatcagagagtattgggacaccagagagcaggggacaccagagggtggtgaaggtacaccggggagtattgaggggacaccagagggcggtgaggggacaccagagagtaatgaggggacaccaaagggcagtgaggggacactggtgagtattgaggtgacaccagagagtaatgaggggacatcagagggtggtgaggggacaccagagggaagtgaggggacacagggtgatgaagggacacaagagggtgatgaggggacaccagagggaagtgaggggacacaagagggtgatgaagggacaccagagggtgatgagggggcaccagagggcagtgaggggacaccacagagtaatgagtggacaccacagggcagtaaggggacaccagatggtggtgaagggacaccagagggaagtgaagggatgccagatggtgatgatgggactccagagggcgaggaggagacaccagagggcaatgaagggacaccgatttattgagtagcagagctgagggaaggcgtaggatggctccagcttccggtcagtggctacatggtcagttcctgcagaaagagatggtcatgttgggggaagcaccccgcagtggagccaacatcaggacctctcgaggcccttggggacagctcaggggtagggaaaggggccagtgctcactcaccatgatggcgttgacgatgtcactgtggttgtctctcagagcccgcacggccttggccctggacacattggcctgcgccatcaccagctcaatgtcacgcagttccagccccgcctcgtccacctggagttgggggagcagggaagtggctggagctgcttgaggtccctggggcagagcccccatgtagcgcctcccaccaccccctgcgaggccctggagcccctgcacttcacctcttcctcctcctcctcttcctcttccttgcactccagcctcacccggggcctgggtgctgactcagggaccaaggctgagggctctgagggcaccttaaacttctcagctgcggctttgtgcacttgctgggacaggtcctcaatctgcaaaatggaagacagctgtgtcagtagagcctgtcccccccttgtcccctatccctcggatcccccattccaccacagccgccacccagaccttggcctcgccaaagaccacataagtgtctgaggctgggctcttgaagacatcaggcttggcgatgacaaagaggatgttcttggacttctggatggtgatcctggtgactccctgaatctgccgcaagcccagctttgacattgcctgggagtagagggcagaggggggctcagacctggtgttgacccacgtcgggggaggagagcagcacagtgcccaggaaggcaaagtctccaccgccaacttccccaagaccttgggctggtggttggtccttccccatgagcctcagtctataagggccttctcatgacattccagcctcagctgtttaggggaaggtgtgtgggttactggcatggacccaaaggtcccctgatggatgggatttcattagccatggagtgtgagggtcttggtaaggacgttccccacacagatggtcccaggcctgaggtcccagagggagccaccagcccacctttcgggccttcttctcactgcgactctgcttggctttggcgatggtctcctcactgccgcctgctggggcctgagaaaaggtgagggctgagcatccatgggtggggtgtggggccctcccagaggcccaccctcttccctggactgggcacctgggctggacactgcacggtctgaggagccaagatgtcctgctcgtccagctcggctgatgactccccgtggctatccgaatgctggcccgagcccagggcccgaggcgagtctggggaaggggagaggtgtgaggatggccttttgcttctaggtggcggggaagggggttcaggaccctggccctgctgccacatcagggccagaggaagcagtgccagctctccatggtggctgtggggtctgggccccccacctcgccacctcagaggccctccagctcaggacagctctaaggaggagtccagttgacccaagccccagggcacttcactcccaccctctgccttaccttcctccaggctgtcctcatcctcttgctgctcgggggctgagagcccttgagggccagctgggctctggggcccagagggaggaggcacttggcaaggcggcaagatctgcaaggccaggtctttggcatccatggaggccaccttggggctgaggagtggggagtgaggcgagaggctgactcgcggcccagtccccagaggctgtgtggttcctgagacagcagcagcggcaggctggactcctgcctggggcggtgggaggcccagagagcctgggggctcctcgtcttccacagagtcttcctgggggtcctggcacaggcagggggctgggggctccagtgggggtagggctgccccagcaagggtaccaggagcagaagggtcagggcccaggggcctgtccacgggcgtgctgggctgacccttggcaaggttttctgggggctgcagcaagggggtgccaaggacactgggtacttcgtggggttgctcaacactgcccagacccagtacaggctccggctgctgggaggttggtgcagacgtgggggcaggcgcgtcagggcagcctctgtccagactggacacagcccctactgaagactctgggcaggagtccagactggcctctgtggccacagctgagggaagcgtgggctccggggtggacttgccactcaggcctctttcctccctggctgggctcaggagccgggcctggctgacctcagggcaggcagcaggaggcgcatcggggacctcccttgcacctccaagtgctgacctgggtccatgttcctgtgccagtggcttcaggcctccttcctgctggttctcaacctccagggtctccttttggggtgagtcaggcttagccccatcacctgtgtgcgctcgcgcttccagacatgcttcccgtccaggcctagaaagggcttctgctatttcctccccagcaccagaggccggctcagggagactgagggcctccatgcccaaagtggaatccgcatcttcctgtgcggcccaaggtgtcccagcttctgcagctggctgtgggtcatcctgttggacctggtccaaggctgcaggctccgggactgtagggagggctgcattcttctcctcaggtgctggcctggggcctaaggcctcacctacttcctgctgagccatggtggccacaggctctgtccctggggcacagcctgcttctgcctgcaaggtttgaggggtggccacagccagaggctctggacctgaggtggggcctgtgtcttgcagaggcagaggtgctgtcatagcggagtcctggggtaaggtgaggccctcttcagcctgctgggacacaggcgtggctgcagccacaggctttggggctgacgagagatctgtgtcttgtaggggcagaggcggtgtcatagcggagtcctggggtaaggtgaggccctcttcagcctgctgggacacaatcgtggctgcagccacaggctttggggctgacgagagatctgtgtcttgtaggggcagaggcggtgtcatagcggagtcctggggtaaggtgaggccctcttcagcctgctgggacacaatcgtggctgcagccacaggctttggggctgacgagagatctgtgtcttgtaggggcagaggcggtgtcatagcggagtcctggggtaaggtgaggccctcttcagcctgctgggacacaagcgtggctgcagccacaggctttggggctgacgagagatctgtgtcttgtaggggcagaggcggtgtcatagcggagtcctggggtaaggtgaggccctcttcagcctgctgggacacaagcgtggctgcagccacaggctttggggctgacgagagatctgtgtcttgtaggggcagaggcggtgtcatagcggagtcctggggtaaggtgaggccctcttcagcctgctgggacacaagcgtggctgcagccacaggctttggggctgacgagagttctgtgtcttgtaggggcagaggcggtgtcataacggagtcctggggtaaggtgaggccctcttcagcctgctgggacacaatcgtggctgcagccacaggctttggggctgatgagagatctgtgtcttgtaggggcagaggcggtgtcatagcggagtcctggggtaaggtgaggtcctctttagcctgcctggggacaatcgtggctgcagctacaggctttctgccagaggggaggtccagccctccttcttccttcaagttctgaggagagtctggacacaatgtgaggcttgtttcttcctgtggagttggaagtttttctgcagtgacagactcttggcctaagatctcgctgatgccctcctgggagggctgaggcattgccatggcagcagattcttgtccagcggtggagtctgtttcttcctccccagcctgtggggtcactctggtagccacctccacctggaggcctggggctacctgcagagtgtgaggggtcacagtggcagtggactcctggcctaaagcaaggccctcttctgttacttctgagatcaattcctgtctctgggacagataggcccctctgtctgaggtctgaggagcagcctccacggcccaggacacagtcccatcctgagcctgcagccccttggccccacctccgctctcctcctctgtcttctggacactgtcctggagcaaagtggcctgggcatggggctccccgctgtacagcctctcatcatctgcctctgcgtaggaggctgagtctgaatcagaggaggctgcagaggtgtcgtcccggaaggcaaaagcctcgtccatgccctccgtgatggacaggtcagacagtgactgcaggaaggaggcagacgtgctgtcctcctcaccctccccagccaggtccccacctgggtcgggatccgccacagcctcctcttcttcttcctctggggatagcggtgtcacctccactgcctccacctgaaagatgaggctgccctggaagggtaggagggctgcggggatcattgggtcattggccaggaagtccaggtcgaagaagtggccctcctggccccaggaggagctgctgtctgcagagaggctggactcagaggacgggggctctggggtccctgctgggtgcagctctcgttcatccaccatggacccctgcggggacaggccccagcctgaggggaagtccagcccttcagccggagccagcaggctgagggaacaggagggtgaagaggcccagctgtccccatcggccgtaatgtaggagcccgagggtgaggcggggggcgagtccagcagctcatcccgcagctcagcctctgagtccctggcgtccccgtggggcccacaggcaggaagcagggcataggtggtcttggtgggggtggagggaggcgtgaagaaggaatcagggtctgggggaggggaaggcacagaaagatcaccctgagaacacagctcggggggtgggtctgggcttgcgtgcccaccctcctggtccctgagcgctgtccgggcagctctgggtgacaggagggcctggcacgtctcctctcccatcacaatccggggctccagggtggccgggagaggagcctccgtggacagagcctgggaagacaggccctcagggaggagcatggggcttgggccgccctcccctgggtccgcccaggccgagggtgccccaccaggccctgcatcccagctggctccctcgggctggggccgggcacccggcttgctgggcaggaacgtgagggccaggtggctgggccctggggtcagagcacagggctcccgccggtcccctcccaggatggtggtggcagcggccgcatcgcaggacagatctgtggagatagagaagatcatgaggtgcccctggatgcatctcccaggcaagggccaggcccggggagatgaattccggctgcatagggcccagaggaaggtggatccaggaaggcaggagagaaaagagaagaccctctgcacgctgcgtttgagggagaacttccaggagttttgacagcagagagcagatgctagtggtttcctagagaggggttttgagggaagtgttgctgggagtcatgaacagacctgtctggcggcttttctcaaggacacctcagcaaagaactagcatttcagcctctctggggagactggattgcagtttccattccacagaatcagtgtggttcagctgggctcggtgggaggggctggtggtgggaatctgccaggcagtgccagtcccatcccatgacctcccaatagatgcgccacatgaggcaggcggcaccagcacgac

SEQ ID NO: 2649 - DNA, 1280 bp, Homo sapiens
cggagacttcgggcccggctggcgggcggcgccgggagcgcgggggcggcgggcccgggtcgagcatgtagcggctgctggcggcggggctcccggggcgggccgggcgggccgcgggagccgcacgcggcgatatggaagaggagggcaagaagggcaagaagcctggaattgtctcgccatttaaacgagtattcctaaaaggtgaaaagagtagagataagaaagcccatgagaaggtgacagagaggcgccctctgcacactgtggtgttgtcattgcctgagcgcgtcgagccagacagactgctgagcgactatattgagaaggaggtaaaggataatttcactggatacagaatcaaatagttccctcctctctcttcttgcttggatggttcctgaagagaaatccagtgtcattcttgttcttgccattttatagtatttaggtcagttaacgtccataccaggatacctgaatccctccagtaggactgaaatcctgcatttcatagacaatgcaaagagagcccaccagcttccgggacacttgactcaggagcacgatgctgtgctcagcctgtctgcgtacaacgtcaagctggcctggagggacggggaggatatcatcctcagggtgcccatccatgacatcgccgccgtctcctatgttcgggatgacgctgcacacctggtggtcctgaagacaggtcgctgcggaggagctttgctgtctgctaggccaggtcttccaggttgtttacacggagtccaccatcgactttctggacagagcgatatttgatggggcctctaccccgacccaccacctgtccctgcacagcgccagccacgtgacctcttccacagtcacatcttcctttgactgtcagcttcctctgcatttcaggactcttgcaatcacattgagcccacccaaattctccagggtcatctccctatttcaagatgactcttctacaaaagtggacattaaggagacctacgaggtggaagccagcactttctgcttccctgaatctgtggatgtgggtggtgcatcaccccacagcaagaccatcagtgagagcgagctgagcgccagcgccactgagctgctgcaggactacatgctgacgctgcgcaccaagctgtcatcacaggagatccagcagtttgcagcactgctgcacgagtaccgcaatggggcctctatccacgagttctgcatcaacctgcggcagctctacggggacagccgcaagttcctgctgcttg

SEQ ID NO: 2650 - protein, 77 aa, Homo sapiens
MEEEGKKGKKPGIVSPFKRVFLKGEKSRDKKAHEKVTERRPLHTVVLSLPERVEPDRLLSDYIEKEVKDNFTGYRIK

SEQ ID NO: 2651 - DNA, 1826 bp, Homo sapiens
cggagacttcgggcccggctggcgggcggcgccgggagcgcgggggcggcgggcccgggtcgagcatgtagcggctgctggcggcggggctcccggggcgggccgggcgggccgcgggagccgcacgcggcgatatggaagaggagggcaagaagggcaagaagcctggaattgtctcgccatttaaacgagtattcctaaaaggtgaaaagagtagagataagaaagcccatgagaaggtgacagagaggcgccctctgcacactgtggtgttgtcattgcctgagcgcgtcgagccagacagactgctgagcgactatattgagaaggaggtaaagtatttaggtcagttaacgtccataccaggatacctgaatccctccagtaggactgaaatcctgcatttcatagacaatgcaaagagagcccaccagcttccgggacacttgactcaggagcacgatgctgtgctcagcctgtctgcgtacaacgtcaagctggcctggagggacggggaggatatcatcctcagggtgcccatccatgacatcgccgccgtctcctatgttcgggatgacgctgcacacctggtggtcctgaagacagcccaggacccagggatctcccccagccagagtctgtgtgcggaaagttccagaggcctcagtgcaggctccctgtcggagagtgcagttgggcccgtggaggcatgctgcctggtcatcctggctgcagagagcaaggtcgctgcggaggagctttgctgtctgctaggccaggtcttccaggttgtttacacggagtccaccatcgactttctggacagagcgatatttgatggggcctctaccccgacccaccacctgtccctgcacagcgatgactcttctacaaaagtggacattaaggagacctacgaggtggaagccagcactttctgcttccctgaatctgtggatgtgggtggtgcatcaccccacagcaagaccatcagtgagagcgagctgagcgccagcgccactgagctgctgcaggactacatgctgacgctgcgcaccaagctgtcatcacaggagatccagcagtttgcagcactgctgcacgagtaccgcaatggggcctctatccacgagttctgcatcaacctgcggcagctctacggggacagccgcaagttcctgctgcttggtctgaggcccttcatccctgagaaggacagccagcacttcgagaacttcctggagaccattggcgtgaaggatggccgcggcatcatcactgacagctttggcaggcaccggcgggccctgagcaccacatccagttccaccaccaatgggaacagggccacgggcagctctgatgaccggtcggcaccctcagagggggatgagtgggaccgcatgatctcggacatcagcagcgacattgaggcgctgggctgcagcatggaccaggactcagcatgatggacagtggatgggggggcacccacaccttccgcgcagtcgtcataggccttcccagaaggagctgcccagacctgcgtgtcagcccttggtggcggcccaggtcctctactgtgaaggagcagggagctgccgagggacacgagcctcagtgcggggtggaaggctctttgccttgtccaccagggctcagccaagccctgcagtgtgtccccgctcggggagggcccggccgagcgggcagggagagccagtcctgtcggctgggcccttggacggctgtcagttttgcacatgatgttcctattgtaactctcagagaccttaaaaagaagtttactgcaatgtgaataattt

SEQ ID NO: 2652 - protein, 442 aa, Homo sapiens
MEEEGKKGKKPGIVSPFKRVFLKGEKSRDKKAHEKVTERRPLHTVVLSLPERVEPDRLLSDYIEKEVKYLGQLTSIPGYLNPSSRTEILHFIDNAKRAHQLPGHLTQEHDAVLSLSAYNVKLAWRDGEDIILRVPIHDIAAVSYVRDDAAHLVVLKTAQDPGISPSQSLCAESSRGLSAGSLSESAVGPVEACCLVILAAESKVAAEELCCLLGQVFQVVYTESTIDFLDRAIFDGASTPTHHLSLHSDDSSTKVDIKETYEVEASTFCFPESVDVGGDHSKTISESELSASATELLQDYMLTLRTKLSSQEIQQFAALLHEYRNGASIHEFCINLRQLYGDSRKFLLLGLRPFIPEKDSQHFENFLETIGVKDGRGIITDSFGRHRRALSTTSSSTTNGNRATGSSDDRSAPSEGDEWDRMISDISSDIEALGCSMDQDSA

SEQ ID NO: 2653 - DNA, 1871 bp, Homo sapiens
cggagacttcgggcccggctggcgggcggcgccgggagcgcgggggcggcgggcccgggtcgagcatgtagcggctgctggcggcggggctcccggggcgggccgggcgggccgcgggagccgcacgcggcgatatggaagaggagggcaagaagggcaagaagcctggaattgtctcgccatttaaacgagtattcctaaaaggtgaaaagagtagagataagaaagcccatgagaaggtgacagagaggcgccctctgcacactgtggtgttgtcattgcctgagcgcgtcgagccagacagactgctgagcgactatattgagaaggaggtaaagtatttaggtcagttaacgtccataccaggatacctgaatccctccagtaggactgaaatcctgcatttcatagacaatgcaaagagagcccaccagcttccgggacacttgactcaggagcacgatgctgtgctcagcctgtctgcgtacaacgtcaagctggcctggagggacggggaggatatcatcctcagggtgcccatccatgacatcgccgccgtctcctatgttcgggatgacgctgcacacctggtggtcctgaagacagcccaggacccagggatctcccccagccagagtctgtgtgcggaaagttccagaggcctcagtgcaggctccctgtcggagagtgcagttgggcccgtggaggcatgctgcctggtcatcctggctgcagagagcaaggtcgctgcggaggagctttgctgtctgctaggccaggtcttccaggttgtttacacggagtccaccatcgactttctggacagagcgatatttgatggggcctctaccccgacccaccacctgtccctgcacagcgatgactcttctacaaaagtggacattaaggagacctacgaggtggaagccagcactttctgcttccctgaatctgtggatgtgggtggtgcatcaccccacagcaagaccatcagtgagagcgagctgagcgccagcgccactgagctgctgcaggactacatgctgacgctgcgcaccaagctgtcatcacaggagatccagcagtttgcagcactgctgcacgagtaccgcaatggggcctctatccacgagttctgcatcaacctgcggcagctctacggggacagccgcaagttcctgctgcttggtctgaggcccttcatccctgagaaggacagccagcacttcgagaacttcctggagaccattggcgtgaaggatggccgcggcatcatcactgacagctttggcaggcaccggcgggccctgagcaccacatccagttccaccaccaatgggaacagggccacgggcagctctgatgaccggtcggcaccctcagagggggatgagtgggaccgcatgatctcggacatcagcagcgacattgaggcgctgggctgcagcatggaccaggactcagcatgatggacagtggatgggggggcacccacaccttccgcgcagtcgtcataggccttcccagaaggagctgcccagacctgcgtgtcagcccttggtggtggccagggagaggcgcccggtgcagatggccccgggcggcccaggtcctctactgtgaaggagcagggagctgccgagggacacgagcctcagtgcggggtggaaggctctttgccttgtccaccagggctcagccaagccctgcagtgtgtccccgctcggggagggcccggccgagcgggcagggagagccagtcctgtcggctgggcccttggacggctgtcagttttgcacatgatgttcctattgtaactctcagagaccttaaaaagaagtttactgcaatgtgaataatttaatctctg

SEQ ID NO: 2654 - protein, 442 aa, Homo sapiens; identical to SEQ ID NO: 2652

SEQ ID NO: 2655 - DNA, 1857 bp, Homo sapiens
cggagacttcgggcccggctggcgggcggcgccgggagcgcgggggcggcgggcccgggtcgagcatgtagcggctgctggcggcggggctcccggggcgggccgggcgggccgcgggagccgcacgcggcgatatggaagaggagggcaagaagggcaagaagcctggaattgtctcgccatttaaacgagtattcctaaaaggtgaaaagagtagagataagaaagcccatgagaaggtgacagagaggcgccctctgcacactgtggtgttgtcattgcctgagcgcgtcgagccagacagactgctgagcgactatattgagaaggaggtaaagtatttaggtcagttaacgtccataccaggatacctgaatccctccagtaggactgaaatcctgcatttcatagacaatgcaaagagagcccaccagcttccgggacacttgactcaggagcacgatgctgtgctcagcctgtctgcgtacaacgtcaagctggcctggagggacggggaggatatcatcctcagggtgcccatccatgacatcgccgccgtctcctatgttcgggatgacgctgcacacctggtggtcctgaagacaggtcgctgcggaggagctttgctgtctgctaggccaggtcttccaggttgtttacacggagtccaccatcgactttctggacagagcgatatttgatggggcctctaccccgacccaccacctgtccctgcacagcgccagccacgtgacctcttccacagtcacatcttcctttgactgtcagcttcctctgcatttcaggactcttgcaatcacattgagcccacccaaattctccagggtcatctccctatttcaagatgactcttctacaaaagtggacattaaggagacctacgaggtggaagccagcactttctgcttccctgaatctgtggatgtgggtggtgcatcaccccacagcaagaccatcagtgagagcgagctgagcgccagcgccactgagctgctgcaggactacatgctgacgctgcgcaccaagctgtcatcacaggagatccagcagtttgcagcactgctgcacgagtaccgcaatggggcctctatccacgagttctgcatcaacctgcggcagctctacggggacagccgcaagttcctgctgcttggtctgaggcccttcatccctgagaaggacagccagcacttcgagaacttcctggagaccattggcgtgaaggatggccgcggcatcatcactgacagctttggcaggcaccggcgggccctgagcaccacatccagttccaccaccaatgggaacagggccacgggcagctctgatgaccggtcggcaccctcagagggggatgagtgggaccgcatgatctcggacatcagcagcgacattgaggcgctgggctgcagcatggaccaggactcagcatgatggacagtggatgggggggcacccacaccttccgcgcagtcgtcataggccttcccagaaggagctgcccagacctgcgtgtcagcccttggtggtggccagggagaggcgcccggtgcagatggccccgggcggcccaggtcctctactgtgaaggagcagggagctgccgagggacacgagcctcagtgcggggtggaaggctctttgccttgtccaccagggctcagccaagccctgcagtgtgtccccgctcggggagggcccggccgagcgggcagggagagccagtcctgtcggctgggcccttggacggctgtcagttttgcacatgatgttcctattgtaactctcagagaccttaaaaagaagtttactgcaatgtgaataatttaatctctg

SEQ ID NO: 2656 - protein, 188 aa, Homo sapiens
MEEEGKKGKKPGIVSPFKRVFLKGEKSRDKKAHEKVTERRPLHTVVLSLPERVEPDRLLSDYIEKEVKYLGQLTSIPGYLNPSSRTEILHFIDNAKRAHQLPGHLTQEHDAVLSLSAYNVKLAWRDGEDIILRVPIHDIAAVSYVRDDAAHLVVLKTGRCGGALLSARPGLPGCLHGVHHRLSGQSDI

SEQ ID NO: 2657 - DNA, 203094 bp, Mus musculus
  misc_feature (1)...(203094): n = A, C, G or T/U
aattgatggctggaatttgcacatgtggtaaccataaaggcccgcgcagcccacccagactgccctcccatctaaggcatctgggcacacagactcaagagtgtgagatccacagaggctgggcgctgggacactataggctattagaatgccacatgagctgggcccggtgccagggcccctggggcttcatgtttagagcaccatgctactgcattgcaggggtctcctctgcccaacttaagagacctgaggaattgcttcagcttgaacccatccttcaaaatagcccttcccgtctcagaagttgccttgggggaagccacgctgctgctgttgcaatagctttaaaggacaccgccctgtacaggagaggggcagttttgtcaggaaaaagtatcctggtttctaaaagtgaccctacaagtttctggcctcctggtttgctttcctccactgcagttccttcatctcacctcctactgtaggtttctaatttccatctaaaatcccagacccagaatggaaaagctgaaatgcgatttgtgaagttggtggcactgagatggggagcagtcatttgctttgggctttgcttgaaaccccaccgaccttttctggcaaggtcaacccctccccccaaccccctttaaattttaaagtttcagaagcaaattggtaaaaaagcccccctatgccttagtgtttttgttttttttttcttcttcctactccaaattcactcttggctgggtagtgttgattacccggtagatacctcccagcgcagaagcagagtggactggaggctggacaagattttaaaatgccaaaagccctgggaacctgctgcattttgattttcttaagcccctgggccagcacgcctagaggtttgaaatcctagtactgctgagccctgagccaagcgtcggtaattccagtcagatggcggcagggaggcgcacccccctccccacccccgcccgcgggaaggcgtttcttcgcccacttctcccgcgtctgcctgagcagcggtgcccggctctgggctgcggtctgcgggggagggcgggctaattcgtgtcagatggagggcggccgcgcggggcccgccactcgcgcctggcttttgttcccggagtctgacttctgacggcagtagcttttgcagagcctggctaggacgtgatacggacctcgcccacgcaggatctcaaggcgtcggtgccccgcgctcggccgtggaccgggggcggaccacgggggcagctatgcggtggcgcgcgctgaccccgggcccgccagcgaggttggcgcgcgagtctggtgcgcgtgggcgtccacgccaggtgagtgcggcggattgtgctccctcgggttgacacccacgtggacgtcctgggtgggcgcacgagcccatgtacttgtgggcctgtaagcgtgcgcgtgttcttgctggtgcgcgctcctctgtatgtgttctgggtgtgcacgtgtgtgaagtgtgtgtgtgtgtgtgtgtgtgtgtgcgtgcgcgcgcgcgcgtgtaactctctagggaggcagaactggatgagcagcagaactggatgagcgcaccgccaggcggaaggcaggacagccctagccccttgagatccaaaagttgctggaaaatgtttctttggatccctttctctacagtagaggcgggacactagccattgcgcaaactcactcttccgcgcgtgattcttgttaaggtttcttgcgggtgcccggatagtgcgtggaagtctagtgcaagttcctgcgtctccgagggcaccttggtgtcctgttgcttccaggacggtctctgtggggttcgaattaaacagacgccgagtagcgcgcccccccccccccccactaagccttataaatccaacatcgactacgattgttttcccatgaaacttgtggaaagttctgtggagcgaaaggtctgcaagtcagtttgcttcagcagccagatgcagttgctttaaaggagtggtttgtgtaatgcagttcctcgtgttgtggtgaccaccaagcctaaaatgtttctccttgctccttcttaactgtaagtttgctacggatacgaatcgtcatgtaaatatctgatatgtgacctcatcaaatggtctttagactcctaaaggggtcctgacttacaggttgagaactacaaaggtatggggaacactattgagcatggagggggtttacttatgtcccatgtgcctgccttctgtggggaggtatggggccagctctgcggatatgggaagggttcaggtttggttgctttcagagaagtgaggttaagctgggatcagtgctaccccagtgcgcctatattcgcttcctgtggtgggctgaatatttcctgaagggaaaagtagctgggctcatgcagacatattcttgtactatgaaacaagagaagagaagagaagagaagagaagagaagagaagagaagagaagagaagagaagagaagagaggacaagacctgactgtgggttccctgtgtggagagtcccccggctcctcagagacttcactatcaaggctaattgcccctgccctctccgggtgggcgtccttgtggaacctgcagccttactggtcactcttccaaagtttggctcctaacaattagatgaaatttaggtttctgaactggctttgccaattacttaagcctcgctgtatcccccctcccatcccaccccccttttcagggcgaaatgaaagccctggatcaggtgaagacaaggacagtcgagttgtgtctagtcccctttcatgggagagatgttatgcagcatgcacgtgagcagatgttattacactatcttaatcaactcccctgggatctagcaattgaaatggctgagcaagcaccacagtgcctctgctgtttccactcttcagcttttggaccagtgagcaagaagctgcggggaaacagtagctctttctccttgcttggaataaaggtgtttgtcactgaggaaatgttacagtagctctcctttggcccacagactatggccggttcatctagtgcacaagtcttaattgagggactgtgggttgccttctgacagctggggagggctcacagagggcaaaggagaaagaacttggtaccccgaaactaggatattgcagtctagcgcaagagagattgtagtcaaagagctgcatgatggacagaaaaggtatgtgacaccctgatattacctaggattaattcctgtgccagtctgagcatggcactaggtggtagccttatccctcattggttccctgtggagtctaggtcttgtatatcacaatcccatctgtagagaagtgggggttagggtaactatgtgccttgctagtgtgaatattgaatgctgctagattcttgcagggctccagatacagggtttctgctatcaatttgaagtaatcagacacagacatgggatgcaatatttaataaaggtgacttaatagtataggtccaagtgattcagcctgttttggctgcagttgagaatcttctgggagctctaaaaccttcccagtgttctggtctcacctctagggtaatcagattgagttggtatggggtggaccctaatacaaccaagttgttttaagactacccatgttatgcccgtggatatgtagcattttggtcatttccagcagtaggagagggagggtgttattgccgtttaagaggagttgcggtttactcggggccgagcaagagtttgaatgtagattgcagagccaacgcagaagtttcttatgggttcagggtactttcttgttctttgacagtgctggtcacaccatagcaactgcagggagatatgcagggaagtatcagcatggttgaggaacccgaagtgtttggaagattctgggtctagaaatggctgcttacgccgtgggaagtggtaatggcttttgagtttcagttttggaagttcattggtgacctgtagccagaacaaccgtggcgttggttatatggattctgtatcctccagctctgctactaaaaattctcattaggactcaaagctttttttttctttctttattgtctacataggctgccaggttatgaggagcaaggctgttttacagctttccaaattggttgccttttatttccttttctcacctcattgtgttgtttagaatctcaatgttaagtcttacttagcgccctcccatagctaccctgttgcatgtcttaaaaggaagccttgagctctcatgattaaggatgtttgctgaaggatttacatagccaaggaggaagcctcttgctctcctgtttgagatcctatctggagagggatgttaggatttgttagtggattttttgcattggttgagaagactggctggctccttgcttggcttattaactgcttttgtgtccctttgcttttccagacagggtctagcctctactgatttctcttcagcctctcgagtcctggtgtagaagcttgttgatcggtatttgaatgttatgaacgcttgtgtttctgggataaggctgtttcaaagtgtagcattttgtttgccactatttgggcattttctagacattgctgtttgttttcccaaatttgatttgatagtggtcaggctttctttttctcagaaggacttgaatgtatttggattccttcagacttgttctgtgtccataatgtggctgaacgtgccagtgcacttgaaaggatgtgtgctttgttgttgtggagttaaataactcttttagatcaaattgtttgatagtgtcacacaaatcattggtatctgtgcttattttctgatagacctgttgattactgagagagagtagaataacaaaataccacagagatggtggcttagcagaaatatattctccagcagtgctgaggaaggacacagacatcatggtgtgggcgtttggttgctttgcctgagacctcctctcttaacttgtagacagccatcgtctcccaagtcctgatgtggttatccctttgtgaacttggattccttataaaccatgacgataacttgtcatattttaggtccggctggggcatccctcagagggaggtatcctatgcctggcattgagatttttgttaaattatctatgcctcttgggagagacattacccatccatgtaggctacttccatctaaactcctttttaaagaaacatatcttttttctttttttttttggggggggttgtttgcaacagggtttctctgtgtagttctccctgtccctggaacttactctgtagaccatctgcctgcctctgcctcccaagtgctgggattaaaggcgtgtgccaccactgcctggcaaagaaatttttaaaaatttcaaaaaatattttctcctaaaaaatcgtgggttttcatatggttcttaacttcttccctagctttggttagctctttctccgcctgcttttctctgcctcttcatcccctgtaacctgctccacctctggtatatactcctgtatgtgatatcacacctattgactaatagcctgacttccctgtttacttccctgaataccctgtttcctcaatgtaccttctaggtttttggcctctctaggcagtccatattaaacatagatctacacatatgaagaagctggatccacatatgagagaggaagtacagcgtttgtctttctgaactcataggattttctgatccatccattttcctgaagttttgatttttgtttacaagctgaataaaattcctttgtgtatttactttctttgctctgagtgtttttaatgtttttctctttgttatggggtttgaataattcatttctatgcaccttggtgtagttacagtcaactcttgtatcttggctcaatggttttacagttttcatggccgttctagtcattatttcttctagtaccccttctgtgctcgggcacaccaagtctctttctctctctctctttcttttttcccccttccctttctccctcttgctctggcccataggtttttttttaaaaattttattattattattattattattattattattattattttggtttttcgagactcagtagactaatccatgtggcgagaagtaggaagggggtgaaagtgctaacaggcatatggcttcttttgtgtgctaagaacatgctgctaaagccgggtgtggtggcgcatgcctttaatcccagcactcaggaggcagaggcaggcggatttcggagttcgaggccagcctggtctacaaagtgagtgccaggacagccagggctacacagagaaaccctgtctcgaaaaaccaaaaaaaaaaaaaaaaaaaaaaaaaaggcgtgtgctaccatgtctggctggctgataggttctttatttgtgagccaccatgaggttgctgggatttgaactcatgacctccagaagagcagtcagtgcactgagccatctcaccagcccccaggtaactgtatattggtcataaaaatcctcctgttgctgtagatgcccatttgcttgcttatgtatattgccttgtttatttgcttcgttttgacaggttttcatgtgatttttaagttcactgatctgtcttttgagtaactggccaataatcatgtctcacatatatatatatatatatatatatatatatacatatatatatatatatatacatatatatatatatatatatatattttttttttttttaacctcagaagtctccacttccttgtgtggttattttctttggatctttatgcctttttcagctctatacattttaagtagatgtactacaattgtcgtataccattaatgtccttgtctgctaattttaacttctcaatctctttccattgtttattttctatttatggattctgttttcttgtctctttgtgtgtctgataatttttggctggctgccagcctacatcagttttactttgtttggattctgggaaatttgatggtctttgtggtattttggtgtgccttttctcggaaatgcagtcctgttactggacagcggtagcagcctcagggcagtggttttcaaatagcttatataggccaaggaggacaggcactgtagaacggcagttctcaacctgtgggtctcgaagacctttccgcagggggttatacatctgataatctgcatagcagagatttgcatcatgattcataacagtagcaaaattacagttatgaagtagcaatgaaaacagttttacggttgggggtcactgcaacatgaggaactgtatgaaagggtcttagcattcgggaggctgagagccactgtggtcgagttaatctttgcaaggcaatattctgcgtttcctgtagagtttgctccagttgtaggcaaaactcggcttcttgctctctagtaagcaaactctatgctcagctttgagtgaacacagggcccaattctaatcttgtgaggtgtagggtgagtggtggaagtcctgggggttagggtttttttctgtattcttgatgagcaagctcttcagtgctcatcctttttaagggcttttctgcggaccttaagagctgtgcagctcattgttctgcagtgccctgtctaggaaacttctttcctctctcaacaggggtggttcactggactcagtttggatcttctctgcagcctaacgagtctcttaagaaggcagtggtggggggagggagacagaaagttcaccttaacttattcttgcctctgaagtgcagtcctgagtcccctaactaggatatagttagggtgtgtatcattaggcgctgttgctgttgtgttggtagcactcagtgtgtttatacaaactgagattgtgggacatcacccgtggaaggacttcagcctcagagcactttggtgcagaagggtattgttggccaaagcatcctcatcgctgtccgtcatttctggtcctccatttcctgcttcgctgttttaaaaacaacagctttgtgcatttcgtatatgattttaggtatgaaggtacatttaatctttggctgatacatttgcaccagcagtggaaatggatccatcctgcagatggatgcagagctaagtaaataaaaatgctgtcatgctgtttcacatcgcctgaggtccttaaaactaggtccgaacatcctcctaggatttttattcagatctgtatctctcaccttccttgtacgcttcatctgcgctccttcagggtcctccctcccccctgcagtgcactcggtgactcttcttgcttctgttgactcagatgtggtggcaagcatcttagaacttactacccatgtactggtacagagagtatgcacctctgtgtttttccaacatttttgaaaaaaaaaatccatccttattatatatagttaggttatttcttgtttcggacaggtttttttttgttgttgttgttttgttttttgtttttgtttttctcttttgttgttgttggtttggttcagtttggtttttcgagacaaggttcctctgtgtggccttagctgtcctgggattctttttgtagaccaggnnnnnnnnnnnnnnnnnnnnnnnnnnnnnnnnnnnnnnnnnnnnnnnnnnnnnnnnnnnnnnnnnnnnnnnnnnnnnnnnnnnnnnnnnnnnnnnnnnncctctgcttctggagtgtcaggatcaagggtgtgtgccaccaccacactgcccagcattgggacagttttttaagtgttagaaacattagtctaaggccgggcagtggtggcgctcggctttgatcccagcactcgggaggcagaggcaggtgggtttctgagttcgaggccagcctggtctacagagtgagttccaggacagccaggactacacagagaaaccctgtctcgaaaagtcattggccatactgtgtgggggctggggtctgttcagaaagtaaagcactgcctgcagcccagccgcaggtcctttttaaattaccttgtcatactttggaaagcttctaagaaattatcaaactttttttttcctccaaagtagttgttactgagaacaggagataaacgatgcattttactttctcagtaaatttaaatgatcctggtgagagagcagaagccccccccccccctcgtgtgtgtgtgtgtgtgtgtgtgtgtgtgtgtgtgtgttgacgttgactaatatccacatggttattagatcatgcgtggactgtcagcagcaaacaagctgtttttaaaacagtgaatgatcttttaagggcctcacatagaggctctgagagcagactctaccaacaggaacttggtagatgagagttaatgtccttatactaacgcttgccatcaaggttaaggaggcagtgtgtgcgtgtgtgtgtgtgtgtgtgtgtgtgtgtttgtgtgtgtgtgtccatccctggctcgtgccagggccttcctttctgcagaacaacacacctagcccactggcctgagaagtcagaaccttagtggatagttagggacatctttgagggggaaactacgcagtgagctttaacttgtttgctcttggatagtcctttattctagaagcgccttgagagtctggaagggtgtatggctactttgctactgtagtggatgatgtaagcctgctagctgcaagcagtgcattatcacctgggtggctgcctaatgtctcagtcctcatgccctcctaggagatgcgcctactgagagagggcgagctgccctctggattccagaatgccattctctggctcagggaactggagttggcttggtaaagctcctctttcggctgtgtgcaaagctcactagatttattatctcccgagaaagaccttaaacaaaaaaagaaaaagatgcaagagctaaagctctgacagtttcctcctttactcttccagccgggagaatttaccacgtgtccgcacaactttaagaaaaaggactttaaaaagcccagagtctgtggagtgtgcagacagaccattgacggtcaagggattgcttgccgaggtaagtaagtccgtgcccttgaacctctcacccgttagacccaagctaaacaaacagtaacgcgtagacagtcgttcctctgggagtttccagaagttaagtcatggaatttccccattgcgcctctgttcagcccccatcccccagcacctggcagggcctcccatgtttatgaagatgcaggctcctaaggaaagttttctagaaagagcagagctattagtgggttgttgtgggcactttgtgcttcagggcaggtcgtttacagcctacacttcacttttttggtccgcatgtctgtctgtgtgagggtgtcagatcttctagaactggacttatagacagttgtgagctcccatatggaagctgggaattgaatctaggtcttttgtaaaagcagcagcctgtgctcttaactgaagagccatctctccagcccctgagttagggccttctgtgtgctggcatctctcagcctggttgtggaaaatgttgatcttgtctctaaaccaagccaccagcttggctttttttctttttcccttttctaaaagattaaatgtgtttatttcctttacatcccaataccaaccctctgtctcgtcccagtacccctctcaggtagatccttcccccccattcctacctccccctcttctttgaaaaggggaaccccttctaggtatcacccactgcaaatcaagtcactgcaggactaggtgcatcttttcccactgaggctagacaagggagcccagttaggggaccgggatccataggcaggcaggcaacagattaagggacaaacctgctctagttggtggacctgcatgaagtccaagctgcacatctgctgcatatgtgcaggtggtaggtccggcccatgcatgctctttggttggagcccaagggtccaggttagttgccactgttggtcttcttatgaaatccctgtcctcttcaggccctcagttctttcccccaactcttctataagattccctgagctccatctaatgtttagctgtgcgtctctgcatctctttacgttggcttctagagggcagttatgctaggctcctgtctgcaaacataacagagtatcattaatagtgtcagggattagttcttgacaatgggataggtctcaatttggggcagtcattggttggccattcccttcgtctctgcacatcttgtaggcagaacacattttgggttcaaggttttgtgggtaggttgctgtccttatcttacctctccattgagagtcatgtctggctacaggaagtggccacatcaggatccatatcccctactgctaggaatctcagctagagttgcccccataaacacactgagaccgctccccatcccaggtctctggcacattgtagagattgcccccttctcctatttttgttctctttctcctgctctccctgaatctgatgccctcatgccccctccccttcccacttggctttttctcttgatgattaaatcttagagtcagtgcaagtttgaattgttttgtgactccaggtggctgcatctccataatgaatgtgtggctggatgaggctatggggtccaccacacagcccaggaagccctgaaggatcgggggaccattctttggtgtccagtcaattgtggggggttagggttccctccatagagttagtgttagttctgcctcccctctcctttcaggaggctagctttggactctcctgctcctaggttggctcctgagtgctgggatcgtagctttcactgccacacccagtagttcctttgtggaaaattttcagggtcttccctggtgggcctctgtagtgctgggatctctttggcttattttctcctttcttctgatcagttttggagatgtaacatagtgagtcaggaatggaccaagagtgtggtcctcttagagttcaagggcatctgtctgggctgtagtattccagtttgatgccctctgctacatagtgctgaagaatatgtcgactgcttccctgtcgtttccatctcaggtcccctcgcttgggtccccttgtgtcttagtcaggatttctattcctgcacaaacatcatgaccaaaaagcagttggggaggaaagggtttattcagcttacacttccacactgctgttcatcaccaaggaagtcaggactggaactcaagcaggtcagaaagcaggagctgatgcagaggccatcgagggatgttacttactggcttgctcagcctgttctcttatagaaccaagactaccagcccagagaaggtcccacccacaaggggacctcccaccttgatcactaattgagaaaatgccttacagccagatctcatggaggcatttccccaactgaagctcctttctctgtgataactccagatgtgtcaagttgacacaaaactaaccagtacaccttgcttcctgagccccacgtgtttcctaccctaggcttttgggagtcctgtctctacctgattccaagtgtctcctctcactgcagtcttgctgaacttcaacattttcagcctaaccccactcccctcacccttataggtgtggaatgctagggtggcttccgccttctgctctgaggcagtctcctacaggccagtgtgtctctaaaccctgacatgccctagagtacaagggtctgggaagatgttgttgatgctgaggtcaggtaggcatgggtgggcagggcctcactgattgagtaggagcctcttcgtgtcataccgatgggaatgacatagccacagaagcagggtctctccatctgcttactgtaggcctaaaaggaaaaagaaaggagctgagagcaggtcattggtgctcataggatgagcagagccctttagttggctaccagaggagaccttgtgggaaggagacccctagtaccatttgtgtcaaaccagaagaaggcatcagatctcattatggatggttgtgagccaccacgtggctgctgggatttgaactcaggaccttcagaagagcagtcagtgctcttaactgctgagccatctcgccagccctgtcattcacttgttaagaaaaatttggtaaggcctgtcacctccagttaaatgtctcagtttctcaggtcccagagaggccttcaggtcttcataagagtgaagaccagcatgatggctttgtgttccaaaggacattaacattatccacctttcctttatgttctgattttctgttaggctgcgaggtgtcactagtagagcccccctcccccacttcccatcccccaactctcagagtcctgtggtgccacgtagatgccttacctctactatctaccatggatgacagaccagaaagcactgtgcagtgtgtgaggtggggccctcctcacacactgctttgttctaggaccagaactgtgagaaatagatttgctattgtatgtagcccagctattcaggctgtggcttggtagtttttttttttttttaatagcagcccaaatagactgagacatcatatttatgcacacaagtatagtaattccgttattatgcaattgctgcttttctttaatgccctgaaattatgttccaggaatcttaggtctgatctttctcatgacctcttttttatttttaatttaatttaatttaatttaatttaattaatttatttatttggttttttttgagacaaggtttctctgtatagccttggctgtcctggaactcacttttttaagaccagactggcctcgaagtcagaaatccgcctgcctctgtctcccaagtgctgggattaaaggtatgcgccaccaccgcccggcttttttaatattttattttattttatttggtttttcgagacagggtttctctgtgtagtcctggctgtcctggaactcactctgtagaccaggctggccttgaacttagaaatacaccttcttctgcctcccaagtgctgggattaaaggcatgtgccaccacgcccagttttttttttattttttaattattattaaattcagtttctgtgggtactacttagcatgaatatgtttcatcctgtctttcaaacgctgccctttttttgaggacaatgtagtgtgtcaggaagtaatgcccaggtgctctgggttgcatgtgtgagcccagaatccttcaacagtgctttcagatatgaagcaccctgcaaattccacaggcagtggtgccagccgggtaggcctaggaaggacactgactgctgtgggcagtgttgtggctcagaagctggcagaccagaaatgcattaggaagatgccataggttctacatggtgtgggcatgggaggcatcacactgtcagaggcagtagactttcaaacggtgccagggccggatgaaagcagcgcagcatgagtctaagaggtccagtttccctggtgacaaagcgggggatctggcatctctgtgctgctgggtctgtatctcttgatacctgggacctggaccagttgctctcagatgttgtgagaggagcagcctctgtccctctatccaagctctggttccctgccctgccccgtacttgttgtaaccttcctagggccccgtgcctagcttagcctgcagaccaggcacccttttcctaggtaagcaggcatgctgctcttgtgtgcagctctcatgtgtagcatattgggcagcaagttgacgcttgtatgctattattcttgtgctgatggatacaggttgactatggtgtgttctccagtaatctccattgtgagtattaagagggcggagaaggtctgaccctggtatggagaagtggggtctctggaaggtcgttaggattcatagtcattagcgtggattaagaactggtgcttttgtaagaggtttctgtgcgcacatgcatcccctcttcatgcgtgtacactcgtatgctccctgtcactctcatttcgtgttgtcctgctctatcttgggatattgccattaagatagcaatcaccagatgtggcctttgtaccttggagaggaactgagccaaaatagatttcattcggaccgtggtttcattattagccacataaaacaggctaagttaatcacaaaggccctaaagggctccgtgtctggtgggcaggcatccagtgcaggaatgtggtagtagggtacctgtggcatgaagaaaaggatggctactctggggtgctgacaggctcttgagccaagtttgtgaagatgacatgctggctgttcttcagcctgtctgctgcccaggctgagagcttctgcaatgtactcaagtcttacggatgctccaaggcacttagcaggcacactgggacagcaggctgattgaaaatctagatgaagttggcagatacatacctggattgagatctgtacctttcttgcaactccacatgaagtaggtagcgctaaacttttccacaaagcagttagttagaggtgactccccaacaaccctagcctagcctcttccaatttcctgtattttcttcttccttaaaatgttcccgtgatgaccctgcctggctcagctcccctccacacccttcctccaccatcattcttgctccatcctgagagatggtctatgacagaacctttcagaagaacaggaagggagaagagttccgcggggagcttccagctccgttacgtcactcgttacgtcactcgtcgggtgcggagcattctgctcgctgtgattctttttcccacgcttacttctcaattcttcattttgactgaaatgtcccattttctgcaaagaaatcaccagcttcttcctgctgttcctcaaaggtctgggtggttaggctctgagttatctgtgggccagggacatctgggtcctgttagtcaattttacaggcagattctgatttttaaatttcttgagtagcctgggtgataagacacaagttctcgctccacagcagctgtgactcggacacctttagggcctggtgggattgctgatttccatagtgttgcgtgtcaccgggcagtgctcctcctggggtgctggtggctgtggcagtcaccactgggaacagctcaaggcctagcttctcagagattgtccctgcagaaggtgcaggagaacttgcgaagcagagggtgtttcactcacgggctcatttataacttggtaactctctgtagagtgttgtataaaagactctgacaaccttgtcagcctgcagcccggattcccaaggcccatggagacacgttgaagaatagcacctccaagaccacgtatagcagtgtcaggtcttttggagccagatggctgggatgtgaactatggcactgaggagcctggattcctaaacccgactttgcaaaccttctgtgactagggagttgagttgtgctgctgagcctctgtagaactcagtgtgcagcaagtgagggaagctctctgagtgaagcctgaggcgctgacggtcctgcatctggcacaggaagtttcagagcattccactttagcaattgtttattaaatgcaaactccagtttttgcctgaaatgtctgccatgtttctgtgtgtgccccagactcacctttcagatcctttgcttgtttaaaaattagatgacgttttccccttcctgatttctcagacttcattatgttaggaatgctgtctctttcacacacacacacacacacacacacgcacacgcacacacacacacaccaggcaaaaacatatgccactctctaatgtctttatcctctaaacaaatcagtgtttcttacctttctaccttacatattgcaaattctcattcacttgctttatcttccccttctaatggtggtatttatagcatacaaaaatttttactctagcatcaccaagatagtctctgacatcttgtgctcatttctgcctctcccatttggcatatataaaattcaagtagttagtcctattggtttttttcattgactaaagtgtttgcctatttttgctcctcttccctttgaggcaacctgtgatgtctttcctgtgtcagcttcttagggatggatgagttcttcatgtttctttcatactatacaaggagcttggtatcggctagccttggcttctggaaagtactttcatagtcacgtgtcagatctttagcggtctgtctgtctgtctatctatctatctatctatctatctatctatgtactatgtactatgtatgtatgtatgtatgtatctatctatatatctatctatcattttttcttatagttcatgtagctgttcttttcatatcaaaaaggtctctgctgttacagtctgttgtttctcattacataaggagaggtggtggcagcaggtagtgacagggtcctccttgaggtggggcacagcagctcctcagttggtacagatagatgtttgcattattggcttagtgacctagaacccagtcattgtgccaggcacacgagagcctttgcctacttgctttgctcatcgtatgtttaaaacaggctcacctgagaatgtgtgctggcctggaacttactttgtagagtcaaatgggtgcaaatgtgtgattctcctgcctcagatctcttgagtgataggattatgagcactggccaccatgtcttacctgtgcttctattttctatttgtaacaagaacttgagaatatgcttttctatttggttaccaagggaaccagtgggacaaggtgtgtaaagcaagtggtactatctatggcagccagacatgcagggcccagttagccattgtggtgtgggttttctcctgggcctggaggtgcaagtggcccagagcacaggactatgcctgggttcccaatgtgctgactatgttcattagctttctcttggtagaatctagctctattctcagtagcaaccaaaaggagcccctttccttgtgggtcttttgtaagagagtaaggaactggatagaactgggtgggtcgggttcatttgactttccttctatcagacatacatcatttcccattctaaaagactcagtctagaagggtgaatgggattgtcatctgtccaggttgtcattgttcatgcaagccaaaatgcctttactgtcatcttgagtttcaggtcacttagatcataaagatccctgtagatatgaccagcccccatcaccatttaacgtggtagaaatggaagccgatgatatgcaaaataaaccacttaaaaggaacagtaatactattataaggtaatataagtatttttagtgaaaatgactttccttaaaactctcattcccatggagcagtgagacctgtgtttctctttagtagaaaggtagggctcccctccccctccccaccccctgctttcttctgctttcagtttctctacacactgtgtaagagctggaaaagcatgtggccctgtgtttcagcctttcagattgcactggactctggatttcatatcagaactcaaaaataatagtgttttttaaagattagtgtctctgtgagtctgaaatggaatcaatacttttttttttttttttttaatttaaactatgtctttggctggtcttgtgtattgggtgggatctttgaacctttgaaccagcaagtatcacagtgccctggtctgtttctggcctgttaacttacacacgtcctagtcttgaggcacttggttttttttttttgtttgtttgtttgttttttttgttttgttttttgagacagggtttctctgttttaaaatcccccaaaatatctatacatgttattagtatctgttaattttatcttgatgctgtgaagctcctggttttgggtgtagatctttgaagagagaatttccacttgaaatctgaagttttgacattggtgtgagagactcacttaaattaattttgagaaactggcaagcagccccttctgaataatcatgttttgtttgccaaggttctttcaaataaaaaaacggtgatcccgagtaagtggctagtttagctaacaactcacagctgcaccagtcctgttgctagctggtccgttcccacatgtcatcccattcccagacaatccggagacactcactgcaaatctcccctctgctctcacagaacagtgaagaggtgtttactgaattttttcattagaatattcatttgtagaaagatttatttatttatttatttatttatttatttatttatttgtatatggttgttttgcttgtatatatggctgcataccaaaagaaggtattggatcctctgggactacagttatagacagctgtgaactgccatgtgggaactgaactcaggacctctgaaagaacagccagctctcttaacagctgagccatttctccagctctcatcagggccttcttgagtgaagctggctttttatctcaagtgtctgctggtaactggtataagttagtcttgatctctaaatgcctgcagagttatctattcgcactttccatactgtgtaaatgcaggagaaaggggaagagaggtgagaaaaatatttcggactcatcaactcattatgaagtcttggggacctggaggtctatagatccctctaacagctactgacctagaccaggtgggatctaactgtgtctaagggtgactcccacaaggatgaagtgagggggaagctagactaaatatgattctgtcagcaaggaggaagtgggagaggaaggttgcagtaaatattattaggggggtttctaccccacctttgatcatttagttcccataaaaagacacaaaacctttatatttaatttttttttttcaggacagggtttctctgtgtagccctggctgtcctggagctcactctatagaccaggctggcctcgaactcagaaatccgcctgcctctacctcctgagtgctgggattaaaggcgtgcactaccacgcccggctacctttatatttataataagccttaaagcattagagctggacaaatatcaaccctctcttctagtttgtcttccctgtcagtaaccctgagatatatcacttgccatcttccgcctgggccacttctactacaacaggtcagctctcatgaccatgctcccacaatccaccttccttgtggcttttccttctttctcctcctttttctcctcccttccctcctcctggtctttagtctgggacccaaagccccgcctacctctcttctgccctgctacaggctgtattatatttattcaaccgatagttttaaattaaggagcaaggtttacacaacaaaaggtggaatgtgagagttctctagtcttgtggcaactagaccttgggatacagaatatagcatcacaatacacagcagcagagcaaaccttgacctgtgaggatcgaaccagcaggagacactggccagcatgagagtaggcgggtttctgaagcatctcagaacacgtgtgtggagactcccagagcacgccatctttctggggaaaactgcatggctgtggaaatatccgacagaccggaggccagctgggagacacagttctgtcagtggacagaagagaaggcacccagttgttacacaccgtaagtccaaggtcctctggggatttggtggtgagtgaggactgggaagactgagtaaacccctgagtcccatgagcctgctgttgaggggaaggtcacgggccaggaggaaggaagctgctctgttaagtggcatgagcagctgatggtagcattgacagatgctgctatgtcctctttctggccttttttttgtttttagtcatgagaaagctgaggccagactgtgagagactctctgcccttcagtctggggcataaagggtgatttcagcaggaagaagttggtcaggattggcagaagtggatgagtaacatccctgtttttgtttgtttggttggttggttttaatttttaaatttattttttactttgcatctttggatgagacaaacatataggttgatctgagactttataaaccaagatgcttcaaaatttaaaatttggatgtgcaagatagcctggattttggaacattgcaaactttggactttggggagcaaataataaactagcaaagtctatgaaagtcttcccaagtctgaactgccctggtcctaagcaggcttgagaaggggcactctgcctatacttacgaggatgagcaggattctcgcccctgtgtgattgtgataaagtcctggcagaattgcagtgtgccgacagtgtgatacaacataacaataccatatgggttttcatccaccagtaatggcagggaggcagaatcacagcctgagggaacaccagttgatagcctagaaatcatgtagttctgagttgaattttcctttggcaagtgaatcgagagctggtgacttaaacacatggaatctcagcacttgagagactgaggcaggagggttgaaataagttgggctagcctgagatacaaagtgaggctctgtctcaagagcaacagcaacagagtttttcccttcggtcttttttaaaaaaaaaatttaactaattgatcaactaatttaagatttagttacttttgttttgcctgcatgagtacctgcaccacatttgtatctcatgcctatggaggtcaaaaaaaggtgtcagaactcatggaacttgagttacaaatggctgtgagccaccatgtgggtgttgggaattgaacctgggttgtctggaagaacagtagtactcttaaccactgagccgtctctgcaaccctatgcatttataaactcttagtagatcaggaccattggtttaataggcagttgttaagcatttatgaaaatctagagagtaattggtgtgcattaaatcaatgtgtgaaactgtcagagaataaaaataataatttttaaaaaagcttcgtatttagatcaaagtgtgataacttctggggaggtggctgggattggctaaggtataaaagcactggggacatttttcctttgggggcctgcagcctgttggtgggggaaagggacttcctacttgctgatgccttggagggagccaaaggctgtgtggtgcaggctccttgctgtgtgtcatcctacaggccataggctcagcccagccacaggtcatggctggtcatccacagactctgaccttccctcagtaaaaggagcaagaagagaggcaaatgatgagttttagggttacctgtgcaatccgtgatagaggcgctcaatagtgagatccctgctgtggtctcctaatagtgttgccctcggcagaatctggtggtacaggcaaagaccgactctcctccagtttgcagcccgtcccgagagatggatgggctgctaacatgatcctgacatgtcaagctttggggtcagaggcaccaagggtgggcttcagaggcaaccataggatgatcagaacgggccaggctggggagggcagggtgtagctagtgtaagggtcattagggagctgtcagcatggtccactgaggacctagggtgtatcctcaagaggcggagctttccctgtgggtgatgggacactgcgtcattttccatggtggtcgtaggcagtaagcacatgacggcagaaacctggactagggacagagatgctggatgtcactgcgctgtgagcatggccgttagttccttggtgcaactgtaagcctctgctctttctcactgctacttggattgcgaatgtgaggcttagggggccaagcagttcctactcagcctctccttagaggctgcccatcatctgaaggcctggctgaggttggagtctgctgtcactgagacatcatgcccatggagttggcagactgagctgagtgttggctggtggcttccatttctttccagattggcagctctgcagggttgctgaagtagccctgtaaagtggcagaaggcatcatattctttgcccccagaaaccacacagtatcctctctaacatgcagacagcagtgattcattgtacatggggatagttattaaggccaccatgaagctatctgatgtgtctgaagtgctgtctcttcctaattttgtattttctgctgtttctcctttcctctgcttgggctggcttctgtatggttgtttgtttgttttttttaaagattatttatttttatgtgcattggtatgtagcctacatgtcttgtatatctgtgtgagggtgccagatcccctaaaactgtgagttagagacagttgtgaactgccacgtgggtgcggggacttgaaccctggtccatttgaagatcagcagctagtgctctttcctactgagccatttcttcagctccatgtctgggtttttcacctctctcggaagctctgttcttatctagtgaaaatcattcttgtcttagaaacccttggtcaccattatgtgttgtgctgattagaggaagaagaataaatatttgtggtatgtattttagcaagtcttaaaagcttggacagacagttgaaaacaagatcacccacagataaaaactcaaataggtttttaactcctggggttcacaaactcctaggctctgggaaaatttatctgtttaagccttgcttaaactttttggtcaagtattatccagaaggcagagtggcccaacagagtggaaactttgctgagctcctgagctcacagcaccaagctgcaatttgtttggtccctgtctctgacctctgaggccttgttgtctgggctctgcacacttatgtcctggtcatcactttgtagtttgaaagcaggggcccatgaaggattccatttgacattgatagttctgtgagggggaacagaggttcagagatcctagaatttgccttggggagctgggctggaggggcagagcccagacaggaagtctcaggcaggtgccttggggaaggcattgaagcctccgtggtgcaaagcacccaagggaccttgtggtggtctgatatgcagttgcttcatttcccattgtcttcatgctgccctttctgccacgtatggccttgtcactacactgtgccacgctgctgctactggccctattccttgaggccagctgcggcctgcctccgggccagaggggagagcctgtgaaatccacattggttccagcaccccgtctgcattgttggggcctcccatgacacaggacccgcactgctcacataatggcctctgttgaaggactcttctgtaggaatttagacatgaatttattctgacagtgtctgcttgggtctcccggaagtggaaatctgcagagaccaaatgaactcatgactttccttcttctaggagggctctgatgaaaggcctggggctttgttcctccccacctctcnnnnnnnnnnnnnnnnnnnnnnnnnnnnnnnnnnnnnnnnnnnnnnnnnnnnnnnnnnnnnnnnnnnnnnnnnnnnnnnnnnnnnnnnnnnnnnnnnnnnnnnnnnnnnnnnnnnnnnnnnnnnnnnnnnnnnnnnnnnntgaagggcttctgctttccaggtcctgcctttcttctttgtgtctccaacttggttgattaagtcttttaaaaaataccggtctatttatgagaaataagtagactcctgataaatttctacccggactgtctgagcttttgttgttgtggttttcctcctctttctcctcctcctcccccttcctgctcctcctccccctcctcttcttcctcctccccttcctcctcttcctccttctccttccctcctcctccctctcctccttctccccatctcctgttcctcttcccccctccttcttttcctcccccccctgtttctccctgttctgggaattgaatcatctaaatcctgatacacgctgagcacacatgtaaccacacagctatgccttggttctcagttgtcactttgtctcagtgtgccttctctgtgcacagccacttcttgtcagggagaatgctgttggagccttcccctctcaaggatggagacctggcaaatgtcacctgagattgcatgactaacagacatcctttctttctttcagcctgcaagtattcctaccacaagagatgtgaagcccaggtaagcattctgcagtttcccatgggacttctttgagctggacttcactgactgatgttcagagggggaggggagcctctggcccgaagcctccgaaaagaaggccctgtaagcagaggctggtggataccaccgagtgcagaatgcaactttcatctcaagaacaaaccgacaaagctttgaaatctatggttttcattatagaatataatgctgaagaatttgatttcagataagacctcaatcatcctttcctggccgtgccaccagctctttttcagtgatgagtgatgcctactttctccgagtgttggcatctagtcttgggacagaggcacagaagcagagtcagggcacatgttcagcctagaggactgtgctggctcccttggacagtagttagttgttcactgtggttggggaaaacctgggcaacctggagtagggctcattaggcctactatgtgtactcccagagtgctctgagggagggctggtcccctggtagatgtggactggggtccttgcctgtgatgagcagcaggaaagtgaggagatctagaaacacagtcggcaagggtgcagcttacagtggtttcccttctccgggtccccagctctggatttcttagctttgagattggtcttcagtgtgactcgagtctttgaagccctttctgactgtccagctgtcagggatcttggtgagctgtaggacaagggagatggggttctgctgatatgggagacatcaggctgtcttcaggctgaactggagttgtgctggggcatattgggatacaaggaatgtcatggcttcacatgtgtgtttcccatgtgggactaggaagggaagatttcctccacacaaaatcacacacacatatgtatgcatattatgtacacacacatacacgcattttgttcatatgtacatgtgtgtgctcacagtcgtcagtgtacccctgagcacacacaggcacacacacacagatggaaaataaatggtcttagccctatttttttttttcccagagataaatgacttttccttttaagtgcttttctggacagctttaaaacacgcagagagcaaagaggattgctcagtgatgctcagttgccttagccagtttaaacccagcagcctctcctctttaccccgtggctctcttccttttgttctgagcctagcagggtggcacagagtaactctgctttcccttcccagtcagctctgctctgagaagggccacggttccttggtcacacatacccatggatgggactgatttcctgactagtttattttctccttccttctgtgtcccgctcaccttcagtggcgcctgcaattggggatgctgtggtgagcagggaatatctcactcattttgggagcttatctgacttgtagagcttctgtccccatccagggacttccatgtgctttcacaatggtgtgtctctagtacccttgttctcgtagttcatcttgtcacccactccatcacctctgatctgagctgaagaaacaaacctttgtcattgcttccatttctgtctacttaggattccttggttcaaagaatcgtctaaaagccttgtgtataactgatagagcattgctaaatgcagcagttgtcaattcactgagatatgaaaaggttttccctcatatctgtctgtctgtctgtctgtctgtctgtctgcctgcctgcctgcctgcttgcctgcctgcctgcacctctctctttctctctctctctctctctctctccatccatccatctttattttttatttttgtttttatatttatttttttatttttatttttattttttgtttttttcgagacatggtttctctgtatagtcctggctgtcctggaactcactctgtagaccaggctggcctcgaactcagaaatccgcctgcctctgcctcccaagtgctgggattaaaggcgcgtgctaccacgccctgcattttttatttttaatgtggctttgactagcatgacagaatgccaccagcaataacaaagcacattttcattccaaagatttaaagctccagcggggccgttcactggagaatgtttcttccaggaactgggacgtggtttctcccccatcactgctgtgagttctgggtccttgcttattgtgtgtcagagatctcacttggggttggagtctttactgccgtgtgtgtgtgtgtgtgtgtgtgtgtgtgtgtgtgtgtgtgtgtgtgcttgtgtattgctatgcagccttcctgaatacagcttgggagaactgaaaagctttggttaaggtttggacttgggtctcgggtcagacctcattcgtctgtgcatcatgtatcctcctctcctcgttggtccaatgagggtgagagctgggcacagtccctgaaggccagaggtcgagagtcatgaatttgactgacatgatcattgctatatttgttttgataatgtcaccatcttgggtgtcggtccaggcctgcagttgctcctttagtaccaaggacatggagagatggttttgtagagaggactgagtcacagcagtgaaattgagacacactgaggagaccaagaagcccccagtatggtgcatgaggttactaccttcctgagttacggacactatgtccctcagtccaggccatgaggctcagtgggcagacgatagggaggagaagagacctggcctttgatcttgtgggcttcgggctgatagcaggccagtccacctgctgtgttctgaatgtgtccagattcacgtgttgaattgtaaccctgtttatgatggcattaggggcggagcctcggggaggctgtcaggtattgctgttggtgccttgtgaacagtgggcataaagcccttatcaaagataaggaggatctggagtgtctttcccttttgtcagatagtgactgcagagaggcatgactgggattcagtccagacctagcactaaatcccttactccttcttccatctcggagcgtccagcctttagaaccatgatccataaattactgtcgtagaagctgccgcagagcactaggtagccatactgtgaccgacttcagggacattccagcctaccgccacgaggaccccttgggaacctgggtctgccaggcaacacttgtctgcatttgctgaagtaggttggagtctcagttttcctcatgtgtggaacagttgcacttaaattgcatacagcaatggcctcctcttagagtctgcttgagataacgctgtgtaagccttagggaagtcaagtaggctttgtgaactctctggagactttggggtcccactgttctgctccctgggtgctgagctgactcatgtcagctcctgagctgcttgggccttgtgacttgtcccccccactccccatcggttgactcatttgcatgagggaaaaaaggaaggagaaatacagaagttttaggaaggcggatgaaaagacgaagaggggctggggaccgtaaagtgcgcaagaaccgatcttgtctttgtagcttgcggttgccatggacatggtctgctttgacatctgcctatgccttgagccacactttaggatcctgggtcatcagaggtcccctaaggagaccgaacatgagttagctaagctgaagcacacacacctgggacagcactgggcaaccacaaggcccgggctttcagcatctgctttaacccaagaaggaccagtctctggcaccagggctccatgatgttcttagcacaaggcctatcttcacttacccataccggctgggctccaagctctgttctgttttgttttgtttttcaagacagagtttctctgccctggctgtcctttgtagaccaggctggcctcgaactcagaaatccacctgcctctgcctcccgagtactgggattaaatgcatgtgccaccacgcccggctccaagctctgttctctctgtgacacacccaagatgcccagccctctacagagatcacagcaagggccacatgtgtctcttcttcccgttgcccattagcagtatatggaggcctaggctgacagaggcgtgcatttctgtgagaactagatgatgttctgatgcacgcaaggaagccggtgggagttgtagctctgctgtgtgttcagccgctagttatggatgtccccgtctagtgttgttgtgtctagacttaccctcctggtgcccagagcaccagacagtcctactgtgagagacacagggtccaggtgatccccactgtggtaggatgactacaccatgagcatttgagacagagtgaacttggtgggactttcttggtcttcagcattggagatgagactgtccagacctaactctgtacgcttttctcatatggtctagatattttcctaggaaaagtgagccaatttcactagtaagaaaacaaaacagaagctctaaagtcaattaaaaatttccactaaaacaacaacagaagccaaagtcccagccccctgtagctgagctcttgtgctaaacacgtgttcatcagtttcctgggcacttgggtacactgtgcttgtacaacataacttccgaggtttaggatttctgaagttctgtatctgaaggtggggtgggcaattataggtcaatagggcagtgacatgtgacactgtaatgcctcacctgacacaggcttgtggcgtatgctcaggaagaatgtaagtaagcgagtgctatcccgcaggttacactgaagagctgagcctgcaggcatggctgtttacctgtcatatgatgccaagggcttctgttcttggctgttactggaggtggcagcttcaggactaactgatgacacctccctgagagacagtccattctaccagctcaacaatttcccagtattcttccatttggctccccaccattcatcctaataatggaagtagtcgaattttaagctggacaatttaacaaacatttctactgagctgggcccacatacaacattgacttcaggggaatttcagcctaccaccgtgagggccactaggcctggcaggtaacacttgtctgcatttgttgaagtctgtgcttgagagttttagacagggggagttggtgtgtgcgtgtgcactgctgggttggtgtgtgcgtgtgtctgcctcagctgccagcttgacagctgccttatagaattgtttttttgaagccattgaagttattcgttggtgtttgtgtatccatagcagaattgaagggaaagtagagggatttctctctgactctgcatagcatctctcaccataaatatctgttgcaactgatggtctacactgacacatcattaccacccggagtgcattctatagtcgggtctcactcctggtgtttgtctttgtgttacttttctcatcactgtggcaaaaataccaggcattaaacaacttgggggagaaagcctttattttggttcgggagtttagaggttcggcctactgttcttggctctgttgactctggaccttggtgaggcagatcatgatggtgagaaaatgtgaaggaggtgctgtccattttgtggtggataggaaacttccatttccctacaaaggattaggaaccagacataagctgcagaagtccccagtgccctgcttcctccagcttgccttcattctctaaagcaacgattctcaccctttctaatgctgtgaccctttaatacagttcctcgtgttgtgatgaccccaaccataacattgcttttgctgttacttcataactctaaatttgctactgttatgagtcatatgtaaatatctgacatgcagtatatctgataagtgtcccctttgaaaaggtccattgacttcatggcttgaggaccactgctctaaaatttccagtacctttccaacttcaaccatcaactcaggaaccaaacagaacatgtgagcctgtgggggggcatttactatttaaaccatgactcatatttatgagtttagacacgtgggcggtacagtatatgcatcatatagagtatttaccctgccttaaatgtctcgtgtgctcctttcctcccccagcttctggtgaccaccattttttcttgttgtttttgtctctgtagttttccctttttccagaatgtcacacaagtagaatcctactgcaggcaacctgctgagatttgtttctttttctcacagccacattttatatcttctctttgtgtctcatggttgagcagcccaattctttccagcactagttgtacctctactgctacaatgaccatagttcctttatctgttcatatcttgcgtgctccaaattaccactggggtgggaaaagtcttaagtgtcttcaaactttgccctttaagggacactttggtctttcccatacggtccctttccggggaggctatcctcccctagctaactttgacctaggggctttgttcctgagagggagggtacttctgaggctcaggatatgggggtagcctgcccactagggaaacctcctctaggctctgagctcaccttggagtcagtgatccaagtgtaaactgttatgtaagcaaccaacacgtgccctgtgtgtagaaatgcatgtttttaaactccatataatctgagccccaaacaaagccattgactgtaggctcctggagcttcattgaatgggacctcattgctttaccgaggagaaaccaaggcttttttctcttatgctttcttttgtgacagtgttacttttttttagctggggtgggaatgacattctgtagcctagactggcctcagatttataccagttcccactacctcagctttctaagtgctaggattgcaggtgtgagtcactgcaccggctaatggagggctttgaaggatgctatgatgtgtggccagattggcaggaaggaccatattgtcttgtatagttagcagtgtaaatgtcaccttgtggtgacatgtttgctttccagcaaggttctatgttcaagctatgtttgtagaggattgctttccttatcccaacaataggccaaaggggatttattataggtgtgtgccatgtaataatgcgttagtcaacactgggctgcacatctgatggtggtccatgaacttgcgtcatctggtgatagtgtagtggtctgggttgtgcaagcacactgtctggtgtttacacagtgacagtcctgcattaccacgtttcacagagtgagtcctcattgtgaagtggtgcaggtctacataatactcttctgagatactacatttgctctaaattgacaccaggattttaaaaactacctttttgattcttcaagagtcagtccatattgtgttgtaacaaataaaatagacctagtatatctctggagtgaatctggaccagtttgccctttcatttgactgtttggctgtaacctggaagtctggcacatgacaagcattggtcccttgtatccttcacagggtttaaggtcatgtctgtgtaccttgaagactcttcaaagtaagaggcaatcttcccatggcccttggtggggccctgtgatgatgggcagctgtcagtggggacacaggtagtttgcttgaattagaactggtgagattccttgggaaacctgcttctgtctttcatccctgagattctgggaagtggctcatctgaggtagaagatcccctgctgactcttacagtttgaccagttcaaacatgcatatatattggttgcagtcaactctggtcataggacattaatggggtatctgcatgatattgaccagggaagttgggaaggccagtaggtgacacctgacctcctgcagacaggttaccagtgagggaggggcactgaggatatcaaaacagattccatttttgtgatgagaataacaaacacaagccacttgccctgggctcccacagatagtggggaccacacagcactatctctagtgtttgggtctagaggagggggacagaactcaagaccagctattgatgagcacctgttcctcaaatgaagatacttggtgaatatttttttgccttctgaatatgtgaattttgtgataaggtgtcttattcatttcttctggccttgtcttttttgttgagatcagaattgtataatgggaattcctctgtgttgctatctggaacagtctcaaaaagtttagaacctttattaaaaaaaataaaaaccctaggtctgatttctaattctagctcgtgttagagaggtcttctgtgaaattaagcttccctttgggcttgtgaaaaggacttcagccccctgttagcccaggactgtggcttctgcgggaacttgctcttgttcctcaagatgtgctatgtatagacacctgaagagaggggagttttctgaggcatggtgagcaggccccttcatggagtgctagagaacattagcatcagccagcctgcatcgaggccagagagggcactgtgtgtgcttcctcagttcttcttgagaatactgtctgctcctctcatttagaggactctacctgggtgtttctggagactggagtcagaggtcctggtcagtgcacttgggctgtggcatcttagggcttctgccaggctgcctgtggtactgcccatctggcctgctgctctttcccctgatcttcaggatcccccttgttgtctgtctaccttgccctagattgtttccaggaaggtttttgtgatcctagtccattgattccgcagccagggtgactgcctggattagattcctcacctgagcgcaggccagggtttcctgcaagttcctgaagagcagacctctgtccccttctttcagaggtgcattggtttaagtctgcgtctgtgtgtccatgtgtccgtgtgtatctgtgtctttccccactgtatgtatgaacctctctactcgcccaggggctagccagcattctggttttccagtccaaccctgcttattggtgatagtgctgtgtggtccccagtatctggcttttctctacaggcctgactggtcttgcagcttctgggtgcaaaaggctgattggtgacattggctggcttccataatgaaaacacaacctcctgcctcatcagctagctacccgtgttcattatcagcttgggaaaattcttgtaatcacacttagctctgccttccatccctcctgctttctggcctcagaagcagtgggtcctgacgtgaacttgtccttgtgttttgctgctggcactgcctttcctacgaggagggcctgacttctttctggaagattcccatgtgagctaacatttcattcaacaaccccctccccaactcccccatgcacgtcttgcccatcctgctttggggcgtctgttcatatttagaacttgacctatcaggagtgtctccctgatttctgctttcttatgggtgtctcccttacttctaggcccatgtcactgcctcctagtccgttgacacctcttgtttcttctctttccagattccacttgtggtctttttaaaaaagatttatttattatatgtaagcacactgcagccatcttcagacacaccagaagagggcatcagatcccattacagatggttgtgagccaccatgtgggtgctgagatttggattcaggacttctggaagagcagtcggttctcttaaccaccgagccatctctccagccccctacttacggtctttacaagtgagggagtctatctacccactctttcctttacctctagcccctcaggctgggcacaggcagaggaacacccaacggagaggccccctgggctgttatttgtacatatttgagaaacggtggaacctaccaaggaagcacatgtcgcacatgtcagagaagttctgaaagtcttgagaatctctggtccactcagggctcttctagtatcttcccagtattgtcttccagagccgaagtttaggtggggagaggtattctgagcaccttctcctaccctaacagtacttctctgtcctgcctgggcaggggaccttggtggtatctttataggcttgtccttaggttatctctgtgtgtcttcatccttttttttttcaagcaaagcagatttttaaaaaaagatttatttattatttatttttatatgtaagtacactgtagctgtcttcagacacagcagaagagggcgtcagatgtcattaaggatggttgtgagccaccatgtggttgctgggatttgaactcaggaccttcaggaagagctgtcagtgctcttaaccactgagccatctctccagcccctgtgtcttcatccttataagactttcagatacttcactttgcttcccagccaccccctcccccccaacacgaccctgtgctgttgccaggtgtgcctctggacagccagctggtggttggtcatgactgtatgtgctcggggccagttcgtggtggtctctagggtgaccttcctctagatggggtgtattccatgtagaggtttatgtcctgctgccgctgaattcttctgtcctgctgccactgaattcttcttcagccacttctagagtaagagtttggaagagaaacaaccccacctacacagggacaacagacagacagacagacagacagacagacagacacacacacacacacacacctcttttagaagcagggctgaactgactgcacacaccagtcctctccgcattttaacttgcgaaaccaagcttctgttgacaaggctctgccacttctgtaaagctgttaattttgggcaaggattcaggaagtggccacccccacggtcccctgaacacagaaagagcccagagcttccttatttccacctcccaggggcagccgactgaattcatttttgtgtgtttccagacttttgactcaccaccggagaattccccaagacttgctgaacaagtgggtgggtgagcaggggaggacattggaggattacaggttttagtcttcctgttactaagcatctccctgcttaccggatcttagggacaataaatacttgctgagccttaaggaaggctggaagatccgaatgaatggaatgtagaatgtagggtaaaaatctgcaattccagtcttactgtagattgccctcctttgaatctgaagggtcccgtgcttagctggtggatcctttggaggctctgatcttgaaggccttgaatggggtcaggagaggagaagtgaagggcatgtttattgtttgtttcagttcagccgtgctgaactttgaacccagaacccccacctgctaggccagccctctgctccctctctaacccctctgtggggtcctttactggggacatcttaggcctggagtactgatgaggtggagcagaggtggcttgtgagtgtgatgtcctacagaggtggcctggacagcgttgtgaggacactggtggatgataagtgttggatgctaggttaatgtcacatggtgtgaggtggggactctttgcagaatatatgaaataaagatttaactagtcagatataaaaattatggtaacttttactttaattttttttttaagatgtatttacttactttaggtatgtgagtacatcttcatgagagctcatcttcagactgtagctgacttcagacacaccagcagaggacattgcattccattacagatggttgcaagccactatgtggttgctgggaattgaactcaggacctctggaagagcaagcagtcagtgcttttaacctctgagccatctctccagcccttactttaattttttttttttttcgagacagggtttctctgtgtagccctcggctgtcctgaaactcactctgtagaccaggctggcctcgaactcagaaatccacctgccgagtgctgggattaaaggcatgtaccactacgcctagcccttattttaatttttaagtgacgtgttttatctttcactatgagtccttgtacatgtctgtgtgtatgcacatgtgagtgcaggtgccagcagaggccagaagagagtgttggatcctgtggagctaaagtaagaggcagtaactggaagatggctgctgaaactgaactcagattcttcctctctgagtgcagtgtgtgctcttaaccattgcgctgtcattacttcttatttatttacttattttacattacatcattcttagacactttgtacaaaaatgtcttgaaagaaaatttcccttagtgttctgatttaagttgtattccggaagacactacaatttcttactaatggttgactgtcctgtcctgaaatatggtatttgattaaccattgtgaatgactagtgtgtgaaggaatgaattaatgagtgacagcaggttgagactactgacccaagaggagttggagatgtgatgggtagctctctgtatttaagatgctggttgaaagggcccacgtccactgtggaaagccatctatttataagaactggatccctctgtggtgttggacgctttctctatatcatcagccactggtccttgtaaatcagctacttgaccagctccatgagactgtgtgatggtttgaaatggaactctcagattctgcgtggctgtggtagaagcttgcgtgaagtgctgcttgactggacctcagccctttacttatgggaggaccctttcctggtagacagtctgaacatgaagccagtgtggggagcgcacaaatccccctgtgtaagtgccactcactcacaggccttcagaaacagtcattcttcctttgagcttttctttgtgaggagaaagggagtgaggtgttagcaaatgacaggttaggggtctggacatttgcacaggaatctcctatgaagtgtacaaaatacttcgtcctggaattgggtggggtagcccattcttgtctccctcttgactgctcccctggaacatagtcggtactgtgttccttgtgtctggcaggaggggagttacagctgcgtttgtgagaggccggaaggaacttattcagatccctcccccccactccccctctgtgtaagcagagatgtcctgctggcactctgttttggagtgggaaggatagacttaacaaatccctttatttatagttgttgaaagaagtgagagagatgtgaatgtgtctgtcataggacaaaaggaggcgaggctgcgaggtggatgctcaaggctggtcccagacacgctcatgctcctttccagtgttttacaagaaactggatggctcagtgtgtcttcttgtagacctgtctgtccacctggtagtgttggcttcctttcaatatggcagctggtggtatccatggatgcactcgtggtagaaacaacagttgcagccccttaaatctgggcttccaaagttctaccatatttactctgggtttattggcacacagctatgctccaacttagcgtggaggttgaggcaggattgctgtgcgtttgagcctagcttgggcttcagagtgagtttaacgctcctactttcccatgagaagaaggacgatcaggaggaagaagaggaggaggcagaagaaggtttttaaactaccttatttcattggtcataacagatcccaagacaaactaggaaatcatcagactcaaggggaagggattgctgctgactctttgaaaaaaagattttatttatttttacttaatatatgtgtttgcctgcaggcatacattaggtgtttgcagttcccaggtaggttagatgagggtgttaaatcccctggaactggagttagaagtaattgtgagcctttatgtgggtgctaggaaatgaaccggggtcctctgcaaaagcagccagtgcttttaattgctgagtcatctctctatctgcattgactggacctcttgatgggggatgactgactttgcaaagaacccgagtgatgctattatatctgaaacacaagagacctacccaggtgagggcaggagggatagtacagggttctttgtcacagagctaattgtcattgttttccttttctgttaaacaggctctcactgtggagccctggccagcctagcagttgctaagtagttcaggctagccttgaactaacagagttcttcttgcctttgcctcacaaaaactaggattaaagacctggaacactgtgcctggtatggcagtctgtcctcactagctaaaccacgagtgaccaatgccagcattctgtcttgttaactgtgattgctgagtgacacagtgctgggcacatgaggaaggatctgggggaaatgcggctgttcacatcagacctgattcttgctgtggaaattgtctgcttattttgaagcaaatacattttggtccttggcattttaagtggggagaatggcttagaaaggattagtctttctccaatgcaaatgaatttattagttttttttctggttctttagcaaacattttacttattatcatgcagtctttgtttttctgtttaggagaccagacaaaagaatctgataagtgttggctgaagagtttgtaggcagggccccggagttgcttgatggtgggagtctaggattggcccattcgtctgtgtgcctgagagcctggcatgcaagctttgtccttggccatgcatcctgacctcgtacttttggacagatctaccacacaggctcttacaccagtccctgggtaaatggtcttgtcctggtgtctctgttagaacttgagcccagtaagtgtcctgggaagggtatctttcactcactaatgagaattctcagaattttgttccaatgatagactcacatttgacttctgatgttggggagcctagaggatgcagaacagtgttctgtctggccttttaattctgtttcatctcctacaagacccatatggtttgcttgaaacataaggagatccaagatgctttacaatagtcctttcccccagaactcacaagcacagaggttggagaggacacgcaggcctaagagctgacatagactcaggccagccgatcccagaacagagagaaagaatgctggggtggacttgctgataactatgccagaggcatgatcttctctagtcctcttacctttgggggaaacagaaagccccaattcctgtaatttcaccaccttgcctcctatcttggagccctgtctgtggcaggcagccctggggtttaattgtgtctgccttgctggcttgtttctcatggggattagagcaagctaaattgggctttcccacttagtggataacagggcttcttgaggaatgtgagcctaattaaggattccagggtcatgcctagcaaagaggtcccaggagcaaaggtagagagggctttcatcctcagaaaggttaacaagtactgcagcctgcatttcatgcccctgtccctgagggtcccttgttcctcgcaggctccttggggagcctgaccttgacattcactggccttggcctcaggctttggaattgttccaggagcagccttgaatgaagagtcttgttgctggtgggggtctagtcttgactggtgttctgagaatgctttgggtctctgaaacctttgataactgttaggctaaccttgtttcttcaagttcatgtgatggagtcttgactctaggacatggctgtgtttataggcatggtcttttaagaggtcaagttcaaacaaagtctctagagtgggttctaatcccacgtgacctttgttctcctaagaagactctaagatacaggtaggcaggtaggtgaccaaccacatgtgggaacaaggagaagacaacttcaaagaaggaagttggcctcctgggccgaggaaataaaagcctctattgtttaatctgtgtctgtggggcttcagtgtggccccagcagtctagcatgtgcagcatttaaatagagtgttctgttctttgagtgacagcatcaggggatgaggaacttttctcttgagtcacctcctccttttatagtgagtgataatcccagtcataaaaaacagttaaataattcaccttttctaaagctagtaagtacaatgggcctgttcattggttagcgatatttaccagcagctgtaaaagctgtaaagtgataaaaagtgcttcttggaaaaattttctgcctggatgctgttctcagcctagatgagaggtggcctgacccacattgcactctgggtctcaggattctcccaagctcacaaggccatgatatctctcccccactcactctccagatttggaaggaaggaaactgttgccctctggcttcctgtcaaagctgaagtgaatctgcctccagttttatgtagcttatcctgagtcacatcattctgatcaaagcaatttcatgatgctttgggtaccaagatggttccttctttaagcaggaaactgattcctctcccacctgcagtgcagaggtggctagtgacccgccttctctgttcctttgtctcgtacctgaaaggttattggtggatttattggaagttacttgcatttatttactgattcatttgttttgatgctgggagtggggtcactcagggaatggtgtgtgctgagctctgccaaattgtccccctaggcctcgtgcgcacttactgagagccttttagtgagtgatggctgatgccgctgggttgcttctcctttcctgatctccgtgcatgtgtacttcacgcccgctttagagagttgtcctacgggcatctggagaacaataagaaagagggccagtggagagagcaagcacccaggcttccactgtagtgacgaacatgtaaaaacacgctgggatcccgagggcatgtctctccactcttccacggttctgtggtgctctagggagctcattcacaggacccaacaggattggaatttttgatgattcacaaagggttggatgcaaacatacctttattctatgtagtagcatgtagtggttttaaccatgcatctcttagagaaattggtagaaaaataatcactcttgacgtggcttggccagaatgaaatttaattggacacgacagccagggttgaattcatggcttaattgtgtgaatggaagtgtgttgaactggctagtcctttctctccctggggactttgacctcctgagtggtagtcatagtagacctgctcctcctttaccagagactcctgctggccatggtgaggggcagaggcggctggctggggcagaagctttctttttcaacatacacttcacttgttggttaaaactctaccttttgcccaaggttcaggaccaaagcatgcatgtattcccccaaagcatgcatgtatatacacacacatacacacatgtgcacattcatatacttattgactgacacatcagaactctctcacaggtccctcactcagacttttagtcatatatgggctgtcacaacaactcacatatttctcacatatttctcaaaaaaaaaaaaggcccaattttggggaatcatacattctaggcaagctttatatcacagagcccacccccaccttcctcctagtctctgcgttttaaatatgcacactgccattcacatgtgtaattagtgtcaggtcataagccccttctgcttccttgaggacttgctggcccggagacaaggttatcaacatcagcaggctccaggcatctacatagccaggtgtgggttgggcatagccatgtttgtttgtggttgtccttggtaaccacagattaggccacagacaaagccaagtcaaggccataaaatggctctcagactggtctctcagaggggccctggtcaggtcaagagaaggacatgggtcccaagatctattgcttgtaactcagggcccatagctctctcctgggattttctgtagctgccagctctgaccctttactgccaccttttgtcaccccgactctattgggtgctgccatgaggaggaggacaagcagctagagcccgctgggtatatttttgtgagattcatcctgtgacaatcctttttgatttagcttcccacgcacaggacagaatgtgcagaatttctgtgttgatagggttcaggacaaagacctgcagacaggtgtggcttatataggacgtgtttatggagccagcttgagcctgcacatgcgtggccccatgagggtgtgtcctgatgccttggctcttagcctgtcgtcctctagtctccacccttctgaagagtactcagcctccatgatgccatgccttggctggtaggtgcacattcacagaaggaggtgcctcagctcagagactcctgagtagaaccatccgtagaagcatacccgaggaagggttgacactgggagggcccttgtcctggtgccctgcattagtgtctgctactcagttttcggtccagtttgtggccttggatggatatcctgagactgaagatggccctggcccacggtgtttccctcagtgacatgccagggggcagaggaccagagtgttaggttagagctgcatctgaagaggatgaacaagcatgaagatgaagaatatgaggtgtcatcctcatctggaccctggacagacaatgagctcacctcattctgtgacctggacaactgcctgctctttctatatcttcatcctgctcccgctggctcttcatcctcaagagatgaagttggggagttgggtaggtgggtccacaggtcacaggggcaagagcagtagtgacagagccccagagctttgtgggctccagagagtagaaagaagtgtggagaaactgtcctgctttctagacaggttgaatggcagttggaacctatgagcccacaaagatagccactgagcccaatcacaggactgctggccgtccatgtttcttaatgccaggttaactggcatgaaccaagaatgggagcatcctgagagaggcaatgcggttctgtctgtggtcagttactgctcttgctttacacaaggagaagtaaactacaaatgccgattatagccaggtttctctcgtcctgatatctggttgtagctaaattggaaggacatatcgtgatgtgttttgttgattgtagatggtctgcctaggacttgagtaacctgatcacagagcttatgtctcatttctagtccctggagctgcacactgcacagcacctgtttatagggggatgtgcgatgtagaagaccccctgccgtgtgtgtgtgtgtgtgtgtgtgtgtgtgtgtgtgtgagtgtgtgtgtgatgtttaaacaaggtctccctatgtatccttctctggtctgaactctttgtagaccaggctggcttcaaactgacagattcttcctctatttcccaaattcttgcgttaaagatgtgtgcccatgccaaacccttatccatcatttttaaactcgagtttctggcatggtataggaattcctcccacatatgcttctggtcagttacttgaaaatattggtaaactatatttaggacagttttcagtttatagaaaattaagcatgcgtttggtatatttaaaatctgtctaatgcatagtacctggtgagtcaacatcaatacattgttaaccaaagtccacaagcctataatttacacacggggttcattggggtgttggtccatctgtgggtctggactgttgttagtgacatgtgcccatcgttacagtggcggtgagaatagttcaactgctctcaacattgtctgtttttcctcttcctcttctcttcctgcagcccctgataaccacacacattttattctttctctaactttccattctctaaaatgtcatagtcggaatcatgcagagggtagcatcttcgagttggttgcttcagcttagcgatccacatttaatgtgcctctttggctcttcatgtcctgttaggccttttctgcttaccaatgggtaagtagtattctgtgttgtggaatacaggtgacatcttaaaggcagagactgattgcgcataaattactaactggtactaggatgcctgtgtgccccagtggaggcttgctggagtggattgaaccataattctttattaaccatgagttccccttgttcagcgccatcaccgactcccatcactggcccacatggttctagtaccagttccctgagtgtccaaagccatgggttagttttcactctgtgtttatttgttggcttcttcccccatccacccatcaaaatctaatatgtacaggagacactgagagtgtatgaattcaaaatatgtgtttctgctgccagtcattgtatgagcacagaggagatgaagagctggttagagggaagcgtgagtgcaaagcagaggacccctctctctgccaagaatatgagtcagcgtcctggtggaataatggcgtgtcccagacagatgagtggccatgtgtcacatagctcttgagaaacttactaaggaagataagcactataaatagtgtccacatcagagaccaaggtcatactgctacctactgctcccaaatggaaactaccgtgactggacagccttcctttccatagttccagaaaactctttaagaaggggagttacccagggggtctaacgtgggtgagccaggagaaagctggggagtaagacatgtcacatgagcaaggtcctcagcagcctcctggacaaacaagaagcacgtccacgttttgactcccacggggactttagctcaggacacagcagtctctgcttgagcacacttcatctcccagctgccctgaaagcagggtgttgttcttagaggttttactgcttttccctggaagcttagcgagctgactctgggagagtccaagggaagccctttccactgtctcaggaggagatatgcgtagactatgttttcagtttcacatgcataggaagttctagagaaaggaacccacattgtagagaaaagaaaaatccataaatgtgaaagtttacactcaccagttccagcttgaaaccaccctgcagagacctccaccttctctggccccagcgtctcatgttgcccaatgaggaaggacttagctggaggtacactaactggttgcttgacattcaaggtgaacttctatttttatgaatgatgtgtagatttaaaaaaaaagttttggatgggtgtgttattacttcttttctaagattctcggaaagaactagaacttcctcagagttaggagaatgtggatcgtgttgactacaggtgctgtgacacagtgccagcctctggggaccgctttgtggctcctgtacctgctacctgagaagcccttgttcatgtttcttttctttctttaaggtggtgactccctgctctgtgcaagtccacctggaccaggtaagactttcacattcctttggggctctggtatgagcagccagggtggtctctgtacaggctctgccttccttggggatttttctcacttagagggtagaaaggcactctcctttgtttttgttaagatagaaaatccacccacctaagaggtggtcccagtactcagaaggcagaggtaggcagtgttcaaggccaacatggtgtacaaagtgagttccaggacagccagggctatgcagaggaatcttgtctctcaaacgaaacaaaaaaggaagcaaatgcccatgttcttttgcagtggcaacctgtaggatcagtagcatttacctttggggcttggacccccggcttaaggtgctgagcccagtcagtagcagtgccagaggcacagtgtggcattcacctctaacatatgccatgcttttatctcactgagagtaaacatagcaaccctttctctgtgacgtgtcattgggtgagtgtaaagtttccctttgctccttactgggttctgctttgaatgtcaagaccacctgctctttgtttctagtgacttcttaacttgcagcaggcctgtgaactaggaggtaggagacaggcagccttgttaccaccagtcaggagtggctctgaggaggcccctgtgatgccacccagggttgcttggggagtatacactctcccagcctcacttgtgagggaaaacagtgagcccgacacttccagcaaggtgcctttcatgtgtgttgcttgacgtttgcaaagtggatggggtcatggcgccactctgctttcccgtatgtagcacccgatggctcagttagggtctttgcttgttttcctactgttatgtctttgtggatggagcccagaggtctgtagacaggaggctggtcctggcttgtcttgtagggtggtaaagcaatctctgaggcctcagctgagaggtggcacaccagccttgttctcttgaagaagccaagcttagatcctggtctccatgatgagcctcagtctccttctgttttcagtgaggatggtggtgctccgtgacctagctggcagccaaatgaaagaaatgcaacatgcattccttgatagaagcacattctgagagttaccctgctaggtggtgtttacacaaactgctatggagtagccaaccataatggcatagatgatgcttaatttaaaaaaaaaggttttaagcttctttggttagcaactaacacacaaacacacacattagctgaggctacctgggtcaggacatcattgccatgatcttctgcctcagcctgttgtccccatagaaagccttttaaggcaggcaggaactctcacctcctgtggcagccagagcccctgaaaacctgcccaaggctgttttacagttaagttcaaaaaatgagtaaggggcctggagagatggctcagtggttaagagcactggctcctcttgtagaggacatgagattgattcccaacacccacatggtggctcagaaccacccataactccaactctaaggcatccaacatcttcttttggcctccttaggcaccgtacatacctattacacatatatacatgcagtcaaaatttacatgtggtagaaaattagtttgaaaatcttaaaaataagtaagtaggaatatactctacagatgttatagtgtagtgaatatatctatctcatggctgttacttttttttttttaaatcaattattggggactgtgcatgattgaatgtgcacatgctgatgtgataggctgggcagtaggggtcagctgaccctaacttcactataagttctgcgtggctcagtgagtcactgtgttagggcagctgccacgtttccgggtggtaagaagctataagttctattatggtgagactactgtcttgcaggtagtttttggactgaaatgttatatggcatgtctttctttctgcctctctgtctttgtcttctttgtctctgcttgtgtgtgtgtctgtgtgtgcttttcttcaaaacagtcatcacatgtcaactcggtattaagcactccaacctttgcagactgctttgtccacagacaggtctccacatcaaagagagttctgatatttcagcgaattcttggggagggggagtcaactgaactgtgaagattatgcgtgtgagctggagctgatgcaaggacccgtgtgggtgttctggtcaggtctttctttggctgtgtatctgcccttctcagctgctgcccttggtggcagtgtggggggtctacataggcttttgcacagggtgtaacagagggctcctacaggttttaatcctatgcgtggctttttccttaaggcatggaaggtgtgtgtggggacacgtggaagagttggggtggtggctgctctggcaccactgccatctgtgttgtctgcactgggttgtgtggggcagtctttccctgacacttacatatgagggtttgtgtctgcagcatcatatctcagcacagaaagcatccagtattcctagcactcctgtcctgcatgggctgagaatcctctgccattggctcttgaagttgcgttggctcaaacacacattgagatgtcactgtgaggacactagaccacgtggctggccaggttacctgagaacaggttttgttatggctgtcattccttgagtacttcctctgtacctttgcctgtgagatcaccagtgaggctcagcaacgactagaagctcccgaaggtcactcagagagacatggcttctttgcctgtagttgtgtgtgtgctggcgctagtcatcctcactgagtctgttgctggagtcctcagagcttgggtcctggcagccctaacacgagaggcttggccacccatccccaacatgtcaacgagagagacaatacgaaaaaccagagaaaggaaacagtgctcacagaggtctggtaccacccttccccctctggtactgccctccgctcccatgtctgttttcgtgggcatgataggtttaagtttaaacacaggttgacatagttgagcagtcctggtcaaggttggctccacccatcatctttggcctcttctccaaggtggtctgccattgccagagctgactgaacacttccggcactaggcattgactttaggccttctcccagcacgagtttcctggggaaaaattccagttctttggggactattgtctccatagtctgataggcaaagggaggggcactctgggttctttagaatatcttccctcctgccaggatggtttcctttctgcttctagtgttctggtgtaacacatttgtaaaacaaggagctgtcttgtgcaaaactgtccacttagagagaaagtggaagggaaattagcgattatttagggctgctatgtttcctgttcagggctggtgactatcttgtgagtttgcagaacttgtctgtggggtaaatatcctggaagcagtggctacagacactccaagggctctttgccggtggatgaacatgacaagcagaggttccaatgtctatgtctcctgactactttcacaacatccctggactcagtgtcacctgagctgacacacgaggtatccctctgagatgctattggctccctctgcatgtgatgttaggggtcctggtgactcatgtctgtgactcagcattccttcagcttggagagcaggtggtctgaacgccttctgaatatgccacatacagctgtagttggcagttgcttctgaggttgccctctgccttgcctgtgccgtggtcctcatgtctacacctcctgctctgcagcttggtcctgagctggtggccttttttccacctgcctcctgcactgcctgcctctgtttggtgggtgtgaacctgcagagttctcttcatctagcatgtttgaactctgtgagctgccaggtctgtctgaaacctggagtgctgcaggcttggggagtgacagtttgaatcgctgtggcacatttcattgtcctggacagtaagaagggcacgataagccttacctgatggactgagtgacagcctttgatcagggactggctctagggacactgttgcctttaaggtccatttatttgtgggaacaaaggtgccttcatgatggggaggagggacgtttggaatggctgccaggcattgacctgcgatgcttggtcttttgtttctttgctgatagcacagcctgtttgtccttctggcttacaaaagtaggatgtgatgttggcgtaatacatgaactgaaagtgttagttggtatgattgagactaggagctggaagaggaacctctctttgggatgactttgttgatgaagcaagtgtggtgggtgggctatgagttctctgggaacttgtgtgaaaaggaagcctttattatgggctctgtgtatgtgtgtgtgtgtgtgtgtgtgtgtgtgtttgtgagtgtgtgcgcgcgagagagtgtgtgagtgaacccagggttttatacagactaggcaagtactccttcacagagctataaaagggctgtaaagatataaccctttacccatttttattttgagactgggtttcactatgttgcgtaggctagcctcgaacttgtgatcttcctctggagtagtgaggactacagatctgtgccacacagcctggctggaagcttgcactttgtctgtaaggaagggaagagcagagaacatatttatttatataggacattgcagaggatgctgacccaggttgtaggacatgtcctgacccatggctgtcatctgggagtcaaaggtttgcgtcattgtaacttcattaggaccccaggcaggatgaggatagggggacgataagccttacccgatggactctgtttcagaacagtgaggggcattggcgatcttatggtctgtttctgtctatcctaggtagtgggaacttcagtgacgggagaggtgttctctctcaggttctgtagaggcaggatctgcaactcagctgttctgagacttgtatatacatgtatatgtatgtggtctcatgtccacataggaacagaacgtaacaggactttcaagtgtcagcctaaagtacgtaaatctggtcctgtccaggcggtgacatagagagtcctatgatgtggatctgagtccctttgtaaaagtcccactgttctgcaaaatggtgtgtaaccactttcctgtgggactttagttttccagcccttggaaggtagagacacaaagttttctgagtttggggccagtctggtctacacagggagttccagaacagccagtgagtgataaataacaacactgtctcaacaacaacagaaacaaaacaagacaaaaacccaaacataaacacagtgaaaattcctagcgctgctcacaacatacagaatacccaggcaaaatgggctgagcctgatctgcttgcccttgagttggagaggacaatgaagtcttttaattttgtggttttgctgttgactttatgttgttatcttactgttttgttgcctgacggggagaaccagtctgatgagcttcagagaagtcgtctccttccggagggcaagggtatggaggtcatgcaatgtttcatgtccagtggatcctctttggagaaagaggacaagaagcctgggacggggcagcgctgttagacaggtgtatgcatctctcggtagccaccaggatcagatcgtcctgcagagacacaaccatgctgtaaacatagcctgatagctctccacggaagctcagaggcaaagtatgtatttttgtcgcttttacttcaagtgctgtccaaaggagcaggtttatgttagtcacaatggagtcatgacttcagatgcaggagtggcttttcctgtggagcttctggggtccatgcccatgacatgcttcccgtaaggaacagaggtacaggtagctcagtaccatagtgcttacagggtggctccattcctaaaggaggcctggcctgggctcctgcgttcccagggctgtgtttgtgaggctttcagggcagtgccagctgcagggtgcaggtgtacacgtaagtgcaggtgcacgcgcaggtgcaggcacaggtgcatgtgcaggtgcacagctcttgctactgccaggttcatacacagtgcgtgaacctttgctgtttctcatgctgcaaggaggagaggtcacacagtacagttttgaactcataaagctcacaaaggcttggctttgctttgttttgtttaattggagcaaagcaaacgggctgattctgtgaaatatgacatcagaagtcagggtctatagaagctgggggtggaagtttccaaagcaggcttttaagagtgaagtggtgctctggattgttgtaattcaagatatgcatgtacatgtatctgtattgtggtatatgtcttcatgcatggtgtgtgtgagcatatttttgtgtgtgcgtgcacagtgtgcttgtggcgtgtatgtgttggcaccctgttcagtaatgtttgcttgattcctccaaccacacagagaaatgagagccacatgaggacagactgccttatttagaaagctgctcagggttccctttcatctttacatttcaaccactggtcatggtggagtcttaactaggtcctgagttatttcagaaataatcgggtgaggaggcactccagaggaatggcaagagctgacgttcatggttctctgactctgtggtaaatttagcagtaacaggtttcaaagccactcaaggttttcatctgttgaatattgggagttggtgaacaggttctgggtgaccagtcatccaggacaatggagtgggtacccttgtactccagggctgtgtggacatcttctgcagtggcctctttttataaatttatggtgtccatgatgtaaggctaggaactggatgggtgtagattccctgcttgtggattgcagctaccacattggtaaaaataattgtagatttctcattgactctcagctgttccagggtgaggttgaggtgaacatgcagcattgggaggtggaaggcaaggaacccttgtggacagaggatctggggaactgagcagattggggtggggtgggcaaagccagggaagcaggcttatgtccaggcccatgtcacttacttgaggtgacaagtgggaaggtgtgaggccagcagccccttgcagaggagcactgggccttgctgggaaagcgcctcaggcctgtttcttaccagctggtcccttctggttttctagccctccccacttccctaaggtgtgggcatcacaccttaggtgattcctcattttgtctcttcccagaaagctctattatagattgcaggtagctgggattcagcgagtccaaagaggcacagaacctgagtttggcaggactcttgtgtccccagagttgttcacattctgtagaagcaggcagcccctcgaggacagcacagatcagcctggctctctgggctggctgatggagactcattcattacatatttactgactccttccctagcttctacaccatcctgtaggtttcagggaagcctggatgtcctcgttcttaaggtatgggtggctgtggacggacaggctttaaagccacagtcctgaactcctctcatatgctcatcttcttagctttgctttgaagtgttcttacctccctgtacctgtcactgacttgaagagagtgaggtctatattggtgatgaggggtgacaccccccccccagttgcccctcacaattgaactcacacctgtcctttcacctaaggacttgtgtgtgatgggaagaacaaatagggtaccagaggatactctatcctggtattactggagttgttccagtcagagtctggttcccaaagccctaaaagcttaggttcagccactggtcctcaataagccagaaacaagtgatacagaaaagcagagagagatttatttaccaatatagtcacaccagggagaagaagaaatcaagaggttcaatgactactgagtctgccttcttggactgaagcttagttttaaatagagtgcaagagtttgcataactaggcagtcttggtcatggcatggtcctgtctgtccttagcccatcattgtctgggttccagtctcttttacaacagagtctgatcagtagtcagaactgtgtgaaatacctttatgagaccagctttccctctggctgacaccaggcttcagacatttcttctagcattcgattcttagagaaattctaattctattgtcccaatagatggatagtcagtgtgaggactgtatctctccatcaataccttggcacttactgggaagttagagggttgtaggaacaactcaaaatgatgtttccttaacagtcacacctatctcagacctgtaagtctaggagtgtgaacatgcagggtgaggatgggcccacatgcacacatagagatatgcagggaaaaggccttgtgatgatgacagaggcagagatccccggatccccggggctgcagtggtcatgtgaagatgcaagagacaggcccagtcttgcatttggccctgctgactccccagtctttcatttctagccccatatgtgggaagaaataaactcccgtggtttggaggtatgcagtgcagggttcttgtttcagtagcctcaggaaaccaatactctgggaccattgtcatattacttaattgttctccagagaactatggagtgatgggagaagaggccactctggctgcagagcagtgaaatagtcttcctaggaatagtatgtaggaatagcatggattcagagatgctctgtgtgaggcccatgccaggaagagaactgataggtcacccatggaaactaagaagcaacctttgtctatgacctgtctgcggcattggacaggaccgtgacacccctttctccagggaaagccaggacagcaaagccagactcccaggagttccttatgtagccagcagcgattctgtgagcaggatgctggtaggccagccagggctgggccagtcagtgttcatggatgcttccctgggatgccaggatgctggtaggccagccagggctgggccagtgttcacggttgcttccctgggatgtctgacgtcagcccagatctttgttcatcagtgtcttgtttcagttctcttccaaaacatctgagatgcggtgaccctggaggcacagatctttgagaagtctgtggctcctcccatccaaccacaatccagactttgatccttctttttctttgatttcaccatcccctcccacacctaaaataacatccatcttttgactgtgtccaactgtgaggcgtttaggcttctgggtttctgggaaaggcagtcccagagaggaggttcctggaagctgagcactgtcaactgtagccgggagctacacatctcagcacaagtcctactgggaaatggaaaatccccctacagatgcacccaacaatgccagcctcccctggctgcctttgtcatccagtctttgaaagccaggttggttcttgtttgagcttttgttctccctctgcaggtggaggtattgtgaggcaaggccaggacatgttgacctttggtggcgtcagcttatgcacaaagggagcacaaagccctagctaatgattaaatgcccacactgggttgcagccctggttacacttgaggtgattgctcggttcttaccatcctgtcctctcactgtgtttgcagttttggggctggtagagaagggaagaggctggcagggtgacagctcttgtctttagcccccaccccctttccttcttctggctccctggggaccagttcctgagctgatttctcttaaataatgacctaagtccccagggtggcatagccagcttctttctgaggggctcgtggaagcaggggtttgagtgattcgaatgctgccaagtctggaggctagtttgccctgcagtaagccagacaagatggccaatgggatttcctttcttccacggcccgccatgcatgttaatgtggggccattgaagacaatggccacgtgtgactgttgacagaactgtgacttcgggcgtgatcaaatatttatttgttttggattctccccccccccaaacctttagaaaacatccttactaattatttgagaattgcatataatttattgtgatcatttttactttattccttccctaacccctcccagaccaaaaccaactccctatccccttcaaattcatgctgttattttttaaaataacctgaggtcaaatttgatacacacacacacacacacacacacacacacacatatatgtatctatatctatctatataacacatatatacacatatacatatacatgcacatacatgcgcatgtatgctcctatgtgtggggccattcactgcaccattatcaacttaccaggggctatacccttaaaaaccatggctctctgccttacccagatgccgtcatctctcaggagcccctcagttggaggtggagctcatggactgctctctactcttatatccagaagatgtttttcactccaacctccccagctccctggcttttagaatcattccattccctcgcccttctgcagtggtttcctagccttgagtggtatagatgtcccagttgtgtttgacaactccactgacatccactctctgtacttggacgcattgtgagtttctgtgctaaccagtgtccactacacagagatccctccgatgtggcctgagagcggactgatctatgagtacagatatctgaatttagaggcagttgattaattatgtctgttttagtagaaaaatactaagttatcctctagggcccgtgagctcccagctgtaggttcttggttagatttacaaacttaatactggtactgtctttcagcctgcagtgcaagccttaactctaactggaaagcaaaagcaacattcttgttattgttgcacccatgggcaacagatcttgcctcaccagggtcattattgtagctcacagggttcacaagtgggtaagtctgatgatccccccccatcctcatcgccccccctccccgcctgcccaggcctacattgtatcttccagtctagtactgtgaaagctagccagctcagtacctactttgtttctcagtgtcctgtgactaaagtgtgtggtgtcttcagccataggtccttacctattggataccttacttatttattattccttaaattgtaaagctcttagcctatggcctggtgacattgtaaactcccagtcatgtgggacatctgttggcatagtatttcaatggtctgagggcgttttaccatcaagagatgtgaccaccaagataccgtgcactgttcccagaatttgtatcagtagccagtctgagagccaggacttgatctcaagttccttccatactgacaagtggctctggtggcctatttctaccctgcttcgttgacgtataggggtagaccacctggactgatatcttctgtggctgcagagtctatttggaaaagcaggtggtgtctggagcagttccctggggtcacagagagcaaacacccctgagtgcctggccagcagcaggctgctgtgttatggaagtctcaagcttgtagatagtggttcctgttacagccgtgctcccctagtgccctgggaacttcccatacagaagccaggacttctgtaggaaagaaagcagttttgtggttatcggaagctgtcgcttttcagttgctcagttataaagaaagaataagaagatttgtgtgtaattgaatgtttaattcagttgcacagatgggcacacatctgccgcttcgttcccagtgtggggagtatggggagccacctgcatcttttcttcggccttaagaaatgtggggactgtttattggctagtcctggagagcaggctcaggggtacaggatcaggggcttcagaggaacctgatagtcctagatccaggttgagatagcagttagctctgttgttacctttggctggcacataacttggatctatagcttacttttaaaacattgttatttaaataatagtcaccaagctaggaaactcatttcaacaatttatagataaagaaaagtcatcacttaactcttgtcttctttcttttgtgctggggattaagccttgggccttggcatccgagagtgccacacccactgcccttcctttcttgtaggattgtgtcttggggtttccaaagaaaggatgaaggggccgctctgtgctgagtggcttgtacaattcgcaaagaggaagtgggcagcaggtcatgtgctgccttggaggaagaacacccccacccctgctcagttcttaccagaaatggaaccagaatcagatccagctcagatccatgggcagctgacaggaagtaaggactgtgatctgtgagatagtgcctgggagtcagctgcatctggaggcccaaaattctagtaggtgaaagtcagcccagtctttaaagattgatgtttgttttatacaagcagtccctgcagaggccaggagagggcactagatcccctggaactggaactattggtggttgtgagccaccttgtgagtgctgggacccaaacccagattctctaaaagagaagccagtgctttttaactgctgaaccatctctccagcccaggccctggtcttttaatcatgtgttggaaaaagaagaggaagggcctatttcctaagggaaccaaagagacattcaatccacgccacaaggctttatttgggtcctcattcaaacagaaacaagaacaaaatagaacgaaaccatgacacagacgtttctgagacctttaccttttagactactacttccatttcttaaagtctatccctatcttgtccaattctggttcgtgtggtgacgtccatgccaggtaggataagtgtaggttgctttcatttggcatttgggtgaagtggttagctgggctcgtccgtgggcttcaggagctgggctgcacttcctggggacaaggcaggaagtgaatggtagagaccagcacagagcccaggctggccaggagacacacataagcttttgacctttgaagtctggaaggagggcatgagagatggctcagctggtaagatgcttccacgtaaacatgagggcttgagtttgtttcttaaaacctacattaaaaagctcgacagagtggcaaacgactttaatcccagcactgcagagattacagatctctagatcagcacattgctagggctctctgggcatcccgcctgggctgtggtgactccaggccttcgagagttcctgtctcaaataacagacttctgagattctcgctagacccgaggttggcctctggccttcccagcacactgcatgtgtgtgcacctgtgtggacatagtcctccaggtgctccgtgcagacatgcacacacgacacacactgatgcacacactgatgcacacaccgaggcggctccctgagaccggcttcctcaggagcaattcaccagaatggaccacactttctacacaaaacatttcatctgaataaacggttgcttcagaccagctagatgctcttgtaaagttatttttcagtgggaaaagtctgttctttccttggagagaactcactgtggagatgagttggcctggtcctgtgaggggaaataaaggcttcatgaggtatcgtgggccctctctttggtattcatgtaggacctggccatggccccacagtggccatctgaagagatcaggacaccgaggggtgtggctcagcgggtagcctaaggaggacaggcccagtagaagcacaggtactatggttcttagtgtggtcttgaactcagggtctcattgggaaaccaggtgtttacaaatattctgtgctacctctcccaggctctggtgaatttgtaagccaacaggaaatgaattagaggactgtagggtctagctctagtgtggagctaggttgtagcacttgtctggaagaatcagtggggggaaccacaggtagtaacaggtagatcagctggagttctggagaggccatttgggcgtcacttcatttatttgggttttggagcttggggtagattttgttctcactagcaacagaatggactgtaagcattcattttctcactagcatcaggggtgttttatgagcccttcagccaaggctgtcctctgattccttgtttgacatctgtttgtctgtggggaagatggtacttgaggttacataatgctacctcccttgcgtctctgtgggccacatcccagctgtgggaagtgcactggctgtgtctttttctccttgttacagtcagctgtgcacagaagtcctggagagtagcaggtgatgtgagctgtccctatacattagctttctaggaaggcaattgtagtcggtttgctgtctgagtcattacccagaaccttctgtgggagccgttagagtagagagagtccaagtcactgggatggaggtggcgagctgggggaagagctcacagtagtgagataacaatttccctcacacctgtcctgtcagaccttcagaacttcagcagtgagatgctcaccaagctgcttcctcaagcagcattcaggaaggaagaaaggaactgtttgtgggtataggagctatttcttcaatatatactaagccagtggtctggttcagctgcacgtgacagtctatgcagaagagaacagggtagcggacagggttgggaacattgggtgtgtccaagcctcctggatcatgttgggaggggagtgagcacactggctgattgatcactttcccaatgactgctagagtttatatactttaagatgatgtcttcctcaaattggggtgctgtcatctaaataacagtgtatgtgacctaaataataagcagttccttcccactgtctggtatctggatatcagaacccgattcttgaacaggttccctccttttgcagcttcttctcttgacttgcacacagtgtgtcctcacgcagctatccttgtgtgtggtgtctgtcataatctcattttgaatgaacatcagtgaacttgaatgccaccctgatgacatcatttaaattcttcaaattgaagtcagattcctagttcctggggttcggatttcaggatctgaatgtttaagggactgttttagccctggtcattgggattagactttgccacagtctccagacttggggcgtgtgtagcaaatcaccattttagaattattattttaatcctgttaatgatagagggtactagtgggctaaacaggtgctctcctgtaccattaagtgttttgctgttgttgtttgtttttgagatggagtgtgtgtgtgtgtgtgtgtgtgtgtgtgtgtgtgtgtagccctggctgtcctggaactcattctgtagaccaggttggccttgaattcagatatacacctgcctctgcctcctaagtgctgagattaaaggtgtgtatcactacagtacgctatgaatccattaagtttgaaaatgctttgtgcctgtggtgccaggcactgagatttgtgtcaggactatggaggtcttatgtgacatcctcctggtgatgggacttaaattccaatacattctgttggcacagcccatattggggttgaacactatcccaggagtagtgcttgtatagagttagttggaggtcctatcttcccactctgtctttgagacgtttgtctgacagctgcccagggactttggatcaccttaactttgtcttggtagcttcctgctggggaaggaattagattagatgtacctacagaatcattttgccctatatgggaaactttttttcccctcaggaggatagtatatctggtcctggttataattacaggaccctcagcaggagggaaatcgttataataagtctaaatcggcaacacctcccgctgtctgctgcacagtcacaaggttggcacatacttcacactgcagaacgttcctctcagcatcatttacaacagtgggaagttagagatgagacagaattcagatgtgtgtgttcttcaagttggacctttgaataccacacagcaattaaaacttgctttgcaagcaattgcctttgtaagcctgagctacatagtaagttacaagctagtcttggctacataatgagctcttgtaaagaaataaacgacagggttaagagagatggcctagtggttgagcctatgctgctctttcagaggttcttcgttcagtttctcacagacacctgcagttccacttccggggacctgacgccttcttctggcatctgaggacaatctcacatacacaatatatactcacatagacagcacacgtatacatcaataaaattttcactcaagaagaaaattgattgaggtgtatacctagtgttctttgagtcctaaatgagtgtgtgcagagtaaagttgaggaatccatcccatgtggctgtcaccttggagtgtgcaggggtgtgtgtgtgtgtgtgtgtgtgtgtgtttaaaagctctcataggctctgacaggggccttgcactggccattgaggcttggacagtgctatggggagacaggtttcgtagggagagttcctgacttaggatggggctagggagaagggcagacaaatgttccccaagtagaagaccaaaccattggttgtgctaattaatcatcgtctcagtggatgctcacagttatcattctagtttaccgttttatcattagtttcagaaccactttgcaagggggcagttgtcctttgtagaactagaaaaagaagggccttcactctaatgcttcctgtgggtctcagacccttggggcagttccagatttaagcccctgtgtacagagggcataaccatcaccacgtttaaagttgcctttcctttgcgggtgcaagaatggagaggggccaggggcagggcggggatggaggtgggagtgaggacagcattggtggtggtgttttagggaacacttggcctttctaaccttgacccatcaaaaggcaaaattccagtaaggagttgagtagagttgactgtaatctgtgactgttgatactattctgtggtgagattcattttgctgacaagtttccaggctgatctgggaaggcacgtttctgatgtctgttagggttctccaggacaagaactgccacatcttctatgaatctttggaggaaatttggcttggtgcttattgccagagcacagtgtgggccagaggcagcagtcctggggcacatgaacgatactagtgaggaaatcaatatgtctcgataggaatttctgccatgtcctgcttggggcaactgtagggcgtacctgggatagcttgtggtcagtgttagtctttgtaaaataacactaggtggtgggcaagcggcggcctggatgagcctgtggtgcgtgtccttagagcggtggggctaagtatgggccctggttttctgtttctgggtcctccctcacctagggtctgtctgttgtcatgactgtgtaggctgtcatggtgatggttagttagttgcaggcaccatttgaagttgaatggggtgtgcaggagctgacctgtttgagaagtggagccaatctgaagctcattgacacaagaaacctaaaagggttctaaggtagtagaaaggccatgatgataatgggcttctagaagcttcttttggggaagtggtaagtacatttgtgggggagaagggatggagagtgaatgtggggaaagagtcatgaggttccctaggcaatgttgggagagaagggactgtcccgagagtaggtgactgaccagcctcaagcaaagtaagcattcatgctgtcctttctccttcccaacaacacgtgtcatcacgtgcattccagaatcagcctcctccgctgttttcagagactgtagtaaccagttatcaacacatccttaggaagagtgcccaggttgcatattttagaagagagatactcattgctatggcttgcacgtaaagtgtctcctaaaaggaacatgtgcagaaggcatagttttcggtgtagagagcaaaagcggggctttgggggagtgactggccacagtgtctccgtagtaatcgatgcgctaattcacatttggttaaccacaacctggcagcattactgggaggtggtagaaactaggtggggtctatttggaggaagtaagtcactgccacaccaggaagggtgggtgggtggaggtgggtggttgccctggaaagctgtgtcttagccttggcccctctctcttcaccctctctgctgatatgaggtgggtggcaacagtggagccagctgaaaacccccagaaaccaagagcccgagccagtctttccttcttacgttatgtgtaccaggttttgtcagagaatggaaagggagaaagatgagatggaaagaggtgtcaggaggggaagggaaagacagctcttaggacagtaagagccttgtctgtttagtcagttctggtcactctgacagatacaggaaaagtcaacttgaagcactacaagcatttgccagttctgtgtgttgtcccactgtgggtgatggaccttgtgaccacttctgcctgtccatccctatcgtgggaatgcttccttgaggttcctttgtttctaactgccacatagtaaatgtgtaccattattagctattgccaccccactgcagttctaggacgtatgctttgccaactgtcgttttgtgccaggcttgcttgtctctctctgtcaccccccccccccaggtgtgtatagtttgtatgtatgctcatatatgcgtgtgcacacatgcatgttttgtaagtgtgcctgtgaaggccagaggttgatgttgggtgtcttactctatggctctgccttatttatttagacaccatctctctttgagcccagaggtcaccagtttggacacaatgggtagccagcaagtcccagatgcccctgcctctgtctctgttagtcatgtgttgtccatttgttatatgggtgctgagaatccaaacttaggtcttcttgcttgcaaaacaggtaatttagtgatggagccttctcccagccctttctttgcccaaggttttgatggtgtttggagactcttgagtcctcagggcctcatacctgtatgcagccccatttaaagtcctcttcagtgaagaaactaaggcaagggccaaagcagggaatggtttttctgtggcagagtggttggcagtgctgtgacgctagtcttacaggacagttgacaaccagtgctcttaggcatccgctggcagtcattatcacgtcctgggttttggtgccagtgaggttgctagggttgatcccagttcacagaggtgaacacagatactgtggggagtcagtgtccattggtaccactctgacactgtggctggtaggttctatctaacctcagaccctgctgctgccttttctgccttttgcttggagtggattttagggtcccctagctcatctgagcttagcatccctgtctctcctctgccctggaagcagatccagatgttttcctggggagcagtaaccccagagcccagtgaggctgccgagtggatcttcccgtctcttcctgccgtcatctttctatgtgaagtgtctcatttccccatgaaacactgaagcagaacaggtagtgcacagaggttagttatgaagtaaatgcgcgctcccctcaccggcagcttatgggatgtgaccgagcctgtcataaaaagtcatttgaacagctgcgcggcacttctgacggccatggacaaggacaagctggctgattgctatcttgctcttagccaggtgatagatcaagcccagcctccaacagttgcttggccttttaaagtccccgctgtcaccaagctctgtgtgcctagccaaaatttccctttgtgttctggcctggaggcaactgggaaccagcagagcatgtacctgctgtaagccagccttcagaaggtctttcctttccgttctcaccctggttttcggttttacctttctttgttttcatgtttaaacttttgcttgagtgtatggagtttattgatgaactgttccagttctgtttggaagaagcagaggccaagatgggagagaatgagggaagctgtttgggaggcaggtaggtgccaggctctgctaggagcaatgcttctacaccttaggaggggaagtcctctgtaggctgttttgaggacttgatagaaggacacagtagccccacctcctgaggttggccgatggcacagagtcgctcacagagcaacaggcagcccttcctggtctgctggctttccccagtcagcaccgctcttgttctgcgggcccttggcaggctggcccacagcctcaggctcacagtgtcctcatcagtgagcgagcatgcgtgctttgtttcacgcacttgcccacagcttcccgcttaggttctggagcctcccatacttgtagggccctcctgcctgctggccaccctggtatcctcttctaggttcagggcagaggctgtagtgggaagagggccattcacagtagcaggaggagccagaagtcatgctaatcagagcggctatttcaggaaggagaagtagcctggtggccgcacacctgagcacagtaagttcccggtccttggctgcccttcctctgccaactgtaccccagccccaggttattcagtacagaaagaatgtggactatcacattgtcttaatgtctgcttgcatctctgtttccctggtcagtcctggccacctccacactcatcggcccttcctctgcactgtgttccatatggccatagaccagccaggcctcctgcctgtgtccagatctctgggaataatgggttacaaatgaccatccatgtaactttagcagtctgtttcttggagtcggactcagaggcaacttagagagtattttatctggtactgcctattgctgctcctgtttaagaaggagagaaggggagaaaatcaagttgggcaattctgataacttatttcttgtgttctccctcctggaagtagaaatgagagtcttactggctgtggaacattcagttgccccctttcccctgagctttacttcttcctcagaaggggagtctgcagctaagctgctctgcagtgaatctcccttaggacagcagactaatggggcaaatgcatttcaggagtccaaaacctgatggggcatgcgagtgaagtgactagcatttatttatcatttatgctaataagtagtactgtgtgcttagtaccttacaagtgctgattttagtacttgtaattttccttatttaatctttccaaggtggctttgcctttccctaacagatgaaggaaccaagtcaaacagggggagtacttacttttgccaggctgggcagctagttaagtaggggagctggctacagacaggcctttcgcttccatagcctgccccatattctgtgtcttgagtatggggagacggaaggcgggcctcttaattctgagcacagctggggcttttggaaaaggctggccatggttcctgcctttgcaaggaaggcagaacggctgtggtgtggtgagatatctcagcccagacaccgagcagcccctcccccgcttgggctcagtcctgtggtctgtgccccgtcaccagctgtgcagccagcttcctggtacttttggccatggctgctattgttcctttccacagacccatgcacactgccggcgtctgtgctggttggactgttgggaacagtgcagagacctggtgacacaggatgtattattcgctgcctgctcagccctagcccagatttcctcccatggcattaagcagaacacttgttatcttcttcctaattatgtggcgaagatgtagccagtcctggctgtcctgagtcctcattgaccctgagagaggagctgccatatctgccttggttggtgcctctttggctagtgtcgcatagaggggctatgacctatgttccggggtactgcgctgctctgcacagggaggcagtcacggaggaggacagagaatagtattgagggagcccgagtgaggtggggatcctgtagccaccccccagtaggcacagcatactgaccggatcgccgttctcctgagctgcttgatgtccagtgtggaaatgtgaacgcagtcttcatgccacttagaatggctggtcagctggacacatttggggtctgtgtatgtttcctcttcctttcacaggtcctgggtatgtgatgagcctatgaggggcactggccaaaggctgagaggcctctggggaccacagtcaatgcctctgctatgtcagcatgcaagggcagtgtgcagaaaggaatttacacaggctgagcgcatgtgtagctcagtggtagaaagtgcttaatatatatatatatgtgaggttctggattctatacccagatagccagacaggttctggattctatacccaggcagccagacaggttctggattctacacataggcaggcaggcaggcaggcaggcaggcaggcaggcaggcagacagacccacacagttatttccatgtagctacagacaatgtaataaaagactaaggtaaatgagaagatataaacaaaatcctgacttgttagggcagggagatcaggcacctctttgttgtgaaaatgttatgtacttgatgagatgagacctcaaggagtccttggagttagcagtgaaacttgaatttcttgctttagagcatactaggctatgcatagcatgtgcaaaggccctggggtaggagaagcagagtattgaggtaggcgcacagaatgactcaagactatcatcaggcaggacagctcactggtacctaggtagccatgctgaatacctgctttttactctgtggcaataggacatccacctgtgaaagatgctttgccagaagtgtgcacagtcattaactgaaacataggggcgttgctgccataggcgagctgcttcccaggggatcctccatcagtttcttccctaccaagattcctttgaaactcctgctgtccctttccaggaaggtaccttcccactgagcctttacctagagcccctttctttttctgggtcacggatacaatccctagagaaaagccttattggagacaacagtcatagatctatttattttgtggtaggcaccgttaggagaatgcagcaggccacattgctttaatacttggaggaaggactttacttgagaagattgttgtcatttaataacccattttatggacaaggagcctgaggcacaaagatggagagacacctgtcctgggtcccttgttccttcagccagaaatggatgcagtgcttgtcctgagggtggttgctgaagccagagtcaagtgaagggtacctgactggtcatgtgtcctggatgactctgcattgatgatacccacagttggatgggactcagtctgccagagggtggaatgggtgaacagcatggtgacatacacaggattctttaggctctgctgcagcccttgctgccaggcctgcctactgctgcgtcatttacagtggtaggtgttgtctgagcaccagtttttaccaacgcccataggacacacaaatgttctagtcaaaggaggatactgaccatccaagacacagctctcctgacagcccccgctctgcttgggtcgggtgtccttaggtgtgatgacgtagtccagttctaccaaatgcgaggcagctgaatctggcctccttcctcacgggaaaggagcatggttcaagctcgcagggaaggtgtctttgtcacagcgagtaagacttggagtgtggcagggtttgtggtgaatgggcattcacctcagaggttgtgctatgggatgctacgttacaggcgttacaaggcatggacatggccatttgcacactgcagtggctagcacactaggtggtcattttgtcaacagctgggtttccccccccctattaggccctgtgtggatttctaaccccaaatgacacaaagacatagccttgggagggtgatctcaccttaccctggcattaagcattaccctagtggacccatgtggagcctgtgtcctggaaggtggtagtttatcctagagcaggttgcccttgctgccataccatctcacgtgtgcattgtgctgagtcccagtgggagctacctcatgcagcaccttagtcactggacattttatgcagttagcatctatgtagctcaactcaggttggactggggcggggcagggatagtgtattaaatagtctcttccagttggccccatcctctgatattttattgttggcaatttaaaacaaattgtcagtagatgtcatgtgcaagatttcagattgcgcacgttactgtatcatgtgatcaacttgtgtgacatcaagctggatctacaggtgctggagtcaggcagtctctcacagacattttctcactccagtgtaagcaggtcctgggcccccagggaccctcaaacctagagattaatcgccttttttccagcctccttgtactagggagggtgacacccctacatatttattttaatttagtttatttttgcaggagggggcactggtggtggtgaggggtgggtggtctcagtatatagttcttgttggcctgtgactcactctgtatcccaggctgacctcaacagatcgtagccttgccaaggctaggattccaggcctgcccaccatgcctgcctcccatgccaacatccaacaatcacacatcctccatgtgggtataaatttaaaatgaagttcagcaggagaactgagtggtttggccagtgaatctcatgtcttgttttgtttgtttgtttctttgtttgtttgtttttttgatacactaaaagactgtgtagtgtgagtcatggaaaatgataagtatgacttaaaatttgaaaactataggatgcttgaagaaattggatgtggaggtgttttagtctgtttttgttaccatatatgactggcatatacatagcctggatattttttatagaacaaatgcttgtttattttttgaagtttgttctaaaaatatttatttttatatatgtgtatgtgttttccctgcatgtatatatgtacaccatgtgcatgcctggtgctgtgctatcagaactcctggacctggagtttcaggtgattgtgagctgccatgtgggtgctgggaattgagcccaggtcaattgctgcaagagcaccaagcactcttagccacgcagccatctctccatccttggaatgagtgtttatttaattgagttcatgattctaggggtggagaggtccaagccaaagggctgtctagtgagggactgcttttttttgaaaagtttcactctaaacttgggctgtggagttcagctgtaaggtattaaccgccactctgggggactggcagaccttgctggtagggtctctgcaaagtctgccatggcagacagtgtcacatggcaagacgagctcctgaaggaacaggaaagtggttcttacagcaggcctgctgcagaagacccgtcagcctgttaatctaggcatggcttagtcacaaatgaggagagtacagagccctcctgacccagcctaagcaaggattaaatctcatcccgagccttggtgggtcccaccacagcctgggtttcagcatgctgtttgtgcctaagtgagcagatggcctgggggccttggtaagtcaggtgtagagaccagggcagtttcatctatcaccactgagcagaataggttaacctgagacattctccactcagaggcctgctcaaagtttaatgtatggaacattttttttctttttgctaaaaattcagcactttgtcacagtgagccctagttgtaataagcagacacaaatctgatattccgtaattttagtcttacacacacacacacaggatttctgatgttgtttttttctctgcttttttggagagctcatgtctgcattctgtttggctctgtgactgcatcccaatggaaggaatgagaaattcagcttgtgttttagctaagcttcctggtcttttcttgatactcggaagctaatggctctgtatggatgaatgaaaccgaaccctcaaacctgcccttgttacagaagaaattggtgcttaggagagtgactgagcccattcctacagcagctccagagccagagtcctggtgtccagccttcattcatgcatttatagtgacgtgataaagtgacacccccaaacctgggaccacataccgtccagcagggtggcgatgccttccagcaaagtggtggttacaatcatcattactagaccctgtcctgatgtcagtgattttgattacgagggcgctgggatggtcctggtcccaggtccaggtgatgtggccagaccacagctacaaggaaggttcaagctctaccgagtcctccatagcttcttagccaggtttgcatgtgagaaactgcactttggtgggattcttgctccaggtccaagagcctcagatccacctttggtagctctgcccgttctgtcttgcctgacatcatctcatttgggtggtggggagaagtctagatgtcacatctgagactgacagtgtctccaagctggctgcaggcacggtggctttctccctccctattcagatgtcatatgtgttcttagtagaaaatgaaacaaaacaaacagacaaaaaaagaaaagaaaggaaggaagaaagaaagaaggaccccccccccccaagaaaaatctgggcagtagcacagatctgtgttctagaaagaccctgctgtccattctcagctgcatccagcatcatgtctgcatctgcctagacgtggtttgctgtgtgatttaggatggttagacttgagcccccctcgtggtagaacagtgataagtattcagtagaaaccatgttgattttaacatcttttccttgacttgtgctatgtggtatgatctcttcgtatgaaatgggagccggctctgctctgctctgctcggctcagctgtatgatcacaagggacacagtgacctttttgttattggtgcccagttattctccaggttagatatgttaaacctattaaaatcttttaattaatttttagtgtgtgtacatttgtgtttgtccatgtgtatgtaggctatgtatttgcaggtggtgcacagaggcctgaagagggtttcagagtccctggagctggagttggaagtgtgaactgctcagggcaggtgctgggaactgaacacaggccctgcagaatgacaggaagctctctaaactgcggagccttcctcccaaaccctaactaaattcagtttattttgtttggtttggtttttgatattttccacttttggtgggtttcttagggacacacaccactgtaggtgttgtgtgctggtgagcttccaagcttgggcaggccccattgacccacgtagaccaggatgcatttctattgcagaacatctaacatgcctgcagagccatatagttacttcctagtcacagctcttttgtctctgtttgccttttgcagttgtgtagacaagtctgcatgtcccatgccacgaactctctgccattgttttgggatctctgctgagaaccgatgggtcctaaatgcttgttgtatccactcatagtgtactctgaaatcaggactccgtttacatatctgtagcacttgtataaaatctacttagacgtttttgggttttgtgtgtgtgtgtgtgtgtgtgtgtgtgtgttctaataattacaaattccgctctgagaccatctagcctgaatctcaggttcagttcttgtcttctgagggacaccagggtctatctccctggagtcttttatagatttaagggttcaggaatgggttgtaaggccaacagggacgttctgaaggcagaaggactcgagctgtgtgagcagtaaaggctgtagtcatttggggtagacagagttccaagctatgacatggagcatgtcagtgaccttcaagggcccagagggggaaggagaggaactgcctccccaggcctagggagacagatctgtggagtcctgacacttgactgttctcgatacctgatgttcaacacaggctatggattctggcctcttcctgggaagcaggcctttactttttggggtatctggtttccaagaaggtgttgagttggggcgattttgggaaaagagctttcttgacctatttgtaccacttattttctgtccctgcaatcacgctgagtggaggggagtccaggtgtgaattggaattggggtccagatgcttctgggtgtttcatggggtggaagttattaactggattctgcccccaaacaggctctctggggcatgagcatgggacaggaagtgttggcgtgtcatgaagggggatggttaggctactcctcttgcatatgttgcctttgatatgacttatgcctcactgagcctcaacttttcttctgaagtgtcgagtgacattttactgattgggggcagtgccctgtgaacacttgtaatactcctgcagtaatgtgtttgtgaccttggtgtgcaacacaacccttaatacccaccatgaactggaattaggacctgaggcctttctccctgttggtagatgtttagacttagcaccactaagagttgctgccacagattcgtgattgtcagccatagctcacattgatggtggctgaggaacctctgtcaccacaccaatgtcttctgtatgagctgagtttgtggctgctcagccctggagagagggtggtctcactgtgccctgcctgctgcccttctatggaattgtgccatcaggcaaccggaagtcctttgatactctgcacaccttctgggataaggaggatggtagtgacagtgtttcgttactattgatgattaggctgtgggacagctgttgttcttcctcctggtggtagtgatgctggcatggctgggtggttggtccacgtgccatttaggctggtacggaaggaaatctcaaaaggactcatcatgtcttgctctgtgcaggctcctgagagtcccacacctgctgttctccgctgtgacaagccttcaaggtaagtgtttctgtgggaaagaagctcattcctgtgtccttggccatgggtcagagttcatctccagaaaggagactaggatattcttttatctatcttgtagtaatcagtgagtttttgaaggcatgcttggggttggttggacccatagcctgctacatgctaggcaagtgatatgctcaccccagcccacccctcaaatactgatttaagaattaatcatcaaagttaaaacatctcatttgtaatcatttctgaatttacccttgacatcataagcctgcattgtggaatgaaatcatctgtaattgacttttggtagatggtgactttgttagacatctgattgattgtatgacatcagtagtgaggaatgggttggcgtgccccagggaacagctagctggctgctggcagggcaggggacaggcgaggtggccttcagctcagtctacatgcagatcctttgggtggctgctgttcccagctttctcccgaagccctcattaggtgagtgttcatcctttttcttgttatccttttcttgacctcctcttcctcccttgcaggaccgtggttctgagtccagccatggaggacagccacgaactggaccttacgtatgtcaccgagcgtatcatcgcagtgtccttccctgccagttgttcagaggagtcctacttgcacagcctgcaggaagtcacacgcatgctcaagtgtaagcatggagacaactacctggtgagtggggatgatagccacggtgtggtggatgggctggaggcaggagtccctcagaggactcgtgtgagggccaggggtgtccctgtgccttgcttgcttacacctgaggaatggtttgggggcctggaatctgactcatgagtctaggggccatgtcctctacccttctattgttagctttgctgttgttgtgtcacgggctgtgacagttgactgtaggggtggctgctgcctctgtccagcactgaacacagctcctcatcagtaagactggcttctgggaaagtaaggattcccagtcagagttcctggtgtcaggaggcagccatgtctcctcctctcgtgcattagaaagacaagcaggcgggtgtccaagaaacaaggcagtcctcaggggcaaatgtaggtaacgtggtttcccagcaggtgtgtatcagataaaggagaccatatttgagcagaagtagaagaatctcatgttgctctctctgattggccctgctctcttctagggctgccagctccagagaacttttcctgctgctataatcaactctcagattacatgacagcttctagcaccttctctcatgctgccgccttatctagggagagctaatcttacaaagccaacaaggaggttattgtcatccttagaagctttctcccatggttagacccattgctaagccgtggcttccaggatagtctctgtatggactccctatgacctctaacagtactactccctgaggtccagcctggttgtgggcaggggtgtagcatcctagcccccaggatggatggctacagctttcatgagacacctctggagctgcctctgcctctagcacagcctcttccagaccagggctccttcagtgggaagctgtccccagagaagtccctttcttcccacccttcctaaagagactgccgagggcatctccaaacccacaggccttttatggaaggcacttagactgctggagctggtcaggatatggtggtgttctgtgccctgcaaggaaaggcagctgagtgctgatgattcaagcagggcaagcacggggctaacgctgagtaggcctgggaggtagctggggccgagttagggaggaaccatgtgttctttgtaggacttgagcccacagatagctgtggtttctgagtggcaggtcttaagctcagttgacaagagactgctgcctgcccccaggatattcctcatgctgagcaggactaagaagagctactgtatacacgtgggtgtatagaccctgtatttgaaaatgtttgtagccattgagttttttttttttttaaaagcaaaacaaacaaaccaaacaacaaaaaggagaaagttttccttgcccattttggctcagggtaacaaaagaaaaacgcaggattcacaaggttttcgtattatccatccatccatccatccatccatccatccacaatatactttgtttttaccctgtgaccacacacacatttgtgcatttccatccctttcggtccccttaaaatgcaggtgtctccttcctctttgaggaccatgatttgtctgaaatctttttgtctctttgtaggtattaaacctttcagagaagagatatgaccttacaaagcttaatccaaaggtatggaattgacttcctcatatttgaactttgtaaagtgtcagcgatgtgagttttgcttgtgcaaaagaagtttcttgtaggcctttgtggaacatagctcgatatcaaaaagtattcaggattgtttatatcctttgcttgcttctagaattaaaagcagtagttccataaaaggtgagtacacgtcttacttcatccatgtcagcaacttattaaacgcatacaggtccagcatccccactgaaaatctaaagtccaagttactcaagctaaaacttgacctgcaacaatggctcagtggtgaagagcatttacggctctttgagagaacctgagttcgatcctcggcacctgtagtagcagcagctcactgctacctgaaannnnnnnnnnnnnnnnnnnntagcagcagctcactgctacctgaaattcctgctccaggctggtcagacgcctctgctctctgcaggcactgtgctcatgtgtacatatcgcccccagtgtcacatacaaaattgtatgtatcagtggaaagaaaatttcacaccctggaaactttgtcctgtatacaataaaacattactgaaaatatataaaattgacttgaggtgctatgcatatggtgcatatgagacaaatagatttattttgttttcaggaatgtatcccaagacacttatgtgcagatactcttgaaattgaaacaacagcagcaataatatcaacaacagcaaaaaaaatcaaaacctgtctggccctactcgatttggagaagggacactcacttataaaacatccgtgtcagaagagtagtgtccgtgcagtccacagacttcattcacaactcactcgcttgcatacatgtgtgcctttgttgaatcgtgtctgtgtgtttgcatccatattctataggttgaaatgctttgtaatcattagaataggctgatacaggctgaacatcccataacctgagatgaaaatgctgtaaaactcaaaactaatgttatgttcaaaaagttcaaatttacttaaatttacaatttgcttcttttggaatatagatgctaagaaactggaaaaaacaaaaacaaaaacaaaaaacaaaaaccacaaacctctaaaatagttctggccccaggccttttgactacagaatttacatgtgtcttagttatgctgtgtgcacagggaaggaggccagagcttcatggaactgaggtgctgcttgctttcactgtggtctcatctattgaactcctgtctattactttcatatattaaaaagctctgcccaccccatcagggaaaaccagaaagtggagaagaaacagcacctccatgtggcctggaggagaaacaacatccccatgtggccctcccagaggtgtagccagagactgcgctgcttgcttggggctttggcccttctcagtgattttctaaattcttttaacaaaatagaggcaaaaaacctgaaggtgctccttagtttctggagggctggttgtccttgatgtgtggtctgcatagcatgggaaacactgagttcactgtattgccagactcctttttagcttgagtgggtaatacttgacagcattgtgggccacagactctgtttaaaaaaaaaaaaaaaacaaaaacaaaactaaagatcttggggtcctagattcttttacagtaaactctgaactattttaacgcctctaaaaggcttctatagaattgtcacccagctgcaaaggtgcagaccagcgcctggttgaggtgtggtctgcaggcaacgtggtagcctgcattttcgttcctataaaggaaactaactggccatgagctcattagctttcagaagaggtctacccagcatcccctgtgactgaggagtggattatgtcactatgagattaccacagaagggcccaggaggtggaaatcaaggcacctctcttctctgtcttgcagatcatggatgtgggctggcccgagctgcatgcacctcctcttgacaagatgtgcactatatgtaaggctcaggagtcctggctgaacaacgacccccagcatgtggtcgtcatccactgcagggtgagtgttcctgctcccacagcctctgggttcccactgggcttccagcgcttacggggccacgtggattagatcaggctgctcacaggcaccaactgattttccttgaagccaccgagtttacaggatacctgtcacctggtgtgacatgttccatgaaggtataccttttagatttcctattcatccttaaaaactaagaagctgacgaagaaactaaaaagaacccccaatcctcaggttgtctttagaatttataggtctgaggtttctggtgtttctggactttttaaagctcccttctatccattcgattctgtacttgttaattttgagtattagtgaagttgaaatgaattgtaatatgattgaaaacacatggatcaccaaagatgaaaacaccacctagatattttaccctcccgccttccgtaagtgattctgggctctctttgtccagtttatgggcttctgatgttttcctttcattacttaccatagagcactcgttgctttaaactacttttgaaatacccagaaaatgtgccttgagaggtaagcttttaatttgaaattgtggttgctggtgccatccaaggttcaccgtcatcacggcagcagggctggaatctgcttgctttgcacaatgagtgctcccttttacagatgcccggaatgactaatagccagacttgtctccactagggcagaggcaggctagagctggactgcggtagctgctctcctgtgttacaatggttgtaactcaagccagctccaacgtgaaagaggctgtgcttcctgtgggagtgttcttccactttttaccccttttgagccttggaacagaactgtggaaatgccagaggctgtttcccaccctgagagtgtatggctcagagtggatcccacctaccatgttttcctataacctgtgagctggttagaaggtgaaaattcttacggagttcacacttagagtctgacagtagtgaggcgtgcacacccctctccctccctcaccctcaggtgttcacattcactgcagcatggagaacttgtacctgcaccatgctgtgaagcctgcttatatgcggaggcataacattgggatacttggctggccttttaaaatgagtgtggcagagtcccttgtcctcaaatttcttggagagctttaggattgccttcatttctttacatgtttggtacagtctccctgatgggagatttggtagtgactggatccccttaccttgttgggattttctcttggggcagttgtgagtgttgggggacttctggctgtccactttgtgtgtctgcagctgtccggaggagccctgcagagctgttgtgttttgtgctgttgactgtggtggctccctttcatttctgaatttttgagtcttctttccttttaatcttagccaaaggtttgctgattttattttaccttaaaagcaagcaagcaagcaagcaagcaagcaagcaagcaagcaaacaaacaaacaaacaaaacagtcagttttgttgaccattttattttctgattctctgttttattctgttctctattttttctcttatattaactttgggtctagtttggccttttcctagttacttgaagtataaattaagatcttcatttgagatatttcctttctttctagatatggatgcttattgctataaaccctctcttagtactgcctttgttaaatctgatacattttaatgtgtgtttttccattgtagttgtctcatgttaatttattttatgtgtatgggtgttttacctaaatgtatgtctgtgaaccacatgcatgcctgatgctaggggaaaccagaaaaagacatctaatattctgaaaccgaattttcagatgattgtgagccagcatgtaggtgctgggaatcgaaccctgttcctctggaagaccaatcagtgctcttaaccactgagccatctctccagcccacgtctcaatatatatatttttttaaatatttatttatttatttaatgtaagtacacggtagctgccctcagatactccagaagagggcatcagatttcgttacggatggttgcgagccaccatgtggttgctgggatttgaactcgggaccttcggaagagcagtcggcgctcttaaccactgagccatctcgccagccccaatatatttttaagttttcatttcaagtccttgtttgactgaattgctgttcagtaacatgttgcttaacttctacatatttgagagttttacaagtccacctccctaccaccccactcagaattatgctttcataggatggtggtcagaaaagatacttgataggatctcaggcttaactctgttgggacttgctttgtggtttcttgtggctgttccttgtgaccttgaagcacgttctgttgctgttggtggggtgttctgtccatgcgtgataggttcacttagtctgagaggtagcttgggtctgagttttgtagctatttcttgtctagatgatctgctgttgaaacaagctgtcaaaagtcttgactggcatccctctgcccacctctgctttacacctgtaactagtgccacagaaatgactgataataccagctataaaggccagcctctgtgggccctgggttttgnnnnnnnnnnnnnnnnnnnncagcagggctggaatctgcttgctttgcacaatgagtgctcccttttacagatgcccggaatgactaatagccagacttgtctccactagggcagaggcaggctagagctggactgcggtagctgctctcctgtgttacaatggttgtaactcaagccagctccaacgtgaaagaggctgtgcttcctgtgggagtgttcttccactttttaccccttttgagccttggaacagaactgtggaaatgccaaaggctgtttcccaccctgagagtgtatggctcagagtggatcccacctaccatgttttcctataacctgtgagctggttagaaggtgaaaattcttacggagttcacacttagagtctgacagcagtgaggtgtgcacaccccttctccctccctcaccctcaggtgttcacattcactgcggcatggagaacttgtacctgcaccatgttgtgaagcctgcttatatgccgaggcgtcacattgggatacttggctggccttttaaaatgagtgtggcagagtcccttgtcctcaaatttcttggagcgttttaggattgccttcatttctttacatgtttggtacagtctccctgatgggagatttggtagtgactggatccccttaccttgttgggagtttctcttggggcagttgtgagtgttgggggactgctggctgtccactttgtgtgtctgcagctgtccagaggagccctgcagagctgttgcgttttgtgctgttgactgtggtggctccctttcatttctgagttcttgagtcttctttccttttaatcttagccaaaggtttgctgatcttattttactttaaaagtaagcaagtaagcaaacaaacaaacaaaacagaacaacaaaatagtcagttttgttgaccattttattttctgattctctgttttattctgttctctctctattttttctcttttattaactttaggtttagtttggccttttcctagttacttgaagtataaattaagatcttcatttgagatatttccttcctttctagatatggatgcttattgctataaactcccctcttagtactgtctttgttaaatctgttatattttaatgtgtgttttcccattgtagttgtttcatgtttatttattttatgtgtatgggtgttttacctaaatgtatgtctgtgaaccacatgcatgcctgatgctaggggaaaccagaaaaagacatctaatattctgaaaccgaattttcagatgattgtgagccagcatgcagctgttgggaatcgaaccctgctcctctggaagaccaatcagtgctcttaaccattgagccatctctccagcccacgtctcaatatatttttttaagttttcatttcaagtccttgtttgactgaattgctgttcagtaacatgttgcttaacttctacatatttgagagttttacaagtccacctccccaccaccccactcagaattatactttcataggatggtggtcagaaaagatacttgataggatctcaggcttaactctgttgggacttgctttgtggtttcttgtggctgttgccttgtgaccttgaagcacgttctgttgctgttggtggggtgttctgtccatgcgtaataggttcacttagtctgagaggtagcttgggtctgagttttgtagctatttgcttgttctagatgattctgctgttgaaacaagctgtcaaaagttcttgactggcatccctctgcccacctctgctttatacctgtaactagtgccacagnnnnnnnnnnnnnnnnnnnnnnnnnnnnnnnnnnnnnnnnnnnnnnnnnnnnnnnnnnnnnnnnnnnnnnnnnnnnnnnnnnnnnnnnnnnnnnnnnnnnnnnnnnnnnnnnnnnnnnnnnnnnnnnnnnnnnnnnnnnnnnnnnnnnnnnnnnnnnnnnnnnnnnnnnnnnnnnnnnnnnnnnnnnnnnnnnnnnnnnnnnnnnnnnnnnnnnnnnnnnnnnnnnnnnnnnnnnnnnnnnnnnnnnnnnnnnnnnnnnnnnnnnnnnnnnnnnnnnnnnnnnnnnnnnnnnnnnnnnnnnnnnnnnnnnnnnnnnnnnnnnnnnnnnnnnnnnnnnnnnnnnnnnnnnnnnnnnnnnnnnnnnnnnnnnnnnnnnnnnnnnnnnnnnnnnnnnnnnnnnnnnnnnnnnnnnnnnnnnnnnnnnnnnnnnnnnnnnnnnnnnnnnnnnnnnnnnnnnnnnnnnnnnnnnnnnnnnnnnnnnnnnnnnnnnnnnnnnnnnnnnnnnnnnnnnnnnnnnnnnnnnnnnnnnnnnnnnnnnnnnnnnnnnnnnnnnnnnnnnnnnnnnnnnnnnnnnnnnnnnnnnnnnnnnnnnnnnnnnnnnnnnnnnnnnnnnnnnnnnnnnnnnnnnnnnnnnnnnnnnnnnnnnnnnnnnnnnnnnnnnnnnnnnnnnnnnnnnnnnnnnnnnnnnnnnnnnnnnnnnnnnnnnnnnnnnnnnnnnnnnnnnnnnnnnnnnnnnnnnnnnnnnnnnnnnnnnnnnnnnnnnnnnnnnnnnnnnnnnnnnnnnnnnnnnnnnnnnnnnnnnnnnnnnnnnnnnnnnnnnnnnnnnnnnnnnnnnnnnnnnnnnnnnnnnnnnnnnnnnnnnnnnnnnnnnnnnnnnnnnnnnnnnnnnnnnnnnnnnnnnnnnnnnnnnnnnnnnnnnnnnnnnnnnnnnnnnnnnnnnnnnnnnnnnnnnnnnnnnnnnnnnnnnnnnnnnnnnnnnnnnnnnnnnnnnnnnnnnnnnnnnnnnnnnnnnnnnnnnnnnnnnnnnnnnnnnnnnnnnnnnnnnnnnnnnnnnnnnnnnnnnnnnnnnnnnnnnnnnnnnnnnnnnnnnnnnnnnnnnnnnnnnnnnnnnnnnnnnnnnnnnnnnnnnnnnnnnnnnnnnnnnnnnnnnnnnnnnnnnnnnnnnnnnnnnnnnnnnnnnnnnnnnnnnnnnnnnnnnnnnnnnnnnnnnnnnnnnnnnnnnnnnnnnnnnnnnnnnnnnnnnnnnnnnnnnnnnnnnnnnnnnnnnnnnnnnnnnnnnnnnnnnnnnnnnnnnnnnnnnnnnnnnnnnnnnnnnnnnnnnnnnnnnnnnnnnnnnnnnnnnnnnnnnnnnnnnnnnnnnnnnnnnnnnnnnnnnccccctagtgggcggctggagaagtagacagtcattaagagtaagtttcaatgaggaagactgagacctggtccttgagtgactctgtcacagcttcctcatgagcaagcttgtgtagaagcacacttctgctgttactagctgttgctgtacaatggaaggcgtactgctttttctttttgtttttattttatttagttatttattttttagggagggtcttgtgtagcctgagataatcttaaacctgtgatttttctgcctctgtttctgtagtgctgggatcacaggtatgttaccatgcctgggagtggggacaggggacaccaaaccaaaaaacacttgggatagcaatcccagagagtcaaccgacatcatgaaagcctcccacctgtagtattgttaggagctggtggcctctgggcagggagaagtctcagatccctgaagagtgtctcataaagagagtgggagtcagttgggcggtggtggtgcacaactttaatcccagcacttgggaggcagaggcagaggcaggcggatttctgagttcgaggccagcctggtctacagagtgagtttcaggacagccagggctacacagagaaaccctgtctcaacccccccccccaaaaaaaaagaaaaccaaaacaaaacagagagtgggagtcacaaatcttcaggttgcagagccacataggatttgccatgtctgaggaaatgttggatgtgcatcggagaaggaagtgaccattaccaacacagagcccttgaacttccaagtccctctgtgtgaaggtctgtcttatttgagggagtcatggaagagccacccacagcaggtctggattaccacagagtcccttcacaggaaagataaggacatacatttcctagtgtccaggattgcccagagctgggaagagggcagagctatcttaagtagggtcttcggtattctacccaggccttgtgtgtaagtccattacctttgctcaaggccacccacccaaggggactgatgagctctgctgtgtacagagcgcagctgacgggtcacaagctggttctcccatcctgcacttctctataggaggctcggaacctttgcagtcagagtaaactcctggggctggacacccatggcctgcttacctgagtttctggggaaggacaccaggcttctgtcacttgggaagttttgccttcattgtaacaatgtagcaatgtgccactggaactgtgggatgctgtcaccacctgtctgtcactgtgggttttccctacagtgaagggaatgcttgtggattatattaaagctttccataagggtgtttctaagttgggaaagcactaaaagttttctgtttggtttattttgcctccaactcagctgtttaaccatgatctcggtctgcattccagtgggcatttgaagtgtttttgttctaaggtagagcccatgactgactgtgttcatccaggggcttggtgaatgtcacttcctgcttcctgctcgctgcatggaccattagtttgatagcaggtcatttcttccttcttgcaatgagtgtagtactttgttggagaaaggcaagaaagcagacagatcccaagagacatcttgaaggctctggtgaggattgggccttagggcattggctannnnnnnnnnnnnnnnnnnnnnnnnnnnnnnnnnnnnnnnnnnnnnnnnnnnnnnnnnnnnnnnnnnnnnnnnnnnnnnnnnnnnnnnnnnnnnnnnnnnnnnnnnnnnnnnnnnnnnnnnnnnnnnnnnnnnnnnnnnnnnnnnnnnnnnnnnnnnnnnnnnnnnnnnnnnnnnnnnnnnnnnnnnnnnnnnnnnnnnnnnnnnnnnnnnnnnnnnnnnnnnnnnnnnnnnnnnnnnnnnnnnnnnnnnnnnnnnnnnnnnnnnnnnnnnnnnnnnnnnnnnnnnnnnnnnttgataccagctgctcgtcatggctcatgtgtgtggaatgagcagctggcatgccccatgtcactctgtttgccatgctggccttgctggtgatgggcttgggaacaggtgaggagcacctccacaggtgtgagcatccatgtgtgaaagagatcccagcactcaggaggcagaggcaggcggatttctgagttcgaggccagcctggtctacaaagtgagttccaggacagccagagctatacagagaaaccctgtcttcgaaaaaccaaccaaccaaccaaccaaacaaacaaaaaatgacgatgacgtcagcagttctcagagctgtgggcggagcctcagtgaagcagtgactccccatgacaagcataggatgataattaattgttccttgtatacagtgggacaaggtgtccccaggatctccagatgcagttcccattctgtactgcctgccgctagactcagcagctgtgaattggctgtggagtcttagccgctgtctcctgcaggtacgtgcagtttctcagcgggctactgtctggagccatgaagatgaacacctcacctctgttcctacacttcgtcatcatgcatggtgtccccagctttgacactggaggaggtgagagacttccccagcctagactagagagagccctcaacaagcagccctttcctcctgggatacctaggttctgttgctatggttacagtgtgtcagcagagctccagcttggggattacaaagagccttgtagccagtacatgagctcctgctaggccagggtcaccctgaatcagcagctctgtagaggttcagctgtgtgcttcttctcaaggtttccacagctttgagagaatccagcgcagtagaccatcccctaacgcaccatccttccttcttcctctgtgacatattccctgactccctgttccatgtaggcactcccagcatatggccagagaccttgccccctgtcccctgcaggtgctcacagctcgtgtctgggacagagcctgtctcttgctccctggctgcacccatgcaggtgttcaatcatcagttgattgtagctgtagcttctagtccccctgatcaccaggagtaaggtgaacttacagaactacaggttgtctttaactccctgcccccatggccttctggttggaggcccaaccatgttcctttgttggtggaacatctgtgcatgtgttcacgatcctgtctttccttggcctgtgcctctctttcagcttgccggccctttctgaagctctaccaagctatgcagcctgtgtacacatctggaatctagtaagtgcctggcgtgtgctgggtttttcgggtgacttggggaaggattgtgaaatgggttctctcccacaagaagtagagcagggagggccagccatgctaaggtccctaagctgctgttctgagaggtgcatggtccctgcatctctagttggctccaatgggtgctgaacagtggagccgctggggcagaggggcaccattactgtttggaagctggtctactggaaagtgctagaacaaagtcacccatggtttttacattccccttagtgtttcaggtatccgcagaatttgtatggcttcctaagtttggtttgcagtcatgtagatagcactttgattacagcgacaggaaatgagaaagatgatagatatcctggcacccagaaagactcattatttttttttctgggctcaaattctccccctggccccatgctttctttcatgcaaggatgacactgtagacattgtatcctccaattttcacagaagcagagtctgtccccaacttggttcctctcctggctgaggcaaccctaacatgacttttccaatctggggctatgacgatgctagaataattcaccccagctcagagctttctcaaaccttttgactgatttccacaaggtacagcctctgaattctgggctatttgtgtaaaatctagtcattttctcagcttggactgtgtggtcatgaaactgtggaactaactgtataacgagctattttcttgttcatctgaagcaatgtcggctctgaaaaccccagcaggatccgcatcgccattgagccggcccagctgctgaagggtgacatcatggtgagtacccacaggctatgaccattgtgtcagccacccaggatagtgacctggaaggcaaattgattttgccttagaacaaagccacccggtttacaacctccttctcaaagaaggggaagtaaccaacaggagaatggagaagaacgtgaccctcaggactgtaatctgtgagtaaaagtattttaattacagtgacagatctttgtccttgatcatcttttataacagagctcctgggtctatgcagaacaaagtccctactcagccccagccctctgagcatcccgttccctgacctcctttgtgatcccaggtctccagagtatagcatagagagccagactccagtgtatgactggtgttgttacagtgtggttataatgatgaacacagtgatttctccagataattttgttcttggaagagattaaacattactttttccacctcctgtcttgactacaaaagaatctatatgtgtaaagtaattttcagaaaggttttgttcgaaagcctgcgaggcatgtgcacagcttctgacatgtggagaacaatttagatatgatctgttcctggtcttggcagacctactttgttgagatgatgggtgatttaggaatttgtgttgcattttattgtacatagctcacgcagagtgggcacctccctgttttcaaggacagatagactgacactcagacctcgttatgagtggtgggaggttggggaaagcctagatgagcaagctgactggagattgggtgtgtagctcccatctcctcactctctggaaaaccaatgctaagcctccatctgagctttctgttcctgggctggtggcttccgagtcttctacggctggagaatagggacagtccagaagctcagtcccctgggaggtgactcgtctcttctccagctgccttcctccctctgtcttctcatctcctcttgtctttccttacataccttccttcttctccattttttccttccccctctccgttcccctctctttttgcccctctcaaattttaagtttttactcaggtgtcttgagcttcattttgttgttgcattttttgtcattggttttggagtttccagtcttagcactggacacaggaaggaaagagggagagagtggtttctttgtcttggagatgcctcctggcaacatagtttctattggagaagagaagctgacgatgctgcataggccaaaggagccatacctgtgtggctcaggaaggccacggtggcgtggcttcacacttcctggtgggaccttccctagcatgtgtgtcttcgtgaggaagcacatcaagttggaaagggacatgcctgctccttttttcttttggggagctgtggcctctgcctagtgagaaccttgcttaagttttgtgaacatgagaagaacaaactcacgtcaatatcccaggacagtgcccaacactgggatgcgggtgggtgggtggaggggcaggatagggcatggaccacatcatgccatcctgaagcatttcaagccttgtcactatcatcgaggttgctcatctccttcctctcttctctagaggagcccctgggtaggcaccccttccttgcactatgcgccccggagcaggcagcagtcagaacccaggccccagtagacattgtatgcactgtggccactgggaaatggatctatgcatatgtggaactgtttagaaggtctgtggctgggaggtaactcttggtcactgaggtggttcagagaaagatcgggtggcaacggtaacgcgtggagctctgcatgggtgagggagctctgcatgggtgagggagctctgcatgggttctgcatgggtgaaggaggtgtttactggcaggcatgcctggacttggctcgttcctggctctgtgcacccttgtggagctggcggttgcgttagctcaggaaagcgttcctgtggattgccgccatttaccagttggctaggtgaatgatgatgttggtagcatccagaggtcacctggaggcagttcttatcacatgtcagtgacctgtggctattgagtgacatttataagcagactattatttgaagctattaacctcaggttctgtactgctctgtccctttgtaggaagtttgagctgatgatatttgaaccttcaggaaaatttaatttccaacttgaacttgcgagcccatttggtgccaggtggggaacctctttagtgtcagttgtggggtgatggtcagcactgggataagggaggttattgtggtaataattaatctcaattgggggtttctaccgcaccttagatcattcatttcccagataaaagaaacaaaacttctatatttataataagccttagacagcactagaactgggtagccatcaaccctctggctgttttgcctacttccctgtcaataacctcgagatacgacttgccatgttactcctgggccactcttactcaagctggccagctgtcatggccagttctcactatcccttactccatgttgtcttcctctctctcttttgagacctgagaaggaggaaatattatctgaatatgtaggaagcacaagaatgcagcttccaaagattatagaaatgacagagacagctgaccacgtggagagtctctaatattctctataacattggatatttatctttagccttctggcccagaatatctgacagacctatacgaagcagaaattatgaaggatttgcttaccctgtcatggcagagcttgtcagtcaacttcctgcgtctgtttgtcctctttggacagcattttgtctggagatgacgttagggcattttatttgcccagtgctagcttgccacaatggaagcaactcctgatggaggttttgacgttcatcattttttaccaaggtgaatgggggtactgccaggagtcgacatgtcttaaaatgataaaattatgtttaaatgccatattgtgtgactctctgaggcttttgaagaccacatatctatttacagcatatctaacagacattgcttgtctccaggtacctactgcatgtttaacggaggattatatttctataataaatctagactagtatctaacatgaccatgagcttgattgactgactcttaacttgcattacttaattattttaaatagtttgtaattaaaaggaccaggactaaaccttgtatttttaaatgagttgcataggcataatacctatgtaagagctgaaatttacatatattgtaacaaaattaacattaaattttgaatcaatattcaaagattcatgctaataaaaaccttaaatctatattaatatgaagcatttgtaccaatggaacagaactaacctcatttgaggataccaaatagctctaccttgaagagtagaggaggcattgagtagtcagggaggaaccagtgccgtggttccagctagggcatttctgcattgtgcttctccctgtctttatatagcacatagaactcacgaagtcctgtgcgaaagggagggatcaaggcagggacagcagcagcccctgggagcccaaggcaccttggagagcactgctgccttggaaccagaagcaacctaatgtgaagtgtttttagaagcagaaagtgactagcagtgggtgtttgggtgatcccaagagccagggagcctgtcctgggtgtcctgcacaaccagtcatggaggccaggagccagcctctgctgagagctgacgtgagggagctcctgggaccaacagaccagggccacggcacgtcgggatgtctttagaagtatgttgtcgttgagcgtaagcataaggcttgtgttgagtttgtatcaagaagaagggctgtgctggttggaggagttgtgagcaaaggccccgcccctttcttcttgcttgttcccctgtctggcctcacttgtttaggctactgctatagagcactgttgcactggggtacttaaatggtgttcacgtgtgtttacatggatgcacacagatgcttacatggatgctcacttatatagttctgcagattggaagtccagtgtccagggctggtaggctccatatctagtggggacttggtttcttatgtataatagcaccacgtccctgtgtactctcctacaggaaaagggtctggagtctctataggggctaatggaattcagaaggcttagcctcctgacttcattgtgcctgagagctcccatattctcctactgtctccatggagtttaggggctacagacgtaacccataatacaggttggtatatccccaaatgctctggctgctgcctgcctggcatctgttctctcaggggcttctctgcttactttctagaatcttctctttgcctctgactaggccctcaagcctcctggtcctcttcctgtctaattcaggtttagaaaagagaaacttgagcatagaccctcctccactgcccagctcagtggtggtagcctctccacccataatagctgtggtgccatatctgtgtgcttgcctctttgacttgctaagaccctttggagcagagccttccctagacgcctggcagctgcctttgatctggtgttggagccctcgccctcctgccccaggctgcttctctccccttccttgtttgtgcagctccagagaagctgcagttagatctttgtaagaactggggatggctttcccaaggatttgtgggcctggtgtgatatggaacagcgtcttagttgtgctcttatggaaacagaagccagctatgctggaaaactatggtgcacaatgtgtgagattcaggcttgagggctctggaggtgaacttcatgccacaggccagctagctcctcttgggtgactcatttccattagccgtgctggcacagaggagattatagatccacaagagatacttggtttcgataagccgatttccttcctgtacccgtttccattcctcacatggaatatttttaggattgcatactgatttgatttacacttcctgtgtttataattcttttttgtatgctctgcacttttttttcttcagcgttatcagataggctgtgggagacgtggaagctgacaagggtatttttccatcacagtgtaatttttccttgcacagttcatagaagtgactgctatgaggctgacctgctgcctgtcagaaatctgacagcacttttagtccattgtaatccgacagaatggccacgatcaaaggacactcaccccagactgggtggcttgtgaaagaatttctgttctcttgttcttgtggggcttgaagtctgtataaggacagggtaattagcagggctggtctttcctgacctatgtcataggtaggtggtcttaccagaatcatttccctaagctctaacctctcnnnnnnnnnnnnnnnnnnnnnnnnnnnnnnnnnnnnnnnnnnnnnnnnnnnnnnnnnnnnnnnnnnnnnnnnnnnncccccccccccccgccccctggctttttcgagacagggtttctctgtatagccctggctgtcctggaactcactttgtagaccaggctggcctcaaactcagaaatccgcctgcctctgcctcccaagtgctgggattaaaggcgtgttccaccactgcccagccccaacctctttttacaaggatgccagctatagttcacccaagccaaccctgacggccttatttaaatgcccttcataaaagtgtcatctcaagtagagtcacattctgtggtcctagagctttttgatttgtgggtataaaaaggcatcggctagcccgcagtgagtgtattctagaatgtgtggtatgattgacagttggctgttggtgactggacacctttgctggggtttctcactggccatcactggtgttcatgttcctaaagtggctggcataggaagttagtagagacaagctcagggcctgctctcggagcttagactcacgtgctcgattagctgaatgggcaggcagggagctaactgagttgacagactggtgtgtgcacaaagatgagctgaagtcttgttataatagaatagacccttttccctagttaggtgcaaacggcaatggcttagctttcgactgtgctcagcccagagggtgcaagatcaggagtcccagtcaactctcagatcctagtctgtggagcccgccttgtgccacagctcagaagccccacgctgctggtcccacttcgagagtttaggaaagagaagatgctggaacatgctctatgctggcagtgctcccacgacagtgagtgagccgagctatcaccgatcctgtgtcctgggctttggcaactctggatttaccccacatttctcctctacaaccttgcctagctcaaaggaacctgcgggcctcctttgcttctgcctgtaaccacctggcatgttgtgctgtgtgtgcagtgtacaagcccgaaggctgcaggtagggaaatgtgttaggctcaggtatgctggtggttacatttctcacaagagatctggcagccactgtgacttggaaaggaccctgcaagggacagaaaatgtgtctagatttacctcccagtgtctgccctgtcactggtcctctgtgtgaggaagctgcccttggggtgtaatggtggaatgctgcttccagaccatcttactgcttctaaagaggcactttgtccccttaagccaatcagaatcctccttcatttcagtgactgttaccttgtgtgcagacctgctgctctttttctgcactgagacaggtagcagagataaaaaggagcaggttccgaagagggaatggcctagtaagtgcctgggaaactcctgagaaacagagctctctattatatcttttggctggtgaccagcaggtggcgctgtgactggagacagcaaaactgacattgatatatctgcctctgacctttcttagtggactgctcctgtctttacaaagcgcttttcacagaaggtcagattttgtgatcctgcttcagagtccgctgtggtcaggtgcaaggcccttccccggggaggttccctgcagcttatataacctgctcaggaattcacgctgctgcaggcccgccaggaacctggcagagagcctggggcttgagccagcttgccccctccccgtctcagcacttggtccagagcttgtaaacatctttccatctggcatgctccatcttgctgccctgcctgggcaaaccacagccacttgtactttgtctttatggttgctggctttgtgaccagtgactgggcttgtgagtacaggtgaaaccgccttaagaagttgcacaaatagcactggtgtttgttgtttctaacagtgggcacttgtgtgtgaccagtgaaaggtaggattgtgtccccaagctgccccagcataggccctgggaatggatctctgttgtatctgtgactgtaatcttttgtgattttctgtttgtttgtttgtttgttttttctttgttatgctgtggactgagaactaggtcaggtcttcatccatgctgtcatccggcactgtacctcagttgtgtttttgttgcgacccatatctgctcaccctttccttgctttttgttcgtgacttgacagtgttaggaccccggaatcacactcagctggcatggagatcatggcattatccgggatggaccaaagtgggacttccatttctcttggggatgttcgagtgctctgttcttagagaatgtaagaggaactctgggtctcccttgtctgtgcctagcacatcaggaggagagtggacactgactgtccttaagagctgactcacccagctcaggcactgttcttccccagccttccaagggctgggactgcagcgtgcgctacacccttggcttaggtgcctgcctttacttagcttaaagactcagctttttacctggtcccaggctccatcatcctagcatccagttgaaggtgtagagatatctttgtgcaaatgtaaggaaataaggttagggcaaggtttccagactgtttacccagagcacaagtaaagaagaccactcagacccttccatggccctcgccactatcagcgggtttgagcaccacgattcccttcctagaagctcacgcttttacgttgattattaaatagtataacttgtccggttgtttaccagcatgtaggcatgattatagggcttgcatggatacggacatctgaagatgttcagctaccttatgaaacagttaactgcttgcatacaacatatgaacatttcctacatacttcaaataatctctagcttgctcatcacacctgctaatacaatataagcgccatgtaaatagtactccacagtgtttagggaatggctatgagaagaaagtctccatgtgttctgaagttgatggaatctgcaggtgtgcagtctactgatacggacaggctagagtagatataatcatggagatgtcacagacaggtagatttgtaaggcctcttagtacttagtagctatatatatatatatatatatatatatgctgtcaagtaaagctgctgtccaccttacagcgaagaacgaaaggttccaagaggatgaatgcctctgggtagcgagtgcttctggtgagttgggggtcagtgcagacgctccttaggtgggctctatgacagtcgtcattcaacacagtgcttaccacaaaactgtgaccatcacattgacttgtttcaaatgacagtattccagaatctgacagcagaggatcagggtatttttagatacattcagtagagacgcaagaaagtaagtacatgttacagccagagaaccagagtggtttcagattgcccagcgatcttcatgaaatgctttctatctttacgaaaggcctctggggccccttgttaaggctgtgaggtcctttctactcagcaagcacaacagttctgatctttgaccactgtggctacaaagattaaaattgatactgatactcagtggttcattattggaccttcatgtaggtgacagaggtcaccagatcagggtcttagctaaaaggactcttctcaaagtctgacctgttgtattaataagcctgttagggagtcctgagagagggtagtgtggtgtgatttgtgtgtgtgtgtgtgtgtgtgtgtgtgtgtgtgtgtatgtgtgtttaacattgtcagaatacccacaggagaggtcacagaaaaacagcacagcattgctcagcaacagatcattcttgttgacaatcctaagagtgtttgagaccttgtgatatgacagataaagaatttgcaagcaggagatcacaccaggcccaaggtagctgggagctgcccaacctgtggatacccatccttttcctcccacgcctgggttggacagagttgggatgcctgggttgtgagtcaaaagtgtttgtgtgtagctgagggacagccagagtaggtgtactcggagtacgtagccccgggaaggatctggggaagaggacaggagaagaatactagtaacttgagtgggtggaaggcgagtcgagaccattgagaacagaagagactgcggctgtgttacatacccctgtgcctgtgcctaggatctcccgatgccctgtattcacctagtcaggtccacaggccactccctcctggccgtccttcctcactgtcatgcatgtgcttgagtggacccagctagatctatgtccccagcttgccctaatttcctgagaccttgctcttcaaatatttattctcttaagtgtgtatacaatttgggagcaagtctggattgaaagggacttcacttttccctctcttctccccaccctgacccttgtaacttctccaaggcagccagaggagaacaggacaggatcagctgacacagggccttagtggagggcagtgtggcatcagtcttggctgagaggactaaacctttgaagggtagttggtgtgaggcatgaaggctcagaagaacatttcggaaggattctttaattccaaggaccattttggatttgaaggattccacaccagagacctgggccagcctgccgtttgttgttgggaagccagcatggctcttgggtcttcttcattcttgattgtggatagacaactgcaaattttctgtgccaggaccactagagatgggatctgtgtcttcatcctcgcagaggatgcttgggagaagcctttgcttgtttgtcagcaggagcatcccttgcaggctgtttcctggtagatagcacaatgtcaacaagttttgggtctgcccaagggctgtggtgcccacccagccttcctgcctcggcttcttggcctttgattttctggagtttccgtgggatagtttctctggtgagaggatgattgagttgtcccctggacatgttcttgcctggttggtgggtactgaggtttgataccctgcttcttgtttgcatttgtgaagtatgatgttttcaagccatcctttaccaggaagagtgcctagcgcagtttccggtgacatggtaagccactgtgggcactgtatagtctcaatgctgagttcaactcagtctgccttggacccctggagactctggcaaggcactgctggcttatggctcttcctctgccaactgagtgaggtccttttcatagcacgtcttctccccactggtgtggagaagcctttgttagcaatataagacagggcacaccaggcactcactctggccatggtcctacagttgctgtatcctgcttgtcaacatagccatgcagggttctaatgtgattctaatacttcctctaaaatatcacctctaggaccttggacacctgggaaagggaccagcatctcttgtctctctgtctgggcctctgtgaaccccctcctccatttccctaccccctcacattctaggctatactcagcaagcaggatgacagcaataaccagcgtctccatggtgtgagagccaagaggtgttaagtggcaacatggagatttgagatgaaagggaaatgtcattgcagtcagctgttaaaaagatagacaagagaccacaggtgtcttctaacacaactcctgcctgaagggtgtggtcttttgagattttccttttgttaagatagcatgggggccacagggaatctcttagtggtgtgctgactgattctctgcctccgaggtatcttttcagtgtgaacatctggccacagctgttcagaggccataccatctatacttctgtgctaagcagtgagctctgcccctcagccattgcctgttttctcttcctctcttaaactaggtgaaatgctatcacaagaagttccgctcggccacccgtgatgtcattttccgcctgcagttccacaccggagctgtgcagggctacgggcttctgtttggaaaggaagaactggacagcgcctgcaaaggtgagtgaataaagccccctgggacgtcagaagtagcatccttccctgttttccttcccacttgctggtggagttactgccaacataacagaaccgagttgatctatgggtgaacaactcggagaagccaggaaaatgttgacactctgctcgtgaaggtggtcggtcacagctttgggaacaaccttgcactggctgggctggaagggcaggatcagtgtgtacacagtgcggtgtggttctttgtttcagatgaccgctttcctgactatggcaagattgagttggtcttctcggccacacctgagaagattcaaggtaggtgactggcagtgggcagacagacttgatcggactggagacagttttgaggatcctgagcttgtactaacacctcccaccttgaccgtgcgtgcgcgcatgtgtgtgagtgtgtgtgtgtgtgtgtgtgtgtgtgtgtctgtgtctgtgtgtgtgtgtgctgtgctgcttggggtcttgtgtattctaggcatcccctactgctaagcttggtcttgaattattatttttttagatagcatattggataataaggggtaggtggctttgaaacaatagcactcacttgggaaatatcaaaaggtagcatgacttgcctcaggtggcctcactaaggaacacttgaaggctagggtgcttgttggtgtccctgagggttcacttacatccatgaggttataccaaatgcttgctttttccctcagaaaaagtgttttaaaaggattgccagtacagtgtactaaatgtcggtatgttttagaaaatatgtttaatagtgtgtgtgtgtatgtgtatctatcattagatatatctgtagtgaaaagtactgatctgtctccaggcctcctgtgtatgacagtttcaagcgtgattattttgtagcctaagctgtgacatctgatcatctggcctcaaccttcccaatactgaaattggctacatggtcattttaactctattcttaattacttagaaaatgatccctcttaaaagtaggctcattgttatagatttgggtaggaaggctcacagggtagtatttcctgtggtagtttgagatgctgggctttgctaagtagcggctgtgccccataggatcggagcatctgtacagcgaccagggagtgaccgtggactataacacagcagacccgctgattcgatgggactcctatgagaacatgagtgcggatggagaaggtgagtggctctgcttgtaacaggaggcgcagggcagagatggggtgtccccggctagatcagcagagcttggctctcgtttacaaaatgaagatcaccctcaccccacagtccccgagctacacgtgtctggcactgccggttttgaaggcacttgcacatatcaggcttggtgaattttcagagttgtagtatatggagggctgatgaagcctcctgactggagcaggaagtgtgttctacccactgacttccatcctttccttcctgtatgtgctggggactgtcatatattgggcaggggcagtgtctactggctgcatattcccagggtcgtggaccttccggcactgtttatgtttgcttgttatccaggttgtaggcagacgtccattctctgatcacctgcagagtgtacactgtggctctctggggatccacaaagcagataaaaaataaacggacagtcatctcttggggatactgagagaatcccttggggttgatttctgagaagtgggcatccaggttttctttgatctttaatcttttctggtgttaaatttacctgattacagagtgagttccaggaaagccaggtctacacagagaaacccaatcttgaaaaacctaaaaacaagcaaacaaacaaacaaacaaaccaatccattttatatatttatcatggttatggagatgtcagtgtgctacaactcgtgtgtgtgtgtgtgtgtgtgtgtgtgtgttgggtgtcagggaggcttgcagaacttattcttttctttctgtcacatatgtcctggggatcaaactctggtagtcaaagtgctaatcaaagtgctaatcaaagcccaagtactgagcctgagtgggtgcaggagaccagtggctagattagaactggagagccatggcatgatagagcctgtaagtgactatgcagaagggccaccaaagacacactgggatatttcactggcatgttcttttatatttttaaactactgactgagactcagacctgtgtagagaaagaaaattgaagtcgtgtttgtcaagttagtgatatcctgatgggagacatcaaacaccagtggagatctccacaccagcatccgcttcttgtccatcactaaatggaagtctggggagacccgggaagacggcatctctggccagggctagatttaacagttctatgtctccctgtttgtgctggagaaatcacatgcctttctgtgctggggagggtgaagtttcaacagaagggactgctgggatttcaaatccatatggatctgaagtggcaccaggggtgaagtgtgaaagctccaggcattaaaacacaggtgaaattttggggtgagcaggcaggtgtagacaaggcaaagctttctatctgtgtttcttcccggtgtgagtcattcagaggcctaatcctgcaggtgccagtgtagaaacacaattatagctgagtactttcggaaaacttagcgctgtgcctcaaagacccatattgtacatagagatcgttacgggtcccttgccagttttattcatatggggttattactagtcttaaccccaagggtatatcttattgatgtatgatagtgtgtgacacggtcctttcccattggccatgcttctgctaccttctgttggagaagagtgacaggtcccctttatgcaggagtgagtggatggcttaaggcaggaggggtaagggacactttggaaaacaggataaggggtatcaatcaaagtattggccctgggacagggaggagatggtgacctgacaaaccattattggctagaataaaaccagagagttaggtaatgaagtagccagcggctgtgaatagggaccagcggccagggaaatgtggtcaagaactcttgctggaattgtggcattcttcgtatgatggaagtcaccttacttacataacagatgaactatcccaagagccagtgtccaaaggctcaggttaaaggatggaacggtggatgggacttgtgatatcagggatttcagttccttttcacctcgtttgcattgcttttgtctcctggcaagtggatccttagagggagggctggcagctctcctcacctcacgcctaggagactcagagagaggaactggcaagggaaaggatggagcctttatatacctgcctgcagagactgcttcttcactcaggcccctctttctgtgatgttacaaccagaggcaataattgtcagagcctcaaatgcagccattccacacactcatggctgctggaagcattttgctactgttttaatctgctcagatgtgataacaaaatgtcacagatttgtgtcttgcacagtcttgggggctggaaaggcaagatcagggtgtcagcaaggtggcggtctccttaggtctggttgcatactgctgccttcttgctgtgtcttctcagctggatggtggttaagagagcttccttttataagggcactcttcctatcacaaaggctcctcttccaggcttagtcacctgtcaataccatctccttggatgttccttttcaacataaaggatcttggaggaccacagacattcgaactacaatagatatgtgatgtattttttgagtgagaaattattttgtctttagatatttattctgagagttccccttagggtgatttttctttcagtagcttctaagctgggcagcatggtcaggagggagagctaggttgtatggtttcatgttctggggctctgcagttggactgtctggctggtggcaacctaatgttctctaaatagccaaggcttggttctggggtcaaatggactgcgtatgtacacaatgtgtcatgagttggctacattgttattttagcagcacctggctacagccagttcagactgttgaaggatggcaaagactttaaaatcactgttcctcacatctcacagattctctcgggctggggtggggcttccactggaaacagtgctccagtgcttttcaccttctctcacacactatgtttctttagagaacttcaacaaatacaaatgaatatcaaattattaaccccagaagagctatgggaaatgggtggttagcaagtgggagatgtatttattttgagaaagtgattactcccctaaagataaaaagcatagaacatgccatatgctaatgggaatggctgtgcatagggtatgaactgatgatgtaggctacacaagatttatagatatattggtgtgagctggggagctttgctaggtgtctagggctagccttcaggattaggagggtcatatccagaaggcaagcttcttggaatgaaggtaatatccccttcctccagagaacagcttgccctgtcctagcaggcagaaacaagtagataatattattaggagtagtattatcagccagctacactgttgcaaaagtttagaaaaccgggtcagagggacagaaggaagagtaagaaatggtagagttttattttcccattggaaatcaatttgtatttatattttctgtactttactgcaaaatacaaactatcattttcaaaaagcaccatccatgttactgcctggaaacaaagctcttgccattgctgtactgtactttaggcctggtttcccacataagtggttcctacacactttcagagccttaggttttgttttttgtttttttttttaacctcacctgcctgagcatgtgtgcgtctgtgagtagtttctcccaggtcttgctttgtcacgttgtgttgcattagacaggtcaccacagtgcatttgatcctatcgctgtcaccctgtgggacttctgtgtttccactgttgcacccaagaccaaggccagtacggaatagaagatccattctcatggctggaaagtgagtcctttccgatgtccccctctcccttaggatccatgtcctccttagcacctctcaggctgggggaggctggactcctgtgtcttgtgccaggcagtccctggctcttgccaggggtctgcaatccttggcttgggtccctggacagagccactccttggcaggcagaaagcaaagtcttagcttcgtttcttgccagggcccaagcctcaagcggcattagtcctgacagctgtcgggagctttgaggaataaaagggaggtttggcagcttttgaaacattttcttttagctgaaaaatggggtattacaatgctccctttaacccccactgctgcctatagtttctgctggtcttaaaaaaaagaaaaaagaaaaaaaaaaaggagctgaaatattgacttaagccgcatttatctctagaatgcctgcttccctggaatgagcccgccacagctgccttttgtcagggttcatgttaggaaggctctgggttttatgcctgatgccccactttccatactaagaaaaaagccatcctggaatgtgttccaaggtgagcaagagggcacaaatgtcccatctctagtggtgtgtgtgtccatgtggtcttcgttattcctgatctcatggggctttagtcctgctggacagtggcctgctatgcttgcaagctgtacagccagtggcctctccagggtacttactatcacccagaacagggaagaatgtcctggtgtggcaaggtgccaagaagctcatggtgtgggtgtggccaccttcagtaagcttggctgtgctatttcatcttcataagaacctatgagccctcttaagagatgaaaggaacagcagttcccaagaacagtaaaaagatggggccttcaagcgccctgggagcctcctggagtttactgttagcgccctctgtgagttgtattgttttttggatcactcaggacagagccctgtctgcctttctctgtgtgacaattgtgctggatatcattaggtggattgcgttcccatggaccagagcagatggacttacttagctggtggggagatgcagaattgacttggctgtgatgggctaaggaaggtctcctagcagcccatgacctctgtgaaggtcataagggtaatcagtgtgcgtggtgtgttgctggggactctgtccctggagtcctggctccttctcttctctgctgttttcttacttgggtagtctagactggctttccctctcccatcgttgggcctcaagccctctattgctgtgcatatggctctctgtaaagccatcttatctcctatttaagaacccacagtgccatcaccatagcctctagtcccttctgggtggtgtgtgtgtttgctctgactttgttctatttctctttgttctatagaacaaagggaggaatgtttatcatatattcgttcacatcagcatgcatcatatgagcagtcttcttcattgttggcaaaaactggtttcaggactctgtctcagacaccaaaatgcatggatgttcaagtttcgatcttcaaagtgagataagatttgcatataatctacacgcttaacccattctagggtttcttataatgtctaccacaatattaatactaattaatatttcactgtttggagaaagagacacacacacacaatcttttatttttaaaacagatgcaatttttaaataattttttgatctgtgattggtgggttccatggtttcagaacccacagacatggtaggctgaccaaaaatcatagtcatgttagtagtatagagggtgtgccatagactggaatttggagtacagtgattaagaaaaaagcaaagagagtggtcactccatcaagtgttgaatgcagggcatctctactggacagtatgtgaggtccagcgtgtaaactttaggactaatagtagcatacaagacttgtgccctatcctgaagtgttataaagctataaatgtcttgttatttgacagtgaggctggaagatccataaagcttgaaaccctagcacaacactgatctagaggataccccacaggcattagagtctggaaggcaggggaggtagaggagggcttatagagctctctagtcaagagcagttctagtcctggaggatgggggtttcaggccctcagcagtggatgggtatcacaaccacagatcaaacaaggaccagagggaaggaagactcacgggtggcttggcgttgcacatgagagttgctgggccattcccaaacccttggttttctgcattgacctcctactctgaccacactccttaccaatctaagggtgagccatatgagggcatctccaggtttggactctgacactttaagggaataccttccattctggtgctcaggcttgacttcctagacagctataattgagctgtgtgagagttccctctgcggctgtggagtagacagtccaaagggcattcagatctgcagtcctaagatggccagatccactgctcagtattcctgtgcttctgttaacttctgggaatcatggggttcctcctgggcagttcctcatcggtaggatgagatgctcccgtggagcatccagagatatgtttcttcttcacctggtgttggctacagccctactccatgaatgggtgactgtcagatagaacttctctagatcttatttctgtggcataaatagtcatgaagagattttccaaagatcttgatatctgctggaaatatcactgatgggagtgtgtgtgccatagctcaacacagctagcatagctgcataaggaggttgaggcaggcagaggtatgggaaagcaaatgaggactaggtgtgtgttccaggggggagattgtttgccatggtggataatggtgagggcgatgctagtctgaggttgaatagggcaggcaagctatggaagaactttctatatagtgctgctgggtcagttagctttcctgttcctgttgtaaaatgcccagcagaagcagcataaagccccagaggtttttttatttcatctcccacttgcagagagttctcagtccattccgacagggaagactggtgatggcagcttgcataaggctgtttctgtggcatccagcaagaagcaaaaaatatggatgggaaccagggcagatataaccttcaaagacttaacctctagtgagctactttcatctatccaactatccatccatccatcatccatccatccatcatcatccatccatcctaccatccttccatccatccatccatccatccatccatccatccatccatccatccccaccacccatagggttcccaaccttcaaaacagtggtacgagtatgaattgagttaaacgtgaacaaatggggacgtttcacattccagccaggactgtggcagggcccttgtgcctgtctatacttcatagtcttctgtatttggatcagaatggtctgtgagaactctgcctttaaaaatctctcaacttaatttttgtttgtgcttactacaatcactctttttattatgacagcgttcttaatgtacactcagccctttgtacactcagccctttctgagtcctgcctgctgagctggttaggtgaaaagcacttcacggaacaccttatgctgttaagggacaatgatccctatgggtagccaatcctactcttaaagagctcctcctcttgttgataaattgaggccacactctgctgccacccaggctccaaaggtctcctttcattgactctgtgatgtaacagttgtgtggcacttttaggtgcagggtgacaaagctgagggcagtggctctcaatagctgtctgacccctgggaagcctctgctcagtattcagagctgtaatccagtcatggactattgacttttgaaaatggatggaacctgttgggaaagaaagtgtgatgtcgatgctgccaaaggacaagtgccaggccctggcttccatcccattaagaagacttttattattattgttgctgctgttgttgttttaattcccaagtggtgctagaaaaactgtctgaaaatgtgtgtcattctgtagtgttgcaagaatcttatgagttttgaagtgatggccccaggatagagaggtggcactgagatttcagtggatttgacctttgccctcacctctcagtctccagcctatgcactctcctgaggtctccctcccaggaggaagcaggagcaccatctcctgaaacaccctcgggtgcttcactctaccttccagagggcgcatcatgagagtttggcaggtgatggaggctggggtggtccatctgtcccactacagtttccatgtctttgtagtccagctgtcatgcaacatcactctcacgccagtttcccctctgcatcgcagtcacggactgcatctctagctttctctgatgacctcaccctcttagctaacacacacagtgactcagtcttagccttgtattctatccccggggctggggacctttccactccagtcgcacctgtgggaatagcagctaagttcttgctttgcctttcattgtctttcctgagattggagccaggttgttgctccttccatacagcttcttttctcacacctcaagtcttgtatggaaactctgctgttgtgacttcccaccatttccttccattaaggtacaaatggctgcccagtgatgtcgcaggtccacctgcctggctctcttctgcgtcctccatgggagtaccatccctcacaatgccagggagatgtgagattgcagctttatttctacaaagcctgaggtcttgtgtttctcagttctgccaagtccgggaaagcttttgactacagtatttggtccatgggatgtaaaacagcagagacaggaagctgtgattagtggctcttccccttgtgtatttagctcatgtgttcctacccctggaacatccaccccttcctctcacacttggctgaatggtagtcccctcttttctcttggagatttaaaatgtaccaagaaaggaatagagatcaagcctgtggggctatggcctgtgcactcttctcttttaaggagtcaagggagagaaaatttgtctgtgaatgcattttaagggcaaagggaggagctttaaaaaaacaaaaggttcatctagaacagtcttttcagacaggtcttctgtgtagccgagcatccttaccctgccttgcttgtcagagctacatgtctagctccctgtgccctgaagctctggactgggggaccaacatgcttagtcttatggaagcgtctcctgctgatgatggtggagttgttttggaccagtgacatttccagggccagtggctttctgactttagttctgcagcttcgagacctcatgctgatacttaaagggcatcccttttccatcctgcctcctatgcaagccctccctcagcctctggtcccaccgttacctctttatagtcttcatattggcttcttacgtagaactttatctgaaggttgagctcagtcattggcagttggaaaccactgccctgtgtgcctttttctggtatctcagagttgagattgttttttaaggtttgcacacaagacttgtgatatcaaacacaccctgcagtatttaaacagtcttgcttccccctataggttccaggacagagaataaaaatagttttgagtcttatgggtcctgtgaagggctgggcatgagggtagaaggaaaggtcaaggcagggagtgtgctttgcccttgaactagattgagcctggattataagactcctggactgtaagacttttttcccccctctcttttaggccaccaagctattagagattcaaggttattttaatggctatattcaatgttatgcatccagggacctcagattttagacctgcttggtttacactgtgaataggaacagctttggctactttttgtggataaaaggtctgtttatacatggtgttcctttctcaggagctagactgtgtggagagtgctccttcgatagagcagagttctgaggcccccttggatgcacactgatgatctggtagagtctcctttgcctcaaaagagagccagtgtagaggcctctgagccagggcaggagacaagtaggctccctttgattcatgaaccaagggtgatcagagcaagttagaaagaactgattgatgtatggctcagaagagagcgatgagggagccggggaggcactgaggctgagattacaagctacagctttaatgatgaaggccgcaagaggtggaccaggaatacagagaaaactgttggtcctagaggctgaaagcaggtcctggaaatgggaggggccttggaaattcttttgctggtcctgaccacgcttggctgttgtagctgttatgtcccagatagagtgggcatttgtccatggaagttacttccataccccaagagcaaaaatgagccagtttttgttgttgttgttgttatgaaaaactgaaataatgcaggattcatggtggtcacatccttagaaaattagattttgagaactcagtaatgttcactttctccactgagcggagttttacctgcaacctgttctctgaaatgatgcccagtagccattggtgtcatacccacattctggacgaggagcagggcctattgcttgcaggataccacagggatgttgtatgggattgggaagcatggcaaagggaaaggagctgcctcttgatgagtagtctgagtgagagcaggggctatgaggaaagcatcctctcgttcattcattcattcattcattcattgttgttaatacatagagctgttgcacagctctctatacctacacagtataggactaggtcgcctgaggagcaaaggcagagttctgtgggaaactgatcaaggaaacctagcatgtatgcacatggggcaggctatggacgcagtacatacctctgcttgttagtatttcagtgctgggtattgacaaaactggaggagatgctcatggcccatgcaaaagtaaggactataagggctactgactgttggctatcagaactcattgttattgagtgagtagcacatttattcctgaccagatttcaaggagtcaaataacttattggtatgtcctagaattctaagaggcccggtttaatagttgtaatgctctggcccttgatatacactggatagcacaccagtggaggcaggaaatagaagggactctgtgtgtgtgcacatgcgtgggcatgcatatgtgtattcagggcaggggacttgaggtctggtagctgatatagaatagaggactgggagtaagctcctaaactgtagcctttcttggtgtactaaggaaggaaatgttttcttctgggagcagctgacaagtgagtaggagccttggggacaggaaggcttagaggtaatcaccaatgacagtgagagggttctgagagtcaacatggtgtgcagtgatgctgtaaaccctcaatgtagagcctcctgtgatcttagaggtgtgcatatgagctgagggagatagcagagcctctgggtctggatgggtaagaaaggaacccaggggttcatgctactcttggtatgaatgtggtgctggacttaactcttcattggctctctctgctgtgctaaggcgtgaacctgatgtatgtagatgtgtacatggtggtgttcgtggagaagaagagaaactgtcaaccctctcagctgtgtgggaaggagacgttggccaccatgttggtggtactcaaggttttcagtttggtaaaacgtcaagattatgtcaccaggaatgttacaatcaagctgaggtctagagagtcagagccagaaaaccaatgggatatctcaggagaagccacggagatacctgtgataggtgagcttagactacagctgatcatggatatgtgtacaggaccaggaatagttagtgatcttggctggaacagggcaccctgaaacataggcttctggagataaatgtcacttgatggatacatcttgatttggggcagttggagagaggtgaggacttggaagagagctgcctagcaggcttccgtggagaccagggtcaggccagtgggtagaaggacattgcagtgggaccttggggctcagtgttgtgggctgcagtagggaagccaactcaggaggatcaatctagagaagcccaagggtgaaggaaacagaagactgggggccagtggaccaaaggcatcaaaatgcgggggaactcagtagctcctcctggagggttggaactttctgccagaaaacacttccctgtcatctatctaggtctagaacatttccatcatcctcaaatggaaccttctacattaacagtcatttctgatcctgctctctctctggtctctggaaaccattctttctttctctggattgctccattcttggcacttcacatcagtgggactactcagtcttcttgactcactctgcttgtcccaggttttcagggttcgtctctgtatttcattcctcttctcagctgacactccattagagctcacactgaaggcatcagctcatgtgcatatgggtctccaccgctcctataattatggatattgttgctatgaccattcttttgtatgtgttgccattatgatattgttgtggtctctgatgttatcagttactcttttactgtcctcttgaagtgcctttatctctttctggattcccacagaggagtcatactaactctttttcaggtctcctgctcatttggccaatcactttcagggacatatgagaagtccactccagccttctcttcattagatatatgatttcatgtacaggatcaaaacttcccaaggttaaaggtttggtgcctttcaaagcccccagggccacagagctgccttctggctggacttcagcaaagcttcaaaggggcacgttgtttcatgaggcatcaatgctaacagcttaagcaggcccatgtaatcaaaacccactgctgaggagtctatggaaactgagaggactttggcacacctgcctagtggccacagcagcagaaaggcaggactagaggccaagtagattctggttggtgacgacttggggcagctcatttataatgtcacctgcaccctcagatactaaagatagaggacaaacctgagctctaagtaacctcagtgtcactacaagaaatggggaaaagaggtctcttgcaggtataaatgatttcttgttttctttgttgttgctgccctaggtgccgtttttccctccacatgcttgggatataaagattcatgttcaaggttctcatgcctcggaagacacagcaatggctgcacatagttagcttggacccaaggaggccctgatgctctaaaggcacatgggcattcattttagtccctgagctaggttattcaaatatctcctaatcttttttttttttttttttcttttgatgtggattctttgaagggaaaacaggttgtggttagcaaatccctgcctttattgcagtgtccttgcttgcagaatgagaacggggaccttgcttcccttggtgggaaggggtgttacttactgccctctcctgaattccacactcagtagaacttcttgcccaagaagcgcgttatgtcctatcgtggaggagatcctttctcccgagggtgaacggagtttatctgagatcttgtaagctgtgtatgcttctgttgaggtctcaggtgatttattgaagataagccttgccctccgcctgtatgtccagcccaggcttgtctttctcccttgctgaatgactagagacatttgtaagcgttcacattgtgctgtgggcacctcgtggaattggagaggctccgattgtctctgttctaggggcatatggttgtgttgggactgatttcagcctgggtgagagggcattgactcacctaagttgaatataatgaggcctgagatggaaatgttttgcctatagaaatcacaaaggttaatactgacaccaccctcggtgcctcatggagcacagaagacaagcagctccaataataaacacagagattttctgtctggatctctgaaagagagcaaataaatgataaaactggtttgtaaaatgcacaggtgctggccactgagcagagtggaggcctctggacccgcccctcggcccgaagagttcaaatttcactaaacctgattgcatcaagccccgcccgcatgtttacattgcttgggcctcttgggcaaaatcaaagtccctgcagccaaggagactcttgccttctgcgctagctggagtgggaggcaaggagctctgggaaggaggcggcacccgcgatgctgcccaagactctctttcctagaactggccagactctctctattgaaggagtggtcgaggacttagaaggaaggtaagcagtgagcgtgtgcttgcaaatgtctccgtgtagcttttgtgaggttccaggtgtcttctttgccaggtcgctcctggagggagagatgatgctggccagagttgcagagattgtacaatggaatgtagagaggatctgaaacgcctgcttggcatgtccagcagggcggatctaggacatcgcaatccagaagagtctgtcatgcctgcttctttgagggaaatgctcagggcagcttgaggcagaagggtctgttgtgaggtgtatgttcaactcttgtggcccgctttgtggctcgtctgctcaggtggactgtcctgaggatcctattttctatttttcttggcctgaatctgttttctgtttaaaatgtcttcagggagctgggttagaaggcgccaggatgggcactgcagccctgtggccagcatttgagggcttggggtgtgtttgtatgctagggggccaggatgggcactgcgaccctgtggccagcacttgagggtttggggtgtctttgtatgccgggggcacctggccctgtttgggacctgctgtcacagaccttcctttattgccatattctggtgcctcgcccaggagaagtcaggcgtcttaggttccaggcagtacagccgctcttgtaggaggcagggtgagggacaagctttctttatggaaggtccaacacactgctgacctggtgtgtccgtgtggaaattgtttccgcttttgcttccagtcctttcttttctgctctacgtttgtccaggtatgcagagcttctctggctttctccagtgccctgtaaagctcttggtgtcacatgccaagggcagttgctgccagtgggagtcctgtggctctatggctgacaccacaggtgtcttccctgcccctggcttccacaccttgccattgagagggttcttttgtgtttaggggttcaggaagtgagagtgatggtgtagatgggagttatttctgggactctgtgacgagaaatagggactaccttctatgttatagaagtttattttcttcttggtcgttttaaaagggggaaaggctgattccttcctgccaaaaatatgtgtgtgctgtagattataggtgatatttttaaacacacatattgcttccctcttggtgtctatgtgatagaaaataattcactacaagcaggaaatatttagttagcacagacacagaaccctggtgcaacaaactaaaagccaagcttgttttaatgaggagctagtagtgctctggttactaaggtctacatggaaagaagaaaaagtgacttctgaaaatagttcctgctgttgcttagcaaggcgatgccagagcatgtctcctgatggtggaagatgggatttctcgtacccgagcccacattagaccccaagaaagcgggtgctttggggccatgctggcgctcatccctgccttgtgcaatgggacagctttgattttaggctggtgatagtgatgggctctctcatgcacagagatggcattctggttcccctgtcactaccaaccctgccagcgatatgcaccctgctgtatctgtcagccgtgccgtcttgttgggaaactcatgggttcatttactgtacatgctatcaatagctcagctgtcagcagacttagttgagaagaatggtctagaattttaaggagaggttcggtgatacatggtcagggctcctcgggtccattgggtcgtcctggccttgcccctaggcaatcagctgtggactctatctctaagtaccatgacctggactcctcgaggggctggctaccagccttattggaagcagtattctaggcttacatacaaggaaaatgagccacagagatattgagtgattgacccgaggtcagaaaactggccaatcagagtgactaattacacggaggtgcagggggcatgctggctaccccagcaatggcatcttaccttttcaagaaggaaacagaagagaagaggggagatgggagaggggagaggcctaggagagggaaggggacaacagggcaggatgggcctattgccttagtctagcttctgtctgactctccccatggaggttgtaatggaaggaagctgttgaacattcgcttacgttaggaacattttacagcagtgctaaaccagtcaagatggaaatgttcatgggccagaacatccccacaaccctttgcaggctgccctctctcctagccttgcacccccaagatgttcccctcctggagtcccacgattgcagcctttgaacctggctgtgttcactttggtattgtcttcaggaggctgctggtggctatttgttcttaagggcagtcttttcttcctacaacctttcctgggagggctgctcctcttggttatgtgatgggacctcttggggttatgtgatgggaacctgtggcggcctccgcttatctcactgtccgagtggccttgagccagtgactttagcgcaacctggaggagacgtgactgggtgatagccaccggggagaacctgcctgctcctttaggatcctggaagggctcccaactgtagtgtggaccaagatctcaagttcattaacggaaagaacagaagcaaacctacagcttcagtttaggaagctaaacactaaacagaccaccggcacaagtgcattgaaaacacttgagttctgacttggcatgattagacgtgtcaagagtcagggagggaaacgcagcactctgaatggtctccaggggctgagcatgcaggaatatgaatgtagtgtaagaagcttgagtactttatctgtggaagccagatagaacattcctttccaaagttaagttgctgattttgtgtttggctaggaatggaatgcaaactgaaggaaccaagagattcaacttcccaagtaggcagtggtcttaacttctggtgctgtattgagtttaccctcccttctcctcctctcctctcccctcccattcccttttcctatatatgtttttctttcctgcatgtatctacgtgtacaatatctaaggacacctggagagtaccccaggaggcaataagaaggtattggatgccctggaactggaggtccagtggttttgagctaccttgtgggtggttctactcttgatcaccaggctgtgtctttggcccccacgttggcgttagttcagctgcccttggcttctctttccatctgtaacttgggtcttccttctcaggttagtggatgcttgccaatcaagccgttgtccctggggtcacagggacagcagtttatccttcaggtgagttacaggagaggggtgatacagaatcatggcatccctgattgggttgtggaaatttctgagcccctggttcaatgagatcagtctcgggagggcgtatctcctctgcatcctactctttatttctctcagtgggtctgcccacatgcctgcctcccttccatctcctgtttctctctgttccccaatggatgagtagttctgagccctggacttttgctggaatctctacattctatttacagctagaagtctgcatatgctcagtaaacacgataacacacacacacacacacacacacacacacacacacacgctggcttggggtcaggatgagatttttctatggaagacttatcaggacactgttagctcctttgaaacaaaaaagttgctttttgaggaaatctgtcacaaaaccagaacatggaatccataaagtcaggggccaaaggcactaaagactcccggcagcttcttagacattatgcttccttggtgtcggtagctttctgctggaggcggggccagggcaccacttcatgtatataaatctccaggtgcctgaccttaaaccttctgaagtctgcagtcaccctctcttcccccagctcagtctgcacatacatgcaaacctaggtatgcaccttccattatcttcatgcagaaagggaagggattatctcattttcttaagaacattatttcttcattttaattgtgtgtggatgttcaggcctacatgtaggtctgtgcatatgagctcaggtgcctatgcatgccatacatccagatcccttggagctggcattacagtcagttgtgggccgcctgctgtgtggttgctaggaaatgaacccagctctctatgttcttaactgcattgtacctctccaccccctttgcttgttgttgttgttgttggtggtggtggtgatggtcttttccatttgaaatactttgtggatgcctctccctggttgtgggaaagccacattttcccagtagggttggctgagcatagtggttcaggcctgtcatccctgccttttgggatgctgggaaattcagcagctgcctaagcgacaggataactttaaggctaatttgggaaacttagtgagaccctgtatcaaaataaacagggagaagggttaggattaggtctttggtagaattctttcgcaatatgcataaggccctggattcaaactgtaggactgcagggaggggagagaatagaggaggggagtgtgagaggcagggaggcaggggaggagtgctcgctcccatgtggagatgctgggacagctatttcatggtcctcaaggaaatgtgaatgtcccatgtgtactttgttccctctggttctctctcagtccctaacctccccagtattgtgcagcataagtcattctgcatgtacaggggtgtgataaccaaccctggccacagggacgtcatggccagtcagcatacaaactgcttctgaaggggaggccctttcaggctgactgggcctggtgacagtgcccagagccacaggatggattaccttggatgtgagatgtggtgagcttctttcccagtgtctagaaagctggggttcccaggtaggtcctcctttgactctgggagcttattccccatcttcagaaggaggctggcttcagactgcttccgtgtgtttgtcctctgaaccatgggaagtgttaaaaatctgccatgtaaatagtttgtctttgtagcttcagattccacatccacagagtcagctaagtaatcaagagttgacactatagtcaccattctcacaggttttgcattgggatgccttaaagcaagtgggatgtgtatggagtttacacagatgctaaccaatttaagtggggactttggaaattcattggtaccaaaagatgactggtggagaaaggaggggaggagcggtgagtgacagtattccagcttccagaatcttactctcctgcacctccatcctcaacagcagcttaggtagcacagcgtgtgttccatgggagaattctgggaaccctttgatcctgcagggccagggtgagccagagtgggtcttaccttttctacctcatgagaacgtgaaagcagctaccacaaggactctagaacctagataggtgtttgtttgacagtgtcatttttggaggtctggatgaagaacatgagtttctgtaacatgttttcaaatgagaaccacagtgtaaggagctctctgtgtcagagataatggatgtctttcatgctcagctcaggtccctacaggtctccaacagtgaggtctaggctcctatttggcttggttggcaacagtgagactggccagtgctcatgcctaagtttcttttctagtcagggtgttcttggtgtcttggcaatttttgggttctcttagacgcaccaacattcagatgggatggcctttgttccctgtataacactagacacagatgtatatggaagagggacgggttcccaaggaatgtcacctcagaggtggctagaagatgtgagactagaaatgacatgttaccgtttactctgcctctgctgagctccaggctgtcttcatccttcttggcctgatgcagagcacactggccagactggctctacaccccttacacctctggctccgcctcttactcagtggacacattgaactaatgtttagggatttaggttttctttagcttttttggagtcctgaggttggttgactcaggactccttgtcctgtgaaggccagccgtgagagtgaggagtgattgttaggcctgcccccaccttttatggacagtcacacttggtatgctgtctgaagggcagtcattatccagagtatgggaagctgggctacaagtctgctgggcccatctgcttttggacctttattggtgtgacccaagctttgccatgtgatgagaagcttagaaaaggtagtctgtccattatatgtccgctgggtgccagggcttgggtgccacaggaagcaaagcagaggaaacccctgcctcagatctgagcagcttagaatgatgtttgttggcacaagacaaaaacccagccaggaagggcatgatgaggaagaggaagctgggaggaggggcaggagccgtgagtgcaaaggccagcaatccatgggatgaccgctgaggaaatgaatccgaaggagcggttgggccttcttcattgtagaaagaactttttattaacgcacatgggtgtccttcttagggcttgagggtctgagtgcctctagtgtgtgctttccagttctcctgactccactgcaggctgggaatgattatttccttttgtcagtggaaggccaggggcagttcacgtgccaggactgaaaattttacagagaaatggcagagtgagaatctggtcttctaggatgaaagagaagcttaggcacctagtgtgtccagagctgagatccttgtctctcttgttaagtggtggccttttgccagcaaacagggtggacacagtgagagccagagcttcttgttctccccgctgtgggcctccaggggcagctgcgcagctgttgctttgggcagcttcctcagccttcctggccctcccctgtctcccacatcttctagcaggagaggccagcttctactttcggtgtagatttcttggacgttttctgaggttgagagctagctatgcatgcaattggaattgcatagttcaggggatgtctccagttcttgttgagggttgcctgtctgagctatgtggatttatgagaacctcttgggggctcagaattggactggctgagatcaggctcctaggtgctgccatttttcccgtgtgtctgctatcattttccggtttctttcacttggggatagtaatagagctcaccagctaaaaacgtctctcacaagcagcggcagttgcatgcctttaatcccagcacctcggagggagagtctctgagtttgaggctagcctggtctacagaatgaattccaggacagccagggctacctagagaaactctgtctagaaaacaaaacaacaactacaacaacaacaacaacaacagcaacaacagaacacataccactctggcaatgctttggagtctggttcctggcacatcagtactttctgactgcacttctaattggaaaattaggagaatgtttttacagtttattcttgcatttccttttctttttaagccatggtatcatttaattaagatttgtggaggactcatacttcagacctaatgaaagctggaaatgcactgtcttagcaccatgcactctgtcctcgaaacgagcagaatccttgcccttagctctgcgtccccgggacctgtgctctggctacctgccttgtgcagggaactggaatagcagccatctggcatcctgctgtgtgtgtgtgtgtgtgtgtgtgtgtgtgtgtgtgttgtagggatggggttgggggagggatatctgtatgtgtagctgtggggggcagatgtgagtagggggcatgtgtaatgtggtgtgtgtagaagcatagtacctctgtaattcttatggagccgaaagttcgcatgagcgcccttcccccatactgtgtagaacagaaagaggtatgctgggtcttctgtagttgaatttcctatagcagaggatcccagtgccagatggccctgttgcttccgtggggccgagaaagatgctagtgtgtcctgtcgttggttctcaggacagcctctacacagaatcacttccatcctttgtggtggggatgcctggttgggagagcctgggatggaggcatgggctagtgttgctgtgttttcaggggcctttatagatccttagtgattctgcacatggttgctttgttttctctgtgaaggggacacttgcaggtgactttggatttgggatcatctttctaggtatttccttgtgtatttataacagagctggatgtagcacatgctttcagtctctctgtctgaaacctggctcactgcacttgctgtgtaactattctcaggaccaccaatgaaacttcaagtatgtgcgtttggccttgtctgtgcagggaggtggtgtcgggctgcaggtgcacccagtcccctgagcctgaattctcagtgcctcccactcctgacagctgcttaatcttaagttatttactctcccagagcctctgatctccttaaacaagcaataacaacatgaaggtctgtaactgcacacttgagtccggcgtatgtatgtgcgtgtcgccgcttgccttctcgctaaagacttgctctttttacagcttgtgtctatgattcttacccccagagcttccctcccccaagttctgccctagagtgcggttgagcttctgtaggctagactacacatcagtgttctccagccttgtctcctcttgtctgcatgcttgccctacagtgcagttaaactgaaaatggagctcaggctaagcatgtccttggagctgtgttctcaggagtatgtgagtacttagcagaaaaccccccaaacctttcagtccctttcccaatatgtcaaccgatcccaatatttccaaaagcaggcagcatggagctcaggctaagcatgtccttggagctgtgttctcaggagtgtgtgagtacttagcagagcacccccaaacctttcagtccctttcccaatatgtcaaccgatcccaatatttccaaaagcaggcagcatggagctcaggctaagcatgtccttggagctgtgttctcaggagtgtgtgagtacttagcagagcacccccaaacctttcagtccctttcccaatatgtcagccgatcccaatatttccaaaagcaggcagcagctgctaagtctgaccaaatgtcccgctgttctgaggggccataagacacgtgctcagggctcgtctctctgagctgctgaatgaatgggctcagcagccaccagataggtggatagtggctcaaagctcggattctaggtgcctaaacaacttagctttccagacctcagcagctcctttcctgtagaatgcccaagattccacagtacagagagttcaggaagatgggggaggtttgcaggggagatgtgctgactgtgaattcccgtttattttaggaagatcttgctatggcacactctgtgtggccaatgcagttagaactgccagtcagcagattgtggcttgggaatctccacgtacagccgccagggccctaattaataactgcagcaggggcttcagctgttcctgcccacattgtttacatgacattccatgtagtgcatgcatgccagccccgacatctaacagttatcagatacctgtggtacccagtgatctcgtgctgtatccacaggccttcagcctctcccattatctttactttcccttcccattgagctgcatatttagatttcagcacatcccagagtactgatgggatagcaggcttatccgtgacatagtgaatttaatgacagttagtaccctacatgttcgaaaaccgttagctatatctatggaagtaggtaaactggtgattcttcttggggattcacatgaactcagctgggctccacattcgaaataatgacattaatgattcaaagaatgaaaaatccccgaacgtcttaatagatatgtgtgtgtgtgtgtgtgtgtgtgtgtgtgtgtgtgtgtgtgtagtgtttccttcatgggtaggtaagtatgaagctaagataatagctcagtggtcaatttcttactagcatgcatgagaccctgggttccaccctcagcatgaaaacgaaaccaagcaggaaaggcaaaaatgatttcggccgaatgcgtctgatatatgaatcctgttttattgctgctttctctgcagaggattgtgtagagtttggggacccgagctgagactgcacttgcgtactattgagttgcattatagacccactcatctgtttagataagtgcgtgcccactgtagtaggtaatacttccttttctcccttgcttacagcctgtctctttctttttctgcagtgctacacacacaggggccagtggatggcagcctgtatgccaaggtgaggaagaagagtgcctcagatactggcatccctagtagcccccagggcatgccagccactagcagtccagaccacggagaccacaccctgtcagtcagcagcgactcaggtcattctactgcctccgccaggactgataagacagaagagcgcctgacccccggagcacgaagaggcctgagccctcaggagaaggctgagctggaccagctgctcagtggatttggcctggaagactctgcaagctcccacaaagacatgactgatatgcgcagcaagtacagtgggacacggcatgtggtaccagcccaggtccatgtgaatggagatgctgccctaaaggaccgggagactgacattctagatgatgagatgccccatcatgatcttcacagtgtggacagcctgggtactctttcctcctctgaagggccccagtccacccacctgggtcctttcacctgtctcaagagcagccagaactctctcctgtctgatggctttggcaatggtgttgctgaagatcataatggtgtcctttctccagacctgggccttggtgtagacaccctttacgatcgggagcggatgtgtgggggccgagagcaaaaaccgctgcagcccctgttgaggaagccctctgcacccaccccagtgcaggcctatgggcaaagtaactattccacccagacttgggtacgtcagcagcagatggtggctgctcaccagtacagctttgcctcagatggggaggccaggcttggcagccgcagcacagtggacaatactggccttgcccagcccccaccccacatcccagttactcccaaccgtggagccagcagcagagtggctgttcagagaggcatcagcaatgggccaaatccccccgacacacagcagctctgtcctggtaaagctctccagcccagatttcaagatgacagagtcacgaatggagtccatcaggagccgaacactggctcctccccaggctctcctactctggatattgatcagtccattgagcaactcaacaggctgatcctggagctggaccccacctttgagcccatccccacacacctgaatgcccttggcatctcagctgtgtgtcctgacggtgtgggaagtgggctccggtgtagtggccggctggactctgtggatggccctggccggagccctggccggcaaggtgagctgatggggtgttggtgtcaggtaggaagtatctatgcagctgggaatttggatttgctgaaactgatgatggagcggcattttctactctcacaagctgtggcctagaatccaggtgatactgtggcactataagagcttgttagcagaattgaaaggtggggagaaagaggtgtaaaacttgcctataaaaatggtttggggccgggtgggcccccctgaagattcctcttcttaggaatcagtgtcttatttcacatacttgtcacgcttgttggtaagtgcagtaggtcatttggaagcaccagatagcctggtccatgttcctttgccacctgccagctgtgtgatttaaaacctatgtatacatctctgagcctcagtttccatgcctgaagaatcagctcaacaatgaaacttttctcagttcaagaatgtccctttagggaagagtgccgggcgtcttggtgagtcagaagaccctgctgggctctcgagtcattcttgtagaaacagagcaggagccaccatgtgttagagaggagcttggagggtcttgatgactgagggagacaggtacatggagcagaaagtggagagtgtggagtggcctcagacacagcagatctgggttcctggatcctgaaagctgtgatttagaaccaagacctaagcccagcaagggtgacagccactgtgtgagggccgtttgtgtactgcaccttctgaagttggtaagagttgtcaagagaaaactgtgtgggcctttctgccttaaaacaggggaactggacaccagagcaggggcttcctggcaaggccaagctcagtagccgtggacagtgtcctctggccaagtctatgggagtatttcctgcagactgcatcagagtgacgataaagcctgcttcgggatcagattactaccaggtgttccttgtgtgtgtgaacacaggtcaagagggtttgagagacacctttgtcattggatgcaaaggcagacagcaagccacagtgtatgacgtgggcggaacatcctgagaaaaggtctgggagttaatggaagggacaaggctctggctgggatctgcacaaagttatccctggaggggactggccaaggtgaggcgcctatgtgagggtgatgaagtggctgcaggtggtggcgggtaaggtggagctgtgggtggtgttgggagcccggaccaggaaggcaagaaagacagtgcaggagaaggctgtccccatctcttccttcctcccatggttgcttttctgtgcttctcagtgagtccgtgtgaaaatcccccttcttgggtgctagtaatgctgatgatagaagtccctgtgtgggctgactattgctttagggtcctggcagaatggcttagttcatcttccaaggccccttgcttcagggccttgcttcaccttgctgtcacgtctgtggagactactaggtgatgacagggcttgagttcacgtagaccctgtggtatagacccatccatggtctctgccctctttagaaggttgcagcctggctgatgtctggccccctccccttcaggcaagaacaagatcttgtagcatggatcctaaccagtgtcagggttgcgtggactgccagctagctggcaggctgctatcaaaggacagggttgctgggacttttgctcatgctagctgtggaaaggaagggccatcccagtgtctggtgatgagaggtgagaagagaagccagattacattacctgggacatgctgggatcactggactaacagcaggatcttctcgttggctggagtgctggtaggtttgtgttctccccaatacagttctgaggaaattcagagttctaaggtttcagtggaaacacttaagcaaactctacgaccctttgcttaaggaatgttcttggaaggctgtacttgggaagaataaatcaaacgcctttcttccaggaacaaaatcccctcctgagttttggaaaactttgcatgtgtctagcggtgtatgtgggtggacccaggactcaggcgcaggtgccttttttttctagttgactgaatacagtcctgagggataccccattcctataggaaaggtatacagccagggactggacttctgccttcacgttggccttccttaaattactgaagaaatgggtcactttactaactagaattttattttaaccttacacccgctttaattcctcttcttataaacatacatataataatcaaatgaaataacttttctacttaaacagattagtaatttatcagtctatctttgttcaacaggcatcttgggtcattgtcaatccttggaactatagtggtatcataatatatataccgggaatatgtataaaacaaaaacaccttctgcaaaggtgcttttggaattcagagtcctgctgcgaatgaggttctgtccctaagcagcaggcaggaacacagagctcagcgtgaggacagagctgagccggtgggtgacaaccttcttatagccagctagctattcttccaagatgaacttgctgtgttagtcagcacccagttcccaaatggtcccaggcttgcactacactgcatataagaagcctggctgtggtgtgggcagccgcacaacctgactcttggggctcagggcaggcaaacttgtttggataaaaatcccatcagaaaatgctcatgtgcttatgcacctgggtgaagaagggggcagtctttcctccccggcaggtagagaaaatgctacaaccctattgttcttaaattttataattgaattaaaatttttttatttatttttattttatttttatgtgtataggtattttgcctgcatgtatgtctgtgtaccacttgtgtgtctggtgccttcagagtccagacgagggcatcagatgctctggaactggagtttgggaagattgttagtcaccatgtggtacagagactcatgcacaggtcctctagaagagtagaagagtgagtagctcagctttgaactgctgagctacctctctggctcctgattggaagatttaagtttagtgtgcatgctcccatctctgaatggaaagggttaatgatgaatgttataaaacagaaatccccagacgtcagggaaattcagaatagtacaaatggctaagcaactgatttgtttgaacccctgtaagttttggggtgttataaaaagcctttactttacacagttcccaggtctctttgtccaggagcgagtgagggctgcctagctgcagagctgagtaagaagggcccagtgacactgcaaggcttcatgattccagtgcaggaaacccctccccgtggtggatgcggaattgcctgagtcttgtacacgcatggagattcggggctgcaaagttcccagaatgtggcatcttttccataggcccacttccgccctcctttcctcttcatccccatgccagctcctgctgcgtttccaattctgagcatagatgcaggttcactgtaggatgctggagccttagcatcctcaaatcagtaagacccttcatgttccatcatgtcttaaatgcaagaaagctgccgtgcagtaaggagagcagctctaccaggttcctcctggggactatactccagcagagctgtgcagctgagtcactcacaccagctgtgcagggaatagcaggccgtatgctccctcgggggtgggggtggtggtgggaggggtggcttgtttctgaagagaaaccacaatttgaaggctgtacatttcacaagtacagtaggaataatggtactgctgtggctgcagtcgatgctgacagggatggcagtgatggtggcaatggtagtgacggaaacacacttacagtcgttcggatcttacctgtctcccaaaggtccatgtgataaatgcttgctctgagaaggtgccgttgacacgtggcagaagttgtaactagtggagcctcgcaggttttaggtgattggggtgtgtcctgagaaggataatggaaacctgtcctttctctttctcctctcccgtgctctctggccaggaggaggctttgactttgcggtgcctttctgctataaaggctctaggaccaaagcagcagggccaactgattgtgggttgaaacctccaaagtcctgtgccaaaatagccctttgttctttctgggatggttatctcagctactggtgatgaatagctaatgtgagatttttattctagctagaaactttcattccgctggacttgcttttnnnnnnnnnnnnnnnnnnnnnnnnnnnnnnnnnnnnnnnnnnnnnnnnnnnnnnnnnnnnnnnnnnnnnnnnnnnnnnnnnnnnnnnnnnnnnnnnnnnnnnnnnnnnnnnnnnnnnnnnnnnnnnnnnnnnnnnnnnnnnnnnnnnnnnnnnnnnnnnnnnnnnnnnnnnnnnnnnnnnnnnnnnnnnnnnnnnnnnnnnnnnnnnnnnnnnnnnnnnnnnnnnnnnnnnnnnnnnnnnnnnnnnnnnnnnnttgttgttagttggttgggggggggggtgtttgttttggtagattttgtgggatctgctcaatagaaagtcatgccatttgccagaagagtagtggtggtgataacagtggtgatggtgatagcaataatcatgatgatgtggtaatggttgtggcagtggtgatggtcactatagtgatggttttcatagtgatggtggtggtggtggtaatggtgattgagaagatggtggtgatgcagtgaaggttgtgatggtgatagagataattcactctgagtaccctctctgttctagtgatttcagaccactaggaaggaaaaggcctccctcttgtccacacttcttctcttggccatcctttattctgctgcagtcctgccctttgaccagccaggctttttcacgatgtttgctgggatgggtaaaaaaccttagaggtctttgtgagcaaagatcttcttgttaggcagcaatgcagacgcccttctgccccagctgctctgctagatggaagctgagctgaggtgaggttgtgcggcagtcggattccaccataggaccagagaggctgtccagaggtgaggagtcatttctggcacctgtgttgctgatggcagtgccatctcccttgtaaaaccgggtgagggcaggcagggtgggggaattttgcttcttcaaagtgcctggtggccagtaagactgcaccttcactctggtgtgatgtaccatggatgtacctgatttggcagacccccagcctctgccctcctgttgccccctgccaatttcagttcagcctgcaagtgggtagatttctgggatcccagcctttaagtggcagtggtgtggtggggctaccctgagaagagaggcacctttggagcctgtctttctgtgtatgacagaaagctggctgcctgttccataccttggagacttttcgttttgtgttgttaaagtatttgattcttgttccattagtctcagtggcccgatgacaggaacctggcaggcacttcttgcacatagcaccctggcctatctgcctgtgtttttagaattcctttgctgtgggaggggcgcatgaagcttcagattgcagcttgtagtacttcccctgtgtgctttcatggcagggaccagagatgtggaagaggagaccctcatacacttcacttttgctaacacttttcggtccccatcactgctagcaagtcaaagaacctgggaagttgttccatgagaccctcacacccagttctcactggtacaggaataatggccagacagatgcccccagagggtgtggtatttagggaggctcggtactaaacattcagtaccaggtagagatgtcagggatgcagactgggcgaggtgggcccccaccactggttcagtcttgtgttccaggagcccagagggtgagccacgggaccttgggcaactcaagcttgtctgtatgatcactgtctcatcagtggtgatggtggatctgacagggagcactatgggtaggactttgttatggatcaggagtcatgactcagagtcacttgaagggacttggtgcatggaaatgtcatgggtgatgttttcttccagctctgcagaggagagaattctttggggacacttttcagtggtccagtattgcttgactcgacatatgggaggccttgggacttttccctgcaaggggtggggagctaccaggtcacagttcttctaggacagctatactgctgtacagtcactaccatcctgtggcttctcaactttctctactcctcccagagaagactttaacccattagtgatcacccaaccttagcgggcagcacactaacttacttccctagattagctgttcttgcttctggtataaatgcagttgtatactatgtagctcttcttggccggtttcttttacagagcacattatgtttaaaggtctgtgattattggagattcattcctgtttatggctaaataatactccatagttgatctattcatctatcagtgacactaggattctatcagcatttggctgttgtgaatattgatggtatgcgcatgtgtgcacacatacctgtttgaatacctattggcttattaccagatatggatttactgggtcacagggcggttcttgctgagtttgctgcagaaaccacctccagcctcctatatggacagcttctctccagaagcatttggtctgttgtcatctcgtaagagacccaggttctaggaaggccacctctgagtattccatatagtggaggccaaatcctttctcttcatctggatgaagagactctgacagttctcaggcttggtaaggtcagttgtgatttctgattctgcctcatggcctttgtgtcatgatgtgggccttgactaaggggatgcactgtgtcctctgtagatgtagtagaggatgttacttataaaaggagggaaccataactgggctctagaaacgtactgatgagtggaatgtcctgcatgtgagtagtgggtgaagtgacagggatttatcccttttggaattaggagatctttatttgcagaattcattcagcaatggggagatgttctctccctttcagacagccttccccacagcaagcacttccaggattcccagggcagcacattaattccattcccttgtcaaagctttgcagaagtcttcttccctaatggttagggacagagatgggaaggaagggatggccctgtgtatatgcagagggctttccctgccttcttactgatgccactcagcatgtgggctcccagtgtcctacccactttctttatgggaaatgcatgccacctgctcttgagaaacacgcccaccaggtgaccgggcctactgagcctgtcttggttcagcttgccacattagtgggttccagggtacatctgagctgagctagcctttctctattcactctctgtagaggttctgtctgtttacttgagtgagctgaactcaggaggcccttacctcagcacaaaccagcctttgccttatttattttcactctcaggaatgtgagggagtttccaaaaccaccccatgccatggggtgccagcattgcttcattcttacatgatcctataaagaccagtcatttaccagtgcttctccttctagggtcccaaatcgaaaataaggattgtgttgcagagtgggtcatgctctcggacccattccctttcattttcattagttgtgtgttattgtgtgtatgtgagatgcttagtgtggccaagcaagttaacctgtccatcccactgcatgtgtgtgcagagttccggtaagagctaagtccactgtcacctgggcggggcatattctttcccgatttcatctattcttttcactgcacactgtaaccacctgggggcttttgggatgtgggtggtaaggatgactctgttcactttgggctgcaaagagtggctgtttggcctggtagggacttgagtgtctgaagtactttatgctcacccgctgactcctgggtccagatgtgctgtgcctgtaaattgaaaacattgacagttgtgccgcggctccaggggaagagtagatggaaaagaggaagaatgaggccctcagtggagggttgtaatggcattctgtggagaaccgcatggttataattgtggttgtgtatctaggcacttggaggctgggatgttccccctggttgcttctaatggggccagagcttgggaccgtgctgtagaggacagccagtggtcatgtagctgcccataagctgccttccacaggactggtaggtttattttcgcagcacagtgggccgtatgcctcactgaggagaggattctgccctgaagagtcagtatgggtgtcatagcatggatgccatgatgtctcctgctccgttctcctctccctctttccagataggccaggtgataccaagaaactcagtgaggaagggtttggtaccattgtcacgattaggactttggtacatttgaagaagtgcagaattgccaaggagcattgtgggagatttatcctaaaatgtagttttccagctaagtggtctaaactccttcccccaaacacacactcagagtttcccagtaacaatgggctatcctatactcagtcctgcatggcaacacagtgcctgacaatcttggtctgcatccaattcgtgtgtgccctgtgctttgcaaaccttcccacaagacctccagtgtctccagatgaagcgcttgagggagttcactctcaagatttccccactatcatagtggccttggtggggatgccccctagcctggctgtctttgccctactcccacactgcccacacagctgcctggccttggagtgctatagggctctgtccctatctgtgttttcagtcatttagcctcagcttcccagtctctctgaggttcagtgccctccagagactcatggtagtctcagctcctgttttgcttgacaaggtctgtggtcctgggcagtgctcagagggtgtgcccacatatcagcgcatggacttgggggggggggtgtagcaggaacggggaaatagggactcaggtcccaagctctagcctggagtccagtgggtcttttgggttaggtggaaggatgaccccgtgcaaagacagatgaatgctcagaggtactgataacagttggtgggctgtggggcgtccagtcagtgctgccacttggtttttctggttgcccctcctccatagggggcctggctgcatggagagttcctgaaacaagactcattggcataatgacaggccaatactccgtgttcccgaaggccttaagtgtcctggtgcattctgagcttcctgagcttttgaaagcgccaggggctggttcaggtttcctcttcactggcagggaacctgctggaagtaggtgtagctccccacagcaactgggccccagcaggtactggtgggaagggagccaactgggccccagcaggcacaggtgggcctgccacagttataggagaggccctgtgcctgcaaaggttcccttgagcttgatttggtccctgtttcccttgggtgttctcagaacccagaagggattggtgtgagtgtgaggctgcccagaacccggagagggctccttcagcccagcccagcttctcttgcatatcaaaccagcgtcagtcgtgtccttagagaatccaccagcatcccctgctcccatgaagtctttttgttttattttgtttttcctcctttcctggtttcttctggaaagtgagaaataaatattgctgtggctacccgtatggcatgaattatatgcagtgttcagagagtagggtttacctacttcctccttgacccaacagttattttgctattcagattgcccacgctcatcaagtcagctttaccctggcaatctgaagtcaatagtgtaaacccatgctctgccgtttctgcagatgtggaacagcagccgtgatgcagcccccgactcccatccctagcccctggagtcctgctaggagattgcagataagatagccccagggacaccccctgagcaggggaggacaaagggtggtacatagcggtggctgtgtgtgcaggtggatttatgttaatgaagagtgtaacctagtgagcatcaaggatttattactctgcagatgctcacacattgagcctagagtggaaaaataaacaaaaagccatgtgtcttcctcacagtatggcactgttcccagggaagggagggtcgggaacctgtgtttggcaaagggaggctaccctctggctcctgccctcctgtctctcacccactcccaagacacccagtcctcattgggatggacatgagagctgagatctaggcatgatcgcagggatcggcaccatgcctgggcacgtggctacctccacatctatcttctgtaaggaatccaagccccagagaggcagcagtgcagagacgccatgctttctgtttcagtctttctaaagggggcgaccagcttggcaggcaccagagatagtacatgacacccatagagaaatgtccctgtggcagccagcctccttccagatctcaagataactagggtgtgagtagaaatgtctgcttgcttctgtgtctttcctatctgggaacagtggctaagaggccctggcgtggtgagaggtgtcaggctgaaatggaggtgcctatggttttctgtgggtagtccctagcccacctttcttctgaggctctggtgtctatgtctgaaaacataaaagatacagacaaaggaaccagaactttgctaagagatagtatcttctagaaatgtcagagaagtcatactcgaactcttatcagcatggtggcctaaacatgacctggccaggtaatgccagtagacatgttaacatggatagggagagctcaggaggtctcagccctgcacagagaactgcaggcagctgagggttgctgagagcagagagaaagtcaccaggaaaaagcatggaaatgcttatcagatagcaaatggtcagccctgaaaatatataaatacaagttaacatatggactaagcaggttgttctatgtatttaggaatatgtgtgtgtgtatgtatatactatatgcacatgtattatatatcagcagttaaagaaaaagggaccatggatttgaataagaacaaagtgtaggaagggggaaatgatataattatagtatagtttttaagaataaaattatgaaaaagaattgtagtttgaaagcttgaaaaagatggagacatccatagaagatataagcccttgtctggaattccacatcccagagattggattttgaatattttggtgccattgtcttctttctttggtaccctaaagcatttgccattgcacctctgacactgatacatggctgtttactgatttgctgagtgatgcagagtgaactctcagctccgaaactgggctgctgctcaccacttcagtgatgagtggattatggacctttcatgaagaaaggcctgcttgctcagcagtctccatgggtactcctactctttctgacctgtcttctttgtcaccattgctggggcggatgcaggcaccttggatctaaggctgctgctgtcccctaagactttctctcactaagccttgttagtcctgctgtgtccgacttccatcccaggaccacacatcttgagagttaggatggccgcctgtctctctgagagtgaattttggtgaccttgtgtgaagtctcctccctgtgcagcagacactttacagatggggccatctcctcagcccccatttagttactgttcttgagatagcttctcagcacctagtccagactgactttgaacccacggtggccctgcttcatggagtcacatgctcgcccctccatatttgtagggattttgtgtttttagcttaagcctagactgccaacaaatcctcctttgttatgaaagactgcattgtgacttgaaacattatcacctttgtaggctgctgcaggtaacccctattgcccaattttaagaattccctggaagaaagtttaaaaagctaaccagctagccaagacctatttttctgcccaacaagacgatcaggcttggctaagagcaggaaccaggtacccctgggtcaggagtaaatgcctgtggagattctggcactgggttgttaaatgttcattcttagtgttcccccatgtgaagactcagtttgccacaacaaagcctcatgcctggctcactgcgggtgctcaccttcttataacaggcctggggctggatcttagctggttctctctgaacttgagcttagccatagtctactgtcctagcattgtgggctgagttctggcacctgccttgccctttctggatggagtgctctgacttgtctctgggcatcccatagcctgcccatagcagtcctcctgtccgtgtagagtggctgactagtgacgacgttgtccggggatagtttaagatgggttttatcagaggtctctgctgtaaggatcgtacccatttgtttttcctcctcattggctcctcaggtgatgaccccattgggggacggcttcgtaagctgagcatcgggcagtatgacaatgatgctgcgagccaggtgaccttctctaagtgtggatggggaaaggctggagtggacccagccccaagcctgggatcattttcctctcctgaagacatcaaagaggtatgtgctggtcctgtgcccatctcctctcagcgccacttgttttcctgtctttatgcttagggaagtggctatgccatgtccttgcacaacatcaccagtcactgaaacttctctgcctttggctgacctcctcggctgatataaatggttcttaagtgacagacaggggttctgattgagagggagcacaggccagagggcctgggtgggggccacataatcccagatatggcaatagagggggtacatcatttgaggccattggagcctcaaagctcttatctgtagaatgggggtgaaatgcatacaggtgggatgtgaaggttaggaagcatcggcctgaccctagcagggctctgcagatggacgtacagccaacagctattgctgacttctagtctgccactcagggccctcatgcaaatgatgaccccaaggagatcctcagacaagagactccaaggtagttaaggcttctcatcagaatttggcagggcaacctccccagataattagccctaattatgtacctgactatcaagttgaaacattggagcctttcaagtaggcaaaaagaaaagacagcttatttatcgtcttcacttttacaatttttgttgatagctgggatggctctcccatggaagggtctgctcatgttttgtgacttcctgtgttttttaattccctgtggcagtgatgttgttaaagaatccttggtgatgcttttgtgctcactggtaggatgcacacttccctggcaatgtctccatcactcttgtctccctgccgcccagcaccatgttaaagattgtagtccacaagctccttctctccgtctccagctttgacgatagttgagcttcttccccatagtgatgccagtgtcgtccttcctgacccactctcagctatcttgaggggccagatctgtggcagggacctttctgtgatttctcacatttctgttcttcttctatgctgatttcagacggtgatcactgcatatccctctgacctcaatatgatcgatggcaggattccaaacagcaaggagtcatctatgtgtctgaccccagcattccctgtgtctccggaaacaccatatggtaagaaagaagaaaaactagctgggtacaacttggtacttcaagatgggggagtgacagtatcctttgttgtactgttttgtccagtgaaaacatcgccacgctaccctccgttcagtccacctgagccccagctgagcagcccagccagtttgcacaaaggtcgaggtaagaacccatatgcatggttgctgtttctaccaaggcattttctgatgcagaaatatttccatttgggtcatatcccaatatccttgggcaaggacatgtctttctagaccttgggatgtggctatcagtgccttggttgggagttgagtagtagtaagacactgagaggattctcaggattcttaggaatcaggtttgatgctcacatatgtggcaatttaggctcaattcagtagggttggctctcagcttggcataggtgcttagcttgctggtgaattctccattcagcaaggagtttgaaggaggaatgctatctaacttcactatgcaaatgagttccagcaaagagcagggtgtctacatgagccctacaacatggtcatctttatgtgctgccgtgtgtgagccagctcctagccgaggcacacttggatttcctgtccctaaacccttgttctctacgttgaaacctagagactttcagtatttcgcactgtagggagagagtgctaagagtccagtgcttcttccaggtagaaattgcccacctttcttgggatcttgggatgagttgggcgtaagcagatggagagatgccccacatatattctttgtgatcatttaattttcataatgtagtttgctgctgctattccctgaaaatgcaggcattctctggccataatccacaggcacgtcagtccaccagaggtccaaagaaagatcctaacctgcaccagttctcccttagagcctggcttgtgacagcctgttccctagactgaggacgtctctgcttagtaacagggctttgaagaagaggactttggcttcaaggttactctttctgcactgcctggggggatttgaagttgaactggccattcagtaccattgcttcaagttgttctctgggcgagtttactctcctgtccctcaaaggcagtccctaggctactcctgtccttgaggaaggacccaagctccttggtcttcaggctacactttggtcagcaggacatggttcagccattttaataattgatttatataacacaagcttcaggtttgaactcttacgaggctgctcctagatagcttcttaaacttcttttttttaaatttattttttaattcaatttacagctccatcacagcccttctccccactctcctcccagtctcactcccacaaatccctccctccattgccctctccttttctcctcagagaaggggagcctgcttgggtaccaatccaccctggggcatctagtaccagcaggtctagacacatcctctcccattgaggtccaaccaagcagtccaagtaggagggaagaggatccagtgtcaggggacagagactgagacagccccccttccacttgttataggaaccacatgaacactaagctgcacatttgctacaaatgtgtaaggaaggggtctaggtccagcgcctgcatgttccctgattgtggcctagactctgtgacgcctccagactcaggttaattgaatctgtgggtcttcttgtggtgtccttgaccattctgacttggtctagcttctcaaacttaaaaaagcatgtggtacacacagctcgtagtctgagtacaggtcttctctatcgtggtctgctctggtagagccatgcatgatctctcctttcaatggagtgagaggcttggagattagcagtggccaccacagacacaaagtgctcattcaatgaacaccacagggactagccactagagggtgtggtcgcaagggtcagactgataacatagacaaatttcccataccccattgagccatcccctccccacccacaacaaactccatgtacatttattttatttttttnnnnnnnnnnnnnnnnnnnncccattgagcctcccctccccacccacaacaaactccatgtacatttattttatttttttgagtgatgagttttttttaattaggtactttcctcatttacatttccaatgatatcccaaaagtcccccatacccaccccaccctcactcccctatccacccactccctctttttggccctggcgttcccctgtactggggcatataaagtttgcaagtccaataggcctctctttccagtgatgatcgactaggtcatcttttgatacatatgcagctagagtcaagagctccggggtactggttagttcatattgttgttccacctatagggttgcagctccctttagctccttgggtactttctctagctcctccattgggggccctgcgatccatccaatagctgactgtgagcatccacttctgtgtttgctaggccccgtggcatagtctcacaagagacagctatatctgggtcctttcagcaaaatcttgctagtgtatacaatggtgtcagtgtttggaagctgattatgggatggatccctggatatggcaatcactagatggtccatcctttcgtcacagctccaaattttgtctctgtaactccttccatgggtgttttgttaccaattctaagaaggggcaaagtgtccacattttggtcttcgttcttcttgagtttcatgtgtttagcaaattgtatcttatatcttgggtatcctaagtttctgggctaatatccatttatcagtgagtacatattgtgtgagttcctttgtgattgtgttacctcactcaggatgatgccctccaggtccatccatttgcctaggaatttcataaattcattctctttaatagctgagtagtactccattgtgtaaatgtaccacattttttgtatccattcctctgttgaggggcatctgggttctttccagcttctggctattataaataaggctgctatgaacatagtggagcatatgtccttcttacgggttgggacatcttctggatatatgcccaggagaggtattgtgggatcctccagtagtactatgtccaattttctgaggaaccgccagactgatttccagagtggttgtataagcttgcaatcccaccaacaatggaggagtgttcctctttctccacatcctcgccagcatctgctgtcacctgaatttttgatcttagccattctgactggtgtgaggtggaatctcagggttgttttgatttgcatttccctgatgattaaggatgttgaacattttttccaggtgcttctctgccattcggtattcctcaggtgagaattctttgttcagttctgagccccattttttaatggggttatttgattttctggagtccaccttcttgagttctttatatatattggatattagtcccctatccgatttgggatagataaagatcctttcccaatctgttggtggtctttttgtcttattgatggtgtcttttgccttgcagaagctttgcaattttttgaggtcccatttgtcgattctcgatcttacagcacaagccattgcttttctattcaagaatttttcccctgttcccatatctttgaggcttttccctactgtctcctctataagtttcagtgtctctggttttatatggagttccttaatccacttagtccctgaataaattgaagaagccaatttagaggagctagagaggtggatcacggcttaagagcactgattgcgcttgaagaagactgtgttcttttcccagaacccacgtggtggttcgcagccacctatgactgcagatccagggaggatgatgccttcttctgtccagatacctagaaggcttttcagcctggtagattttagcaggctctgcaaccatgccattcccctgtgagaggtacctgtttggcctttggtgaacatggaggactgggtagctgaggcaggttttgtcagatggctcccgtcctaccacgtgcagttcctgtgatcaagagcccaggggccggtgagcatcctttcctgtctgataggagaccttgagtattgtggggataatgttgtaacagccagcaagaactcgcagtgcagctgtctgttggtgcctgttactctggccatattgtaccccaaaactaaaagtcaccataatggtacccatagatgtcttaggattccagatgtaagtcttttaaaaggaaatgcctctataaaagaatttaagcaaacattgcttatctcaacctttacataggtaaaggaaaaaattatgaagcataagataacaaaacattctgccatttcttagatggtacttagctttggaatttccaaattaaataaaataaaaaaccacagtgaagtgtttcatgaaaaaagtcatgttcctgacataacttaccttcaaaactgttctaaaatagtttctttttttttaatttggcaaaattcctataacacagccgcattaaagtgaaagttcagtcatttattgcatttacaatgtcttacaccattatccctctgtagttccggacattcttgtcacataacagttgttttacaactgttgtttagagaacatttaaggactttgggcatccttaaaaatgattaatagctgtttgtttacttcagaggaatgcttttgtaattttgcagtttctattttgtgttcagcagagtgatgcggggattgtttcgggctgttgtctctactgcgagtacaaggctttgtgaagagttggggttgggtccattcatttatttaccgggatcatagagcacaaggacatccaaggacttcatcacagttcagaacaggggattcaagtttggctgaacccagaggtcagggatgtatggtatttgctgaaggggaagaaaggtgggatccaagagtatttgggaaggggacaaaaaggcagagagaaggttaggggctcttaattgatcttatttagaagtagtgttttatttttgcttagaagagtggttggactggggagatggctcagcagttaggagcacttgctgctcttccagataacccaggtttaattcccagcacacagtggctcccaactgtctgcaactccagttcctgggatcagagtcttctggcctctcctgccactgcacacagtggtgcacaggcatacatgtaggcaaaggacatatacatagaatgaaagtaaagaaaaaattggggagggtttggagagaggaaggggaagaggggagtgaagtaattatactataacctcaaagataaataaataattaaataaataaatatatgattatttttaaagttagtatcattgggagcgtgacatgtggtaacacgtcccagccagccttccctttcatacccagttccttttctgtttgaatttttatgactttgtcgttaggatttttacagagcagaaagaagcacgtgctatatgtaaatgcaggtgatgtttatggcagaccttggtggcgcaaacacaccaagctatgtatttatgattaggtgaacataacatatgagtgtctggttgtgggacgcatgcactttctgcacaagggcctgcgatccacttagcatttcagtttgtgccaaggaatgaatcctgggaggggtgagctgcggcgatagatgtgcattagtaaattcacagcagacttccttcgccccacccgagatgaagaatgtgaaaggaaaaaaaagccagactgcttgtaaatatctttaaaagtaaacaccagggatgggttcatggaggtcggagtccagcactgccccgtgaatgtactgttaggagtctctttcgatgaaaacatgaattgctttgtgtggaatgcagtttgaaacacacaagctgcgggcatcccttgccggcaccccgtccaccaggcaggccaacttgaaggattccatgagttgggagccttacaaactgagcagggtgcatcctttgacttgcttggtagtaggttagggagatctttgctttctgattatacttaatcagctcatttcattgtccaggcctgtgggctattctcgaagcgagcatgtaaatgctattcaggcactgttgccagcagaagttttggtctgatcatgattctcagcccagagggtggctctgaggcatgatgacagagccccttgtctgtgacctagcacaaaagtttcataacctcttaaaatatctgtttaccaaaagaataagaatgttaacactatgcatggtatcgggcgttttcttagaaatgagagtctatttcatcctctatctgtgaaagtgtcttggagtttagttttttaattcaaaatgcatttccagagcctagctggctatctagagcatgctctgaccgtaagactggagaattggcttggaaccccagcctgtggtgggtgtgcaacctaaaatctgttgcggaatcagccacagctgggggtgcaggacactgaaccaggtaggcgcccaagtgcggacagcttggaagacagtataaaggataagcagaggacaattgtggcattgtctcatcgggcaggccagtcatgtgcttgtctctcttctctgaaggccctctcctccagtccacctggactaggctaggtgtcacacagccttagttgtcagaatggtgtaatactctggagtctcagctataactctggtgccactgtcccctcaggctagcattcctggccagggtgccacattgtgcttggtgtgtggtagatctgaattgtgagaggtatgaagaggcacatgaactgagttgctaagagctatgaagatgtgaacattttgtttgctccctgctgtcaatcagctggggcctattgaggtatctggtactctgttagatcacggagctttctcagaagaaggagctggccatttcagtacagttatgtatctcagcctttgtttagatcccatgatagtatgtatacccttcctctaggacttgtgggtattggctctaggaaccctatgtgtaccattctctggtgtgctgagcatgacagtgtgggctttgtctacccttttcacgtgtcctcccatctagattgtatcatctagggatggatgtcagagcagaaagtccattcatgtatagtacaggcaccatttttaaatcatggttttcatctgtacatagaactgaggatctcaagaagcccactctacacagatgcataatacatagcacatggatggtcatgtcagcaaattctcctataagagtgtatcaccctattagtgctacataggaactgtgcactgctatgcccgaacctgtgaggaacgaccagtgagcacatttacagagaaatacaggcagccacttgatgtctttgtgggggaaagtgttccaaagggtattgtgggtaaatttggtgttccttgggtttcagcatggcacactggtagaaagtcagtgtcaccagctgttggattttagttttctcggaaggctatggcattgggtgaccatgaggtggcgggcacatgggtttgggtgtggggtgtgttttgttttaaagcctttctctgcagaattgtcagggagaattctctttgggtctgctcaactgtggacagtggtttctcagacaaacaggaaaagggcattggagtgactcggggttgtcagctatggtggtggttattctggtggtttgggggtccacctggctctgtcttgggggcagttcctgtagttgcaggtaggacctgcaggttacatcaccattgcccacttatgtttcccagggctgtcaggtgggttgtaaagaaacctacaacttacacacaaagcacctggtttctttttctaggggagtgtccgtctacacagttccagccagggcctgagccttctagctgcaccaggagtgctgtatcaccagcactcaggaggctgagggggctttcagtcagtgataagatgtgcctaaggttatgggttcatcgtttgcttgtttgttttttaatattgagtagagttaaaggcaaggctttcccatcaaggggccaatgcatcagctcctcagtgagcttgagccccagtatgtggagccaggctccaggtgtcatcctgctggcaaaggtgaaggctggctcagcccattcctggggcggtggtcnnnnnnnnnnnnnnnnnnnngaaaaaaaagccagactgcttgtaaatatctttaaaaagtaaacaccagggatgggttcatggaggtcggagtccagcactgcccccgtgaatgtactgttaggagtctctttcgatgaaaacatgaattgctttgtgtggaatgcagtttgaaacacacaagctgcgggcatcccttgccagcaccccgtccaccaggcaggccaacttgaaggatcccatgagttgggagccttacaaactgagcagggtgcatcctttgacttgcttggtagtaggttagggagatctttgctttctgattatacttaatcagctcatttcattgtccaggcctgtgggctattctcgaagcgagcatgtaaatgctattcaggcactgttgccagcagaagttttggtctgatcatgattctcagcccagagggtggctctgaggcatgatgacagagccctgctgtcaatcagctggggcctattgaggtatctggtactctgttagatcacggagctttctcagaagaaggagctggccatttcagtacagttatgtatgtcagcctttgtttagatcccatgatagtatgtgtacccttcctctaggacttgtgggtattggctctaggaaccctatgggtaccattctctggtgtgctgagcatgacagtgtgggctttgtctacccttttcacgtgtcctcccatctagattgtatcatctagggatggatgtcagagcagaaagtccattcatgtatagtacaggcaccatttttaaatcatggttttcatctgtacatagaactgaggatctcaagaggcccactctacacagatgcataatatacagcacatggatggtcatatcagcaaattctcctggttacatttgcacttaggagtgtatcaccctattagtgctacataggaactgtgcactgctatgcccggacctgtgaggaacaaccagtgagcacatttacagaaaaatacaggcagccacttgatgtctttgtgagggaaagtgttccaaagggcattgtgggtaaatttggtgttccctgggtttcagcatggcacactggtggaaagtcagtgttaccagctgttggatttcagttttctcggaaggctgtggcattgggtgaccatgaggtggcgggcacatgggtttgagtgtggggtgtgttttgttttaaagcctttctctgcagaattgtcagggagaattctctttgggtctgctcaactgtggacggtggtttctcagacaaacagcaaaagggcattggagtgactcggggttgtcagctatggtggtggttattctggtggtttgggggtccacctggctctgtcttgggggcagttcccgtagttgcaggtaggacctgcaggttacatcaccattgcccacttatgtttcccagggctgtcaggtgggttgtaaagaaacctacaacttacacacaaagcacctggtttctttttctaggggagtgtccgtctacacagttccagccagggcctgagccttctagctgnnnnnnnnnnnnnnnnnnnngcattggagtgactcggggttgtcagctatggtggtggttattctggtggtttgggggtcccacctggctctgtcttgggggcagttcccgtagttgcaggtaggacctgcaggttacatcaccattgcccacttatgtttcccagggctgtcaggtgggttgtaaagaaacctacaacttacacacaaagcacctggtttctttttctaggggagtgtccgtctacacagttccagccagggcctgagccttctagctgcaccaggagtgctgaatcaccagcactcaggaggctgaggggactttcagtcagtgataagatgtgcctaaggttatgggtttatctctagcaacaaaacgttgtttgcttgtttgttttttaatattgagtatcgttaaaggcaaggctttcccatcaaggggccaatgcatcagctccacagtgagcttgagccccagtatgtggagccaggctccaggtgtcatggggccagcatcctgctggcaaaggtgaaggctggcccagcccattcctgaggcggtggtcctaacacctatttgtgctctgctgtggttttgctgtcctcccatgggcatcctgctggttcacagtggctgtctcttgtccaggttctgaccctgatccctaggggaaacagtggggtttctgagaatgactttcttcctaaaggaaggaaccctccaagccatctcaatccctaacactgccgcagatgagcgggaggaggggcgggggtgatgagcaagtctgtgaggaggcctgctcagagctgcttgggtcatggctttgacacggtcacaacccccagtcctctggcctgtgggtagacgggacccacagaggagttagacctttttctgatggaagtcgtggactggaaaggctggtacacccacctcactgagcccgccgctgatcctgttgggttggggccaggcatttccgatagcagggatagctgttttcaggcatataaacaannnnnnnnnnnnnnnnnnnncctgaggcggtggtcctaacacctatttgtgctctgctgtggttttgctgtcctcccatgggcatcctgctggttcacagtggctgtctcttgtccaggttctgaccctgatccctaggggaaacagtggggtttctgagaatgactttcttcctaaaggaaggaaccctccaagccatctcaatccctaacactgccgcagatgagcgggaggaggggcgggggtgatgagcaagtctgtgaggaggcctgctcagagctgcttgggtcatggctttgacacggtcacaacccccagtcctctggcctgtgggtagacgggacccacagaggagttagacctttttctgatggaagtcgtggactggaaaggctggtacacccacctcactgagcccgccgctgatcctgttgggttggggccaggcatttccgatagcagggatagctgttttcaggcatataaacaactgggaggaagtgtcttctcaggggtcttcctggctgggccctagacacgtggcctgaatgggcctggaatgagggcctctccttatcaagttgctcttgggacctgcggggttgggcaggcttagattcagcaagatggtcagcaagctgtgccggaaacttacctctgtgcagaggcctgcgataatgaagtaaaatcaacactggcacatgctggccaggaagcaacccttggggaacatgagaaacttctctttgagacgttcagggagaatgttctagaagtttctagaagctcacatttgcagagtgagtgagactctgttgccttcagttcatggtaaaacgtggagtgctgctggacaggctgtgttttagttgtcaggtaatagactctgtatgctacttgatgcacaagaaaatgtctcagactaaaataggtactggtgtttgtaagcaattttgaaggctgtcgagaggttcaattgatgttttggggggcccttccatatgggggaaacacatgaaggaaataggaggaagaaggggatctagatgtagatgcttcccagaacctgttagtagaaagcccaatgaaacaggctggttcctgatcagtttctgttggttcccactgcagccaggaggaaaatctgcagttgagcagatactgaggagtgggtttccgcagctgaagtctcctggctgacttgtgtagggctgtggtgaaggctttgttggggcgaggcgatccccttctaccaggaaaggaatctgtggctcagcgtcacagagtcaaaccccactggctttttcctcctgcgtcctcaggttgccatgaagggcaggtgtggggcgtggctgtttgtcctgccccttgtctccgctgggtgtccctggtctcggcggcgtggttttaagttgtggtgggttttggctgggaagtttttccgaacttgaagggggaggaggaagaagggaagcagaatggaaaggaagcgaactgcagcagagagcaggcggggccaagtctggaggcactgactgggcaggcggcccgcagcagcccgcggccgcccaacaatcccgggattctttcctgcgacctactctcccgctgccctctgaatgggcctctttggaggtggcagccccgcctctcgccctgactcccccggggactggcagaacactgagccctcccagggtgggtgggggacgccattgggccggactcagcacccggggctgctggggacagaccctgcagagtgcctttaacaaggctcacagattctaggcccttccatggactgaccggaccccaggtgcccaggtaagccaacagctggcctcgtggcttctgcaggagctatttctgtgtccctggtgtctctgagctctggttcctttgggcacatccagttgctgaaacctgatctgggatgtgggggagggtagtggtgggagtagggaggaggagacagacagacccagtgccaatggccaggacacctaggtgaactggggcatggaaagatagccagacagttttctgttctgagttcccttatcacttagtggcgtttctcaagtctcttagggaccgtctttcaggggaggcacgctttctaactttgtggagctccttagggatgaacaaaagcctggtttgaatgtgtgccgctttctgtgcactcttctgcccaaactgatgatccgtgggcctgcccctttctctctgtcacagcccaacccatagccctcaggagagtgttccccgcgcgcagcttccccagagggcagttgtttccactaaagaggcaggcagcctgtggagcagatgctgggatttttaatgaggctccctcatctcttctatgcttggagcctgcaaaggtagcatttctaagcaaatccatgaacactgaaacaaaacaggcattgactggactgatgtgctcagattccagcagagcttctgcagccggggtgactggtaccttagctgtccttccctcctgggataggactggggttgcctcccccacatgtcgggtaggagaatcttagggctgtgagtggctagggaggaagaatgtggtctcttgcagcatctgttgatccttacagatacaaggctgtgcgctacagctcacatcacgggcagattaaggacgagaggagaaggctccgtactctcgagagaaagcccttgcataagccccatgacaagccccggcaggttagggtctgccccgtgcttgtaagttttatgtgttgtaaaacttcctggttgtaagttttatgtgttgtcccttctaagagccagagatattttaagtcaaatgctttttcaaaagcttcctgttcttctaatggaatccatataaaaccatcattttccatgaatcccatatgtctgtcagtagattcaaagttggccgcctcggatggaaatgttttcctagtcttaggtgagatgcgaagtgtctccatctgtctgcattggcaccgagctcatgtttaccaccagcctaggtggaacctatggtatggagtttctggggaccctttctgtgttctgagcacagcagccaggctataaattctcaccgagaaccatgcagcttcccttggctctgagcaagcctgtacagcaggctccttgtcatttgcatgtgcgtgcgtgtggaggaggcagctccagcggtgggctgcagaatcagagaccttgatgatactgatgggagacaaggttcctgttgacttcctgtgaaccagcttccctccctcactgtttaagaatctgtctcctggtccctaagggaggactgataatgtgtatgggaagatgtcggaggattaggtgaggtagtgcctgcatgtgtcttagcagtgtgcctgtcacgtacacagaaggcacttaacccgagttggctgcttctcttgcctcttactttgtgtggaaatgatgtgagaagcagcggcatcaggatttctctgcagtcctgaaagtgagtgatgggcggtggccatcaatgtgcaggtctatgcttacggcgtgttcggccctgccctaaagcactgagaaagtgagttgtggtgagggcgggactgtggtcactcccagttctctggccactgttgtcgtcctggttccttccttcctctacctctccaaccccccttcttgtctttaatttagagagaacagacaaaggcatatagttgccctccgcagggaagcaggtcaggctggtaggtgccagtgatacatggaagctgctcagacagctgctcagcacctctggaagcagctctccattctggggctatagagagtactttgtccctgtgcttcactgctgttcattctggaactaacttgagacttaaaggtactggaatcacaggttgcagggagaagtgaaggcccaggagggcccattatagactctaacctatgaaaccagggaactggttcacctgcagtcctatgacacacaactttgggtggtggcttctgtatggtatttgtttttgagtagccttaaatggtgagtacttggttaaatatgtctaaaagactatggtgaacagtagtagcctgaccagattccttaagagactggatatagctggaaaagcttccagaatgttctctggagcctcctcaaagtaatgagtaagtaggggagtagggaaggaagaatggnnnnnnnnnnnnnnnnnnnncatttgaggctctgacaattattgcctcctggttgtaacatcacagaaagaggggcctgagtgaagaagcagtctctgcaggcaggtatataaaggctccatcctttcccttgccagttcctctctctgagtctcctaggcgtgaggtgaggagagctgccagcccacgggaggggaggggaggagggagagagagagagagagagagagacagacagacagacagacaggcaggctggctataaaggactagatctaatcatacatagtctctcctgtgtacattctaggaaaagaccctcattgcccagaaagccacccatcctacttcacagtaggtctttgtaggaaggcgtgtattccccaatggctccagtccactctgatatctggtcggttttctagcattagcaaggtctctgtcacttttgtagcctatgttgcacctgagctgggagacaagttgataatatcttagtggccataaaaaacagcagagtaataagtcactcagaagttgttgaaaatgacattgttcataaaagggaacattttcaaagcttattaagaagtatttaaaagctttaaataaatggaaagaaggtccgtgtgtatacataggtttgttgtaatggtgaagagtcttatgattatgagctatacatttaattcctgttattattattatcgtcgtcgtcgttgtcatcatcattgctcattgctgtggatgaaacttcataattctaagttcaaagaataaagacccagccaggagtggtggtacatgcctttaatcccagcactcaggaggcagaggcaggtagatttctaagttcgaggccagcctggtctacagagtgagttccaggacagccagggttacacagagaaaccctgtctcgaaaaaccaaaaaaaaaaaaaaaaaaaaaaaaaaaataaagacccatagttaccagtagataaatgttaggaggtaggaccttcatgatggtagagacctcaggccatgttagcttattttgattcacagtataggatggttctggtccatggttagtgttgcctcttttacttttggttctgtggaaggatagtttgtcatgtgacagagtaaaaccttcaagtccagaagatgaaatagggagaggagagggaagggatgcatttctccaaccccttgcacctactctgttagtggcctgcagaattcccactaggttccaccccttaaaggtctcccaaccgcaccatgttccaatagcttcacagtgggtacaaacctctaacactaggatacatggacctttccaaactccagcaaacagtaaacatctatataagacgagatagtcagtggggaataaagatactgtgtgtgtgtgtgtatctggaaaatgccctactcccggtactacacagaaacatcaactttggaggaaccaagggctttcttaattagttcttcagtctgttgtggaaaatacaaacatgtgttttttgcctccctcccttttctctctttgtctcttctttcttacctagacctaatttccgaaaggctgcagagtgagctgtatcttcttaggtttcagatactgtgttgagtgtatgtctccgtaggcatttcttagtgctgcttctgaggtgcacgacttactgttgtctctttatgcccatgtttccccacttggagtgaactgagaattctctctcagtcgctcactttcagagacaagtgttggatggttctccttcctgaagagtatcagatcactttggaagagttttctttctggcactcttggtttgggctcttttaaaacacacccaagacatggggcttgtgagcaaaccttcaccctgggtgagaagagagcataaatcgtggtaagaaaacccagatgtgctggtgatgagcaggcacaccgatgtcagcctgtgctgctgaggtggttgggcagcctgggttggagagaggaggctaaggaagggcacagggagctgtggtgggcatgaaggttggcagcatggagactgcagcccttggactagggactcagtgaattggaggccctgactaggtgacccctggggggtggggttaaccctccttcttggccctgctgatgaagtcacagtgtgtgctgtcactgtgtactaggctgcctgggaagttcggcatcatcagcaggggctggggggtggagactggaccaggacagagggcaaggagcactgttgctctggagggtgtgcctctttggagggtgtgggctcattcctccttcgggacagaattcctatttgtgtgggatcttcagtcctggcttgaacacagtgcataagagatattctacccacgtatttagaacagttctcctcagctcagtcagtcctgtgttggtcacaggtaaattagtagctattttctgctttccctccccttcctcatagtattccacctgggtgtggggatgtactttccatttcacagctaaatttttgcctcattttctctcccagacttatacacttctctactgtattcaatgctactgttgccagctgctgcattctgcatttcaagattgtataaaataccaacatcccaggcctggccctgggcttgggcctgggcactagttttggctagtgttagctgttctagtaccatccttcatgctggaacctcctgcctctatcatgacggaagagcaccgagaattcaggaaatgcccaaagaatgttgtcactagacatgggtggatgtcgcagggtcttctccaactagtcatccgtcttgacctgctgactggacaatgattaaacattttctcacccactctgaagttcatctgactggcctggaagagtacagtatatagtaaagcaggccatttttagttacaacctttctgctatgtcacctccccctcagagcacagtgctcagcattctgaatcttgaactcactagcatgaactcacttctacagagtcagttgagagcctcaggcatggaaggttctgtcagaggatgcccttctcagaaaaggagtcccccatgacaggaactgatgcttgctgtacatcagcctatcggttagctgtaacatttggagctgtttcaatgtgcttgaagcattattggaagtccagccaagtgccagcacagcctgtcagaagctgggcaatgcttgtgtccgggccattttttgaggtttggatttggctaaggatctggttgggcagtaccctcaattctaatgccagcggcactgtgtgtatgatgcttgctaggcactgctcctgggaaaggaaagcaagccagagccaaaatggcagcaccaaagctaagggttgagttgatactcttgggtcagttggcatggatagtgaaattagaaataagtgaaattaaaacctgtaagagaaacacacaaaccaaagccactatctgtggtctgaaaggctcctgctgtgtgtcctatagctcacagggtccggagttctgggcagaagtaccattgcccacttagagtcctatccaactcagggcctcaccagcttgccccataagccaaaggccaagaagggaggagaagcagctgaggagagagacagtgtggcacagggcctcatgggacactgagtttggggtagggttgaccactctggagttgtggctcagcctggtcagaacccccgtcttgtaagctacggaagagagaattcagaagcagactctgtgcagctcacagcaccatgccaccctcctgctgcttcctcatgcctaacccttaggacagtggttcttaacctggggaccatgacctcttcaggggcagagggttgaacaaccctttcacagggctcacataagaccattggaaaacacaggtatttatattaggatccataactagcagatttacagttaggaagaagcaatgaaaagacttttatggttggtggtgaccacagcatgaggattatgtatttacagggttgtaacattgcgaagttgagacctctgctgtagaagatggttacagccttatcctactgtctgcacactgcatgcccttcctatatttgatccccaagaactctgacagagatccttatccatcccgctgacatcaaataaggctacatttcccaaaatcttattcctgtgtatagatgtcctagcctgaccccagatatgactgaattaggaaatgagatcttcacaggggtaattaagttgaagtgagtcccctgaggtaaagcctagtccagtgtgactgtggcccttatcatagaggcgattaggacctagacccaagcacagaggcaaaggggagaagatatcacctgttagaacagtagaggacaatcgataaactgctgacctctggatcgtggatctctgggatccagagcagtgggaaatcagtagttttttatcataggctgagctaagaccctgagttcatcagacatcggacaccagaattctaacccatggagctttgcacacagaaagaaggacaaaggtttactgaagagtgaagggtggaagcccaagaatcagcctgggatcctggtgcagaaggaatgccatttcctccaggtgcagatgctaaggcaacaagcctcagccagtagctactgtctccgagcctgtgttttgaacacagtgcagctctccatggtgcagtcattagatacgaaaggtgctggtgtgagcagttgtcagttgttagaaagtctaagaggcctatggagtgccacacagactatgactactagtaacaagttggtattctatggaagacaggtaaaatgtgattagtttcaggtgagattgcagccaaatttcacctcctgtggtctgtcccagagtaagaatatatctttttgtttagtaggtttgaccaaagctgaggtcttgaggtaccgggtactcttggtattgtgtcctctgtagctacaatatcaggagttccaggcagaggtacctttgcctagttaggggcttgcttgggaatctgtgcagtgatgtttcggtttcaggaaggacgcaagaaacctgcaaactgcctgtggtcctgggtattttgtgtggagtgtgtgtgtgtgtgtgtgtgtgaaagagagagagagagttggtttatgactactataaacttacatagcaaataagattccaaagtcccagtcagagacatcagacataaataacagacatggtatttctgcacctagagtctgagcgtcatgcagaattactgtactcattagaggagaaagtcgttgtactgggtcctgacactgtgtgctttgtgcatgaaggcctctagaactgactggttcttgcctgagtaggattgaaacaaagctcagcatccttcacgtgacccatttctaaaggaaagttgggctctttagggattctgcccccatacacaaagtaccaagaattctgcttgtgtgcagacccaattatggggctgaacttcttcagcagatagagatttggaacagccagagcttgttagtattttcatcaacctatcagtaagttttggctggccctgctcctgtccattttcctggagatgctcttgatgccacctcgatctcaggctccagtcagcccagggatcctgaaggaactgagaacagtgctccagcgcagtgaaaacactcctctacatttggagcatatttcctctgcctaaggaaggcttctctgtggatggagggagctcatgtctcccatttttctctctggggctgccccatttaccctagctaaagtctaactaccttattttcatttatacttatttgcctctgttgccactgggtggtcacggctcaggatagccaacatctgtcactgaagtgaccagtacccatccaagctggctaaaggattaagaaagaagttctaacacacatgtccttgcagcggtgatggacaggaaaataggcattgcacagactgggtgggtgttcagcctgagtggaggaggccattctggcacaagccatggcctgcattcatgaaagacagggactttatgctaagtgaaataacaactcactaaaggacaaatgctatgtgattacttacatggtctgtgaaagaggagactgtataaagatagaaagcagaacagggttgccaggagctggggcaggggagcagagaaagttgactagtaggggccagagttttagttcataaaaacaagttttggagaaagctggtgttatggttcagcatcaatgaagttggactcaaggcccctggcattgccggaggtggctatgatagtgacccatgactgctttatcacaattaaataataacagtaggatatggctgagcatcctgggggcctggcctctgatctctgcaaggattttgtcaccaagcaagtggggcctctctctgtcctttgtcccctatccatactctcactctttgagttctgtactggcttgtcttgtagcagcacatggtctccaggtagttgagtcttcccactgcaaggcatccctccatctatttttcctgaaagtctagcaagcaggaagtgtttgttttcttgagaactcagaccacagccggtttccaggatgctcatcccttgtgagggctgttggtgcatactgtatcccggggtacaggctgcttggtgaagacattgggattctgtacacagccctgagtgagcaggacagggtgtttgcttcccagtttctattgaaatctctgactacgtggatcatctccaaagagcaggaaaacacagagctctgcatgtagtgagccacttttctgcttcctttcctgttactggttaaaggaaaggttggcatgattcttgctaaggaggtattcctattggaatgaaaacatcacagaagggtaatccagctcttgacagttgggaattacaaccccaaagctaagtgtgatatcatatgcctgtaacctcagaatttgggaagtgggagccaggggatccacagttcagggtcagccttgactacaaaataagtcggaggacatcctgggttatctgtgaccctgtttaaaatggctgctgaaaactctagcaatagctaggatacctctggcctccagagcacagaattgattcactatgaacactgacctcagaagttaccaagaagcagcttggcaagaagaaagcatgcgccttcctgttcatgtgttttttgtgtatgtttgtatacgacctacagagcttgagattcagtacttaagaccctcatcaagagccatgtgctgctcttccagtgtctggggctttcactaattaattctcatgataatgactgcctggccatttttcccttgctttcaaaaagctgctttgaatagccttatagtttttagagagcagaattataagctaaggacatctttttaaaatttcactactatcaaacctcccattaaaaagttttgccttctagaaatagaacttttaagtgtttatctaaacaaactccagaaatcatctattataacttcaattgataagaatgtaaggaagaagagctctgcggccccagagcttgagaatgtatacagtatctcatgtgctgtgccagagagatttaggctaagagatatgctgatggccagaactttcaagtgatggcaaaagaattaactgtggtctgactagtaaggaggtacgaagacagagatggatgaatgggtggatgaatgcatggatagatggatgcaggcatggatggatggatagatgcaggagtggtaggtagatagatacatatttaggtgggtagatgggtggatggatggatgaagacaatattcctactgcctaggctcccaggccagcagtggtcttgcccataactacagagtctgcctgctaacttacaagtcaacagtagccagtgcagagcgactgttgtccagcttcccacagaacactcctgcagcagcttttgaaagacagcataaaaatagaccatgtggaagaatgccagagaccccttctggcgacggaagtggaggaagtgggaacagcgaggagaatccaggcattcctgagatcccaagaggctcaacatatgccccccagttccggcctggcctggaaggaatgatagacagaggtctctgtgtccccaaaaccacagggcaccaaggatacacacaggcttgaagtgaaacccagaaaatgggataagctcggaattccaaacagttttatcccttccacccctttctctgcatttgagctgcagaggaaaaatgtgagtgtatcctgtggagaaaagaataaaggatatattgagaagattcccagcaactaaatggggtctgggcaggaccccatctgactctccctgccatggaaactcattgcgtgcttcaggaaggcagagtttggaaggtctgggtctgccctgtatgtagaccctctgaagagttgctttaaaaacctgttgccccttctgtggtgcctgtatgtccctttcactgaaggacattgttcagagcagaggagagccctcattgtccttgccactttgctaagaacagtagaggtgctgattccacaaacggtaacagtcactgtcctctttcccctcaggatttctgtcaccatgttgggtcatttctaggttggttttaggtgcagagttgaggaaatagacccgaggttgggacagtctgttcaccctcctggctggtgatatttcaccagcagtatcactgtgaccctcatgttgaggttaaagaacagggctcattattttatctgctcttctcgtgagtgaatttgtagaaacctgcacagaggatcttcagacttcggcttgactggagcccgtatcagttccttgagtaagatttcagcatatgccctccacctcccagttctgtggggtttcgattttatgcactgccctgcatattttatacacaggagaaatcaggaaagaggcccatcttttctcgcatgcaaagtagataaagcgcctgtggggtcctctggccccgaaggtagccttttaaggtggcagctctgctcctgctctgggtaggtgccatgctaactggtacccccacctgtgtcttcttagttttgcaatctgctcatcagactggattattgttctgccctcttaaaaaaggcagctggcacccacgtttctgtggatgcagtggcccggagagtaattgagtttctgctgtggcattcagctgtgcagggcttgccttttgctgatggacatttctgagtgcaggcaggggaaggggctctgcagaagaaattgtaccaagactctgcatcaagcacttagcaataaacaagcaacacagtgggtaaaggaagggttaagtcctgacacaaggccagggacaagagggaaccacacagccacagtgcccccagagtctgcgctaatgaatgataaacaaagccactttcatgggaagtgctgggcttgctgttttctggaaaaacacagtgataacagggacagagagcgatttgattttcctccttctgtgctcatttgaagggcacctttggcgccatgtaagcatattcagtgcttctgaattctggcatgggtttcccagattctcaaggctcaggaactcagcaaacagagaccaggaggagtaagggttgccctaggctgtgtggggtcccctggagcagcaacaatcacaggtctaggtactgagcacctcactcctccatcctttgctggtttgtatataattctcaggcagaagtgttagccttcactggtgaatagttcctaagactccaaagatctgtgctgctccttgggactagatcctaggggtgatctacactaacttccaccctccagctagactctggcagaacttccccatcaagctctaacgttctaagccagttattcctccttatccatttatctatccatccacccaccacccatttatctattagttggtttgtccatctatgcacacacccatgcatccatccatccatccatgcactcattatgtgcatgaccagaaccccctctatgtaccaccagggaagggtagggacggctcctctgcatgagcggtaggccagtggttggcattcttcaagcctgttgtagccacctgaagcccactgtctgtccttcctggtcttaagcaaatgccacctccaccacgctgtagtttaaatgtgaattcttcccgcccccaggcgcctgtgtttatgcgtacttgatccccagatggtttcactggtttagaaggttatgaaagccctaggaggcggagtctcactgaaggaagtgatggctgtgaggtcttacagctcagccatgtttcctgttcactgtttgcttcctaagctacagctgtctcattctcctgttcccatgcatgctccaactgtcagcaacaatatatggttcctcccgtaacagcaaaaggtagagtaactgataaactctacaaggaaggcatctaggctccctctagacagaaggtagtcatctaagggtcctcctggaagcctcaagcccacctccctccaggccttagtctcggacaaatccttgcctctcgagaacaagaccctgatggtgtcggtccccctttctgctttccttctttggttcatcttagatggaaagtaaatgcagacggatgtggatggagagaagttttcacctggaagacagtaaagggagcgatggtttaaacagcatgtaaaattgtttctctgccatagctgctacagaaaatgtgaaggatggtcttagacaaccatacagttagttaattagtacataaagcatttatttttaaatatttattgtggattgtactgggggcagggataaggaggctacacctgtcccaaggacttagagataaatcccagaagacacaggcattcaccatcctctatatacaaatagcacatcagtactgacttttcctatactgagaattttaataagagctgaaaaaatagcacagaaattcctggcccatcatggttcctgaatggacaagttgccgcattttgtccatgttttgtcctggttttcacacgttttcgttttcctttcctttcctttcctttcctttcctttcctttcctttcctttcctttcctttcctttcctttcctttcctttcctttcctttccttcctttcccttttcccctttttcccttcttttcctttccttttcctttccttttccttcccttccctttccttttcttttcttttcttttcttttcttttcttttcttttcttttcttttcttttcttttcctttcctttcctttcctttcctttcctttccttttctcttttcttttacctttctcttttttcttttctttctctctctctctttttttgccatacttaagtaagagtatgcccttttaatttgttctatttctgtattgctggcaattctcttttaacttgaggtttgacttctttggtattttggtaagttctcagtaaatgtcttttccagaatggcctctgcttcacgcaatgcccacatggtggtagacgttttcatcctggcgctgcctgcatcttcccatcctcctcctgtgtcttctttgtgtgtttccttttcaccccgagtttgctctctcctctgctgagtccactccacttctgaagtccttaactccaagctaattttattctacttttaatttccagagttcccatttgattttccttagggactcaggttctttggtgaaatatgcatttctctcttttctgtttctttatagtctgcatgttttaactctaatttttgaaccagctgtgtcttttgttggtggtaggattttcttttattttgtttggaagagtggtaatttttttttcacttgtgtttcctggcaacattttgattagaagtttaagactgtattaaagcgaggtgggtgggacacaggtttgggagggtgggctattcttctgagatgctatggctttaaggtgagactggatgaaattgattttatctctggcgtgtaagtcagtgaaagcttttattattggccagggtcctgcttcctgggtgcatttcccacaggcagatttttagaaactacccaaggttttttagctccatggaggctcttgcaacaattacttgacacttggtgctaacccctgaggcttagaactaaggatacctgactagttccaagtcccggcttttctgtgaccttcaccttcttggtcccagatgccttggcaactctggacctgcatcttcatttcccaagaacagtgtgtagcagatcatcagatctgtgcgccgtggtccctggatatgcagccccgagtcactaatatggagggtggggtatgaaaggaaaggtaaatattccagatgatagctctgtgatgcctgcattcaaaggaagagagtgtctctggagaaggtccctgctggtttacagggtgggccgtccatatatctgttcctcatgcatgagtagccagctcaggctggacaaaatacccagggaattggcagctttctctttggaagctgtaatgggtggcaatcagcacataatagagcaaggccgcctccaccagccttctaagttattgctgacatggttcactgtgtccatcagcaacagaacgcttcagaaatcggcttggtttgttatgaacacatgaaagaggtgagattgtggctttacggatcacgtcatcagggtctttctgcttttgtttctcttgcttcagaaccacgaggctgcccagagattattagccacactgtggggatgtcagagagccccgttggacccaaacccaccatgcttcgggctgatatgcctgcaacacccaactttcagcaggtgtttgcatcatcctgcacggtttcaagcaatggccctggccagaggagagagaggtaggaagaggggcttaatactgtcgtaaactctttcaaaggccagagcactgagatctgagggtagagaggagtgggcagagcaggaaccgacagtgggacttcactcagacagagtggagaagagcccgtgcccaggaccgtgtgccggactctgttgctcagggaacactccctgtgcactgcacgaggaacacataggaaactctgtcctggtgatgctgcaaagaacagaaaggcagacggggctgtggcagaccaaacgtttggtctttctgttttatgaagatgcaggcaggccttttgaaattcagtaaggtcatctgccttgctggaccagagtagaactaaaatccctggtgtttcttgttcctgtttcccttcccattgaaataaaggggaccagctgggtgaggtatgcatgcctttaatcccagcacttgggagggaggaggaggcaggccagtctctctgagttcaaagccagcctgttattcaaagtgagttctgaggcagtcagggctgttacacagagagaccctgtcttgaaaatccagccaaccaaccagtcagccagtaagcaaacaaacataaataaagcaaacaaattattgaagaattaaaagttaaaaaaataataaaggggattttctaaggacttgacatcacatgtagaatctatagctagtgtgtcaatttaaatacatatatgttgtaagaactgtatttttaatgggttttctaggttcctgaatgtggtaattcccagtcaagttgtcccccggtctgtaggagatagggtcattagttgatgcctacgatcctagacaggaacaaaccctatatataatgttttcccctatgataactctgaccatttattattcaaaggaaataaatacattacagattccatagccagtcagccagtgtccctgtccccatacttgctctttggggaacttgttgttagatttatatctttatttgtttttattgtatgaatgttttgcctgtctgtagtctgtttgccacatgtaagcctggtccttgtggaggccaggagagggcagcagttcttctagaaggtggttgtaagtcactgggtggatactgggagtcaaaccccgctgctctgcagagtgttcagtgcttaaccactaagccatctcaccagcccctttgggaccgtttctaagtaaccggagagttacataccatgtcggccagtcatctagaggcagacagcatataccacatggatacgctgaataaggagtgatgcatatcctggccatgagtaggacagcacactgctcatcatcccactcacagtaacatttaagacttagcagttgtttatttctacagtgttctactgaatagttttagactgaggtcaacctgggtcactgaaacacatgcaagggatggggggatactgcgcttctatgctgtcctgcagcaagccccagtacctacttccccaatcctgtctcatctgtatcttgtaacagttgctgggtttgaggcatctgtatgtcccttacatttccctatggctatttttgcctttcgaacagcccgccttctgcagaacgccagtgggtagagagcagcccgaagtccaccctcaccctactggggaacagccacccttctgaaagtcccctcggcactcatgagttctgtagctctggtaaggactcaccagggctgccttgcttccagtcctcagagctccaggcctctttccacagccatgagctgtccatgtcagagcctcagggtgctttgcctcctgcgggcagccaaaccttcttaggtttcaacacagtaaccacagcaacaagtgttcttccacctggtgaggacgctggcaccttgctggtcaattcccatggaacatcaccagctcctggaacccctctgctgacgacaggggctgctgacaacggctttctgccccacaactttctcacggtgtcacccggagccagcagccaccacagtccaggcctgcagaaccagaacgtgagcctgcctgggcagccacccctcccggagaagaagagagcgtcggagggtgatcgttctttgggctcagtctccccatcatccagtggcttctccagcccccacagtggcagcaccatgagcatccccttcccgaatgtccttccagacttctgcaagccttcagaagtggcctcacctttgccaggtatgtctgcatctgccactccctcaggagaggagggctctggggcttcccgtgtgagccagtcttcagtgctaagtcagatgtcctgcaggaaatggtcagatcctctcttggctctctcccacccagtttgcctaaagccagatagacccagtttttccggtcagcttcctccttaatctcctgcagactcagaccagcgttagacagtgcagatgctgcagtagttctgtattcactttgactaaaaggatagagatgctttaaagtttctttctctcttcccaattacataattcatccagaattgagttataagctgtttcaagtgtttgacacagcctcgctgccctgtcctcctgtcccgtattggaagcacgtttgtcttgtactgtactccgcggtactggctcttccttccagttggtcctttgaaccacgtctcctccccacttaggacctttctgtgcatccctcaaacccaggcatggatttggactcgcatcaccattgtaaaagaggcagcaatatagatattctgtattactctcaatgctgaatagagaaatgtcccatttcctactcctgtgaatgctgctatcagttccctattgtaattaaacccaattgagatgtattaatttgtaaaaaactaaacaaaaaacccaaatattctgtattaaaattctgcttcacagatagcccaaatgataaactcgtgattgtgaaatttgttcaagacacttcgaagttctggtacaaggcagacatctcaagagaacaaggtaggcggggttaagggacctcttacaatgttggtcgtatttggtctctgggtccttctgtcagggatctccttgtattagctgtggcgcagataaatacacctttttcataggactctggagaacattctacaaccttcacagtcttacagggaaaactcagtccccctgagggtttgggccagaagtggtttcaagccacaagcatccatcccagcgtgtggcctgtgaacactggcagtttcactagcctggcagcccaccactgctttgaggatgagacactgctcaggtctctactaaggactccttgaggtcctaggttccagagtactgcagaaagaggccatggagagctaatgctctaggagaatctcaggcttggtggctgcagacatgaaagggcatggagtgtttggagctctccccattaggagcttcctgtagcctgcatgaatctaccccacattggccacctggttgaagtccctaaggagctcatggggccgttcattcatagcatcatctctcagaaaggctagttttctccctgaggttctgccattagattttaaagctaacaggaactgtgagactctagttcttcccaggagctcaaggaagctgttgtcattttaaatggaagagaagcatgggtggggtgaggtgggggatgaacacaaccacggcctgaaaagcctttcatttccctcaggcacctttgtgaaagctgcttagtgagtccaagcctcccccaaaacacacagagcaaccttatgtggccagtgtcccgaattcttctgtctctggtctccctgcttagctgcacaggtgaaaagatggcattttccttactccacgttcatctgccaagcagggtcccaactggcccaggctgtaggagcagctgggagaaggggctgctctggatgtatagagaaaaggagtcctgggcgtgggacgctccccacgcatatcagcaccagtttcttactgctgaaaagagatggggaagtgcccatgtgcagaagagagaggatgtcggtgctttgtaacagtctgctttcaggcagccgagccatccctggaaccattgccaatcaagagaacgttactcttcaattgtcattgatgcattgagcgtcagctcagccttgagtgtgatttttcagaggtggagccatcccaggctctgggtgggcagtgacctttgtcccctgcagtcatccatgcctttccttcccctagccattgccatgctgaaggacaaagcccccgggtcattcatcgtgagggacagtcactccttccgaggggcctacggcctggccatgaaggtggccacacctcctccgtctgtcctgcacctcaacaagaaaggtaagcgtccatagacgggggttgtctgttgtttacagtggctgatatcggcaactgttcccactgcttctctttatttagtgtttgctttctaaggttacttccttaagtagctgtccatccatgtataccttttatcttcattttttttaacccgtcttttccatacttttaaacttgcaatgtgaacactaatatagtacatagaatatgtactatcttatgaatcaaaaattttaagactcactgaacacctcaggtcacgaggagtgtgcagtagtcgccctgtgcaggatgcccttcgtatttatcttatcaggagataatgttcactgtgggtcatggttttaagaggttcagctcatttggttggctctggtaccaggcctgtgatagagaaatcatcataggctgcttgtgcatgagggagtatgtgttctccctctgcctgcaacgtgaaggggagaggctggggagagagcgaggtttcgtcaccctcctaagggcatgcactaagtgaccctactccagccctccttacatcctcactgatcaccagagcatctctctgggagctgagcctctgccgcatggatcagtgagagacgttgccttagctagagagaggaatccgaatcagcatggctgtggtacctgtctgtcccatcccatgcctgggtctgagatgagccatcctaactcttgtgtgaaatctgtctgaaagcttcctggagcaaacatggtacacggtgtactgaggttgtaagatgtggttgcaagtgggccagcctcaggcacaggtggctgacctgcttcaggaatgtgcttgccttgcaaggctaggaagtgtggttgggaggcacctgggactcaggcagagcacagctcccaaacctgggggtgctgacagggcttctgtgagggagtgggagagtaagtgacatcacatagaacgtctaggattcccgcctaagaagctcaacagaaccttactgcggggacgtatggcctttatcatgaagcactcactcagacctggctgctgaggactaccaggtctgacttaggaacatcagttagtgacatatcaggaaaagacttctaatgtctgggaatgtatccttccttgggcagccttcaaactaagtctgagaataaacgaacaaaatagaggctatgtgaatagcagatgtcagaaaacccagcatggtggtctccactggctgaaatacagtctcgactctgtgtgtatacctaggcctgggtttgacatttgtatttcccagtccaacgatagatttgagcgaagagtttaccaaatgagtgaagagccagttagtcactgagccacctccagtcaatttgagatgagacagctgtggtcattctagactctgtgttccaaaacacccttggcagcaggatcttcacggggccattttccacaagtagaatccagaccttcagtgggttttctcattaggctggaagccccacaccttctcttcccacagaggaagtgtcatattttgttccctctgttttatgtgtcagactttcatggaatccctgcaggtttgactgcccctaggaaatgctaacatgtactgccgctaatgtgtggtgttgatcagcatcattggagcctaatgcagctcaggatctctcatcataaatggccccaaacagatatggcgacggtttctgattattttcagatttcaaaatatttgtacactaataatgaggtatcttgggaatgaggcttaagtcttttttaaaaattatttctttattattttatttgtgtgatatttttccttgtatatctgactgcataaatttgtacatgtctagtatgcatggaggcctgaagagggtgtcagataccctgaaaatggagttacagacagttgtgagctgtcatgtggctgctgggaatacaacctgggagacccaagtcctaagattaaattcatttacatctcctatagaattcatatacattccatatattttgaaagtaatgttatgcaatattttccattatttcgttcatgaaacaaagtttcgtggtgtggaatcttccatttatggcctcatactggggctcaaaatttgccaggttttattcagcttatacagactagagtctggcaacctctcccgaatcgcaaatttagtaggtcttgctttatatcaattatactgagaggctaggtctcagagtgctaaagacagcaattaaggagagagatgcagtacacagggtgtctactgactttagcagcttggggcagtgacttcttttctcctggttcagtttgtacttttccattcagttgcttcttctctttcggttcagcagctggcttgaacacaagtgtcctgtttactagcagtttggtagaatgctgcccctacatagcagactgcttgttgctgcaggcgtttctgtacccagctggcggttccacctcacccagagggctggcatccttccagctctgtactgaagtcttttctgccggagcctcggtggcctttcctctcttggaggaatgcagctggtgctccaaggccagggtctttctaagctgccagttcatcccgtctctgggagtttctggagttccgcctgagggtgtctgtctctcagggactcttaagtcttactatccacctgccttgtggccccgcccactgaccatcccaggagtggttctgggagtggcccagtagtgcagtggtttaatcctagttagagggagccttcttaagtgtagcccttagatttgatatctgcaggaggcagatataaaagcttgtctgtctgtctgtctgtctgtcttctatatagttctctctcttttttctctaccctcgatccctactttgattctcttacattttaaatttaaaacaataaatttttattcttcccgcagctggagatttgtccaatgaacttgtccggcatttcctgattgagtgtaccccaaagggagtgcggttgaaagggtgctcaaatgaaccatattttggtgagttacttgagaagctcttttgaatttctagagcatagattccctccttcaggtggcttgagattcgagggactctgtaccacaatgggtttctctcctttcagccccagggtgtcaggctgccacgtgaggtctttaagataagctgaaggggcagttgttctttagaagccttgtcaaaaaccaaataaacggaagggatcctccgagagctagaataagacaaggtgaaggtcagcagctgggtcccagcagggttggagcgcagtgtgtccccatgcctcaggcacaaggaggaggagcacagtgctgccaccagagctcccccttctttgtgaattgagagccttctggatagaccggggcagccttgtttcctactcgtaagaagcgccccggcacttcgcacttataaaggccatatgcttggcatacactacaggtccctccatcaccctcttcattggcttgggccttgtcattcttggagctttgagtcacatcccacagtggtataaaggcatgcgtttttggaattttggtctcaactgattctttggttaagcacagagcaagtgaagagattggtgacattcatttactcttatccactttatagggagcctgacggctttggtgtgccagcattccattacgcccttggctttaccctgcaagctgctcattccggagagaggtatgtggaggagttctcagtgctatctggctgcgtgtacgatcttctgtaccgctgatagcatgctgtacccaggacccaccttacaaaataaactaaggttctttttttatgacatatactcttaaaccccaaagaaaactagtggccacctgaattgagaaagaagaatgccctgctgctgataatagctttcagacattgcccatcgtggcctgtatggaaggtgtccagaaaacaaagactgctcagcttaaagatgtaaaacacttggggtctggagagatggttcagtggttaaaagcactgactgctttcccagaggtcctgagttcaattcccagcacttacattaggcagcttacgaccatgtaaaactgtagttgtagaagatctagtctccttgggcaccagacatgtaaaacgtgtacatacataagtagttattttatatacaaacatgtgtgtgtatgaaaaaatatattttctcagactaattttaaggtcacttgcattatagattcacagtcctacaaaatgagaatgatgttgctatggttaaatttaggtcatgaatgaacaagtctctctacttttatatttgttagaaaatacccacaataatttttttaaaaattaatatccagggtgtataggggccttactgtgtgtcccagctttcctgtaggtaaatgttattttatttatcttttaaattttgatcacttatgtaaatgaattcagagacttggaacatgttttaggggcataccacctccatctgtgttcagaatgggttacagtctctgtgggctgcatgattgcctcgcaagagaaagctctgtcaccgtctgggaattctgtcatcagattttctttgccatgtggactactgtgtcaggagctcatgtctcgtctcactccttcctgcagatccactggaggaaatagcagaaaactctccccagacagcagccaactctgcagccgagctgctgaagcagggagcaggtcagtggccgcagctttggttttgtatctctgcatctccgagtcactgggcggaaccgaactccatgatagaacttccctttggacagtcatttcctgcttttctggggactgtgaaggaagtttccttttatagctgcttggcacagctgggtggggtgcagctgtgaggaggcatggccagggcatcagaggctcggactcaaacaagaccagattcagtggaataaataaatgttaaggcccatatttagtgtggggggaggggtgcgggaaggcaggatgtggtgacctgcctcgccagctgaaaatgtagaactgttctggagctgtgactcaacagtccctcagcctgagtcaactgctggacccactctgccatctgtgctgagacacaccacactgggagaccaggccacttgggtgaaatctttgtaaatagattgtacttcctaaatccactatgggaaagtatagaaggcagagagattccatgtcaatgctggctctccattcacagtatcccacaccatagtgttacagctgatgagttgtctagtatctttgcattattaagtgaagtctgtagtgtatgtagagctcactctttttatttaaaaattataatggcttgaacatttacatcatctctcccccactccccccccacccccactccccactccctgtcatattcacagcccgaattctgtattatacatgcgcatacacacgagtctactgagtccatttagtgtttagctcatatgtacgtgtgtttagggctgaccatgtggggtttaataacttatcagggcactcacccatgaagaaaactgagtctctctctgtcagcagccactggttgcctctagtgctaaattttacaaggctccgcccagaaatacagtgttctctctcggtggcaatgggcttgagaaatattggcattcattcatgagtataatgtcacatgaagtattttcttcatcttaaaacttacctctgatctccttactcactcctccctcatagtcaagatactcactgtcactgatctttttatggtcgccatactgtcagttttcccagaatgctttatgctgtaaacacaagctatgtagcatttcaggttggtttctttctctcggtatagccattcagcttcttctatggctttccagagatcggtcgcttccttccttgtgtatagtgcaggagattatatgtgtgtttgtacagatctgtatgcatatacatatgggtccctgaacatgtgtgtgcacatgtgttcagcggcagaagtccatgttgtatatttcctcaaatttccctacacattattttttatagccgtcattcaccgtacctgtagctcattgatgtggctaggctggctggccagtgagctctgaggatccacttgctctgccttcccagtcctgcgatggtagcagtacatcactgcattccacttgctggggacctgaactctaatcctcagggtcatagctttcactacaaaccttttgccaaccgaaatatctccccagcccttggtgaagcaaagcttatttatgcacacagccactgaagaatatctgggttgcttctaagttttggcaagtatgtataaagcttctaaaaatatccaaacgcaagttttcagttaatacatgtttccaactcctttgattaaatacgaaggagcctgatagttaggtcaggtggcacgactagttagctttgaatgaaaccacagaacttttttgcaaagtggctgtaccattttgtattcccaccagcaatggagaagcatccccttgctccacatccttacttacatacctcaggtggtgtcaccctgaaggatgttctcattctaactgatggatactgtgtgccatcttactgttacctcccttgtgacgtactctccagatagaatgtcatggtaaagaaatattcttaattcctctggatagtttctattgttctaatgtaggtctgctccgtaaatctaagcacatcaatgtgaccattataaaatgaaagaagacaccctcatttatcgtgtggatgttctaggttccaaaaagatgagtttgccatagccacaacagaggtcacagggacttgccccaggctagaagtatgtccctgtgatattcttgtcttccagcctggcagccatacatccatccacatctgatgtatgtgtagctagacagacctcgggtttatgttgttcaatatgcacagtggtctccctctcaagagaggtagagaacaaacgaagagactctgagaaaggccttgggaacagttttcctgagcggagaccacagcctttccctgcatggcccacccttcagtttctcttctgatctcttgtgagcctgagcagactgtccctgggagacagtgagttccacaaaagagagaaactcagagcccccaactttgttttagatattcattccctggtgtcttcctaggttgacaccccctgttaaaccatcagtgtggccctgggctgattcgattgtttggttctacctcttaaaaatgtacttgaaaaaatttaaaaacctgtaataatgattgatttttaaaccacaactatgtatcaacgagaaagaaagaaagaaagaaagaaagaaagaaagaaagaaagaaagaaagaaagaaaagaaagaaagaaaggaaggaaggaaggaaggaaggaagaaaggaagggggaagagagagagannnnnnnnnnnnnnnnnnnnnnnnnnnnnnnnnnnnnnnnnnnnnnnnnnnnnnnnnnnnnnnnnnnnnnnnnnnnnnnnnnnnnnnnnnnnnnnnnnnnnnnnnnnnnnnnnnnnnnnnnnnnnnnnnnnnnnnnnnnnnnnnnnnnnnnnnnnnnnnnnnnnnnnnnnnnnnnnnnnnnnnnnnnnnnnnnnnnnnnnnnnnnnnnnnnnnnnnnnnnnnnnnnnnnnnnnnnnnnnnnnnnnnnnnnnnnnnnnnnnnnnaaagaaagaaagaaagaaagaaagaaagaaagaaagaaagaaagaaaggggggagggagagagagagagagagagagagagagagagagagagagagagagagagaaagcaagccatgaagaaataggaccatggtgacatgcctgtctccatgtggattttacttgtggggcccagtggtctcattccactccatggatggagctggctgttggtcagagccaatgggcattttgcctataccaccatctgcatctgtgttagcaacaaagctctgtttcttagtcccacacgactggtgccataaccaatgtgcctctgccgtcatctcttgggtttaatatctctcatcataagcaatttttttatagttctcaattccttaactagcattcttccagtaaatgttacactcaatcattgtccatgtttcttatccatttcaacacagtatttttaatatgatgttctattgattttttgagaagctcatatattttgatcatatctaccccaactcctcccagatcctctttccataagtcctcatccacctcatgttctctcttttttgtttaataacttactgagtccagtggttctgcctctgtatggatggctgtggggacatccactgaagcattgtcagaccatgaacggcacctcctaaagaaaactgggtctcattttctttaccagaaatcagctgtagctgagctaggctagggctcggggcttgggtggcgcttccaactatgttggaatgttgaatggctcgatcttctgttgctgtgagttcatgagcgcagtagtcatgctgtatcaagacattgttttgacccagttctgacccctggctcttacagtccattcaccccctcttccataatgttccctgaatcttctgtggagggttatattatagatattctgtgtatggctacagcttaccactttaaaatacattgtcccaccttttaaaataacatttttttttaatgggtgggttttcctactggtaaaacttcatgtcaagctttaaagtctgttttaattatctgtcttaggcattgagctatgagccttgatttaaggctgctttcagattcttttctttaatccataacacaccaggagtgtggatttctatttctattgcacattataaaggcaaggattcagctcaatagatctgggggcggggcttgtaccaaccttgcttaaggattggctatggtcacttagaataactgtaacacaggtattgtatcaaaaaagtaggactattcagatctctgatcactgtaactcttcccccacccccatctgaattccatttgtcatcctgattctagacttctgctaaggtccttggaaatgtcccgtatcttcacagtagaagccaagactgggcaacacagcagtcagctcaggatgggaaatttgatactaatgccattatgactttgttccaatagctgaaacaatttgtttctgtattttaagcctcaattcttaattgtttcttcttgaaatggaggaggaatgtgatcgaatccttaaaagaagaggctctttcaccagcctcccctaggtctgtacatagtctagctgtttagcttagtgctgtaggagtagaatttaataaacatcatgtgggtttttgttggttttgttttgtttaataaaaagcaggggaatgctgaagtaaagaggtgggtaagtgagtcctgaacccggtgcagccacgtctcactgggaagaaggggaggtgggctggaagtttctaaaccagagaccactctgagcatcagccaggcctgttcccgccccctcctctcctgggattgtccttcgcacagttctttcacattccttcctgcggtttgtagaatgagtttgctcgtggtttttagaaatacagtgcaagtctcagttctctgtggttctgtaggactccattgcgtaactcagctctccatggtcatccgtccacttagcctgactctagcttgtccgtgctacaaggcaagcttgaagggttgtctttctactccattctccctgaattctacatattgccttaagctaacctccaagaagtaacacttaacaagtcagaatatgtggatctgagaccactttagatgggaaatgttttcagctcaggaactccctgccgcaggtctgaaggatgctgtcctgtttaatgtgtcatgaagcgccacagctccaaggcttcccctcaggaagagcacttgtccctgcaggccacatgttccctgtttgagagcctgactttgggaggtgatgctggcccacggtcatagtcatagggtatctgcctccagaggtgtcatttctcccagcatctcccaacaccaggctcctcctgcctggcaccacagatggaccagtccttatcaggaagttccccgtggtgtctccaagacagcagtctagcctgtggtttccggtgaaccacatctaggtgtgccaagtctatgggattttcatagtagttaggtggacacacacacacacacacacacacacacacacacaggtacaggcacacaagtgcacatgatgcctttcgaaactacatgagcagcaggacaggattagaggtagaatattcactgtcctgaagtctgtttcccattttccaagctgctttccagcgtatgttcatagcacacatgcttttgattttatagttctaatcatagcagagatggtttattctgcttttccaattacctgctaaccatttttccatgttgctatataatttccatgattaccgtttgctggttgcttcacatttgattgagaggatgaatttaactctttatccttggacatacccttttcattctttcctgctgtaatgcagatgggcagggccgtcttcctctgtagattggctgaatctcatgcttatggtagacttgctctttgggtctttgaagaagttgtctccaggcttttcagcgcctcccgataaaatgtgcttcagttatctagaacaggctcaggtgagcccagcatgaaagggatccatttcaccagagctctgtgggcttgggcagtgtgaatgttaagaatgtttcacaccttgctctcctcctcaagagagcacaggaaaacccctagtgtagaccagagcaggtaaaccaccacggcagacagacagttcccttgagtgttctcacctgggaccgaggcagggaggaacacgaattgcccatgaagttttctagcaaagtcaccttgacctgaactcagggtgtaggtgatactaccaatgtcccttacctgtgagcctggtatcctcgcctgcaaactgggggtgatagtaatagactgttctttggggctctttaggacagttattactaagaggtactaagttagtacagtacaagccatcaccccacagcccccctgcgtacccttcagcacttcaggctaagcggtatgtaaaaatggaatcgtctcattgatatttctcagcaattccagagtctccatacttaccgcattttgggagattgtgttaatgggaaccattgtctttgctcttgctgaggccaggaaaggtcatggatgaagggaacatttctctcaccaacaggccactccctgatagcctgttagattctctccgtggcactgggacaagtgtgtctttaatactggtgagctgggagcgtgtgcttaccagtgcttcgaacctgggtcgcacatccaaattgttcccaatcccttcagcttctggttggtctttctctgtgtgtcagagcatgtgtgtccccaatggtcctggctaatgtgcctcttaccccctccccactgtcttgcagcctgcaatgtttggtacttaaactctgtggaaatggagtccctcactggtcaccaggcagtccagaaggccctgagtatgaccttggttcaagaacctcctccagtgtctacagtggtacacttcaaggtgtcagcccagggcatcaccctgactgacaatcagagaaagtaagtcttgggaagagttgtggggtagaagggcccgaggtcagcattgggtgtctcagtcattttccattctattctttgagacagggtctcttagtaaacttggaattcagtgttttgctagactggctgggatatgcccagtgcaggcaattcccctagtctccctagtgctggacttaaaaatctccattagcacactcaggctttacttaggtgctgggaatctgaactcagagcctcatgctcgccctttaaatgctactcatgagccagctctctagtcccaaagctatcttcttttaaggatttttttttttttttttgatggagaatcttttaagtgattgctttagagccactgagatggaccggaatctactggcttctgctttggcatcgttactttcataactgtgggcagcttgttttggtcaaagtagcacagtgtagtatcaggagcccttgtggcaaatgcatgggacatagcccagaccgtcctgagccctctatgcaccatagcctccctgaaggccaccacacctgcagtccctagggccagttccttaagcaaggcatagtcttcattgtcctaagttgccaaatagtttgaagaaaggatcttaggatgaagcagttggactcagagcatggcttctctggtcaaagcttctccccacacttgcagcagataaccccgagcaaacgtcttaaccctctgatgtttggtttcttcttttttttaagcctatgccaaaatacctacctcagaagttaataactcaaaaagtatagtgagcacatgtcctccgaggtgctgttgatgtgggctcagctttgggagagccaaaaggtccagcggcccttagctgcctcctgtgtcttaccacttgtctgtccagttcctcagagcccctgggtccgtctttcctatacccatggttgaccctttccctcgttggactgcttctgtcagctatgagcacccttctgcccagcttccacctgctgcctgtttgagaacacttactctggtcctttcataacaagcaaaggcgtcacatggtttccactccacaaatcttcccactggggaaataaggaacccacccagtccatcacccacccacctacccattactctaaacttccaggaaaggaacgaccctctctctacccacccaacaggctcttcttccggaggcattacccggtgagcagtgtgattttctgtgctttggatccacaagacaggaagtaagagttttgcattcttataactgaaaagtatacctcttttatcctttaatttaaaaaaaaaaaagctaacgtaaaattcttctccccttcaattctcaaggtggatcaaagatggcccttcttctaagtaagttgccagcctttctctatttgaaaatcacagtgcacagctgacctcacttctagatttgcaaagaaggacttatttaaaagatcagacaaagcaaagcagtcattgtcggtgggatcatttgtttgacttaactgaaagtagaaaattagagagtaagaagtgttctgatatcagagcccacacctagaacggtgttggcttgtccattgtcgtgggctggaggagccctgtctatattgtatctgtagtgttctttacacactgagacagatttcttagtccagccatttaagaaggtgctggtactgctgaaaaccccagatctgcttgtgtgggcagaggtgaagccctttggcaacatttcccaatctggagggagcctgctttgttcctttggccagcgagttcttgttccctctgctttgcactgctatcaaggtggtcagaggagcctgatcctcgccctccccacgcacagaggcttcactgtctgtggctgtcagactagctccttttacatggtccacactgctgatcgcacatgttcatcaggtgcctccttcccggcaggcccatttcagagtttctcctgctctggagaacaggtcagtagtagtagtagacagccacaacttcggaagcgatcacagttgcacaggcctgagatgagttcttggcatgttagctttcttgtttggggtatctagtctggactgggctgggagcttctagggttttcctggaggcctaaagtcctgaccttccatgggagaccctgattttacatagccagctggagctcaggactccatagaaggtgtctggaggacccctagacctccagcagaggtgctaaggagcaagcagagcctcagttttgattcaagcatccttctaggctcagtggtcaggtagtagacaggtctctaagctagtgcttggcacatcgtaacctgcaggggcagtctgtactgttcccaggttgctatcatgaggaagagaaagcctgcatgcatgcatggtgcttgctgcatacggtactggctcctctgactagacttgtctcttgcagagtctttggatttgtggcccggaaacagggcagtgctacagacaacgtatgccacctgtttgcagagcatgaccccgagcaacctgccagtgccattgtcaattttgtgtcaaaggtcatgattggctcccctaagaagatctgagcccttcctagccaaacctgccagatgcctcatagggccctcaacatggcagtggggtgaggcagggcccccattcgtaccagattgacaatcttcacattccagactcaacaagaggagaagaatatgacaactcttcaaaccaagaacaaacagtgtcaccactgactggccttaaagaagctgctcttccgacacacctatatagtcaggcgcattttgagtggatggatcttggcccgggaaatgcctcatcggggccccaaggacaagggctgtacaaggagggagcatggaagacaaggctgtccccagtccctggctcattagcatctgtgtggaggaagagcatctgtcctgcttgacagggactgagtagccatggcacccacttgtcagcagaaatgctccctcatcttgtctttctacatcagtgatggaactgaggaggagatgcatggtcagtgaaggtctgagcaggttggaacatggcggggacctaagtcaggggcagcggaagggatgtgaggtgagggcagtggagaaagcctctggggtcagggaggaccacgtggggtctgagagccactgctggggggtaaggactctgtgattctgctctcaggttgtcacctgggctgtggagagcctagaggacctggagaggaaaatgagaagatggaatcaaaaatgccattttatataatatatattttacttatgccaaattatttataaccgcttgccattgccataccgtacccatgtcaaatgctgcagccgactaagctgtgattactaggaggcttgtccccttgtagacacaccagagacagctggcccgtcagctggaaggggaacagtggtctcagggtgatgccacgagatccttctcctgtagtactgccaaatggatttgccttaagcagcctccctaccctctgcctggcgcagcaacatgtcttgtccagatgcagatggttttgttcctgatggaaacgtctgggagacgtggaagactaagacactgacgtcagtctcagcctcttctgcaggactggctgggccatgtagaggtctgcgtcatctaaagcacacgtggccttttaccgtgatgctcctgtggtacctgcagcttccgaggggaacttctgtggggtccagagggggagaagggatgaagggaaagatcaagaactccagcactcacggctacgtttgatttgctgagtcatcttagttactgagtcaggtgtgatggttcttgctaagatgggcatccccctgctgcaggcttcctgtgcccagagattcggaagaatgcggtaagcccgtccttcccagggtggaggtggaggagggctccggctccgtggagacaaagccagggtctcctcagtcagaaccttctaccccaggaaggctctgagaattcctggcctggcctgaaattcccactctttgccttctaaaatccagacctagcttccacatttcacgtccaggacaggctacagttgttaagctgggatttttgtggtgaattctgtttcaaaaggggcagagatgtaactatgtgtagaattgggatcaactgtcaggatgagtgtgtgtgtgtgtgtgtgtgtgtgtgtgtgtgtgtgtgtgtacaggtggactattccatttttgctcatgtgtatgtctgtgtgtatacaggtggaccattccactttttgctcatgtatgtctgtgtgtatacaggtggaccattccactttttgctcatgtatgtctgtgtgtatacaggtggactattccactttttagctcctattgatgcaccaaaagcaagtgcctcatttctgtgccaaatgtttgccttggtctttaaggacctccttcgtggacactctgatgtgcctgttagagggaatgtgccaccattccctagaggccccatgtcttccacagaggcttctagtgttccagttactcatatgcagctaaactccagatgggggcaggggtggggctgaagtttgtgctctaagaagtatcacatcctatgattataagtttatatgcagatgtggcccagagatcacagccccgcactcttttcctcccgctggaggggggtgggggtggggggagagggcctaattagaaatcagctgggctctgctgaagcccagctttccggtgaattgaatgccacaaaggttggcatggaatgcatccaagaagccacacgaatgtgctttcaaaactgaccggtgaggtatgatttttactcaagataaaagtagtcaagggtatcaatggatctgatctgaggaaacacaggaagacagctctacaactgtctacaacagctggtagggcaaggctctgtcttctgtgtgtgacgcgtgtattgaacagaacaagaacagtatcatagactataccgtgtgctcagaaacactgcgaaaggagtattgcccaggcttttgctacaaggccatcggttgggcacaagttagtacattattctatgagtaaattcaatgatgtcccaccacttccaatagatagccagggtcccattaaccttctcattaacggtcttatagtttccagtgttgggctgtatccatgttaaaagccacactgcatttatcttcagtgtcaaagacattgtaatgccgccatatctgtcttatctattagcgcagttttcactattctatattgtaaagaatatatatccagtatgtaaatgagtgttctataaaccttttgtataggcatttcctctgctctttaaatatcagccttattcagagtataataaaaattatgaccttggtaagtctaatgaagcatttttttaagtctttgttgtacgtgtgtgtgtgtgcccatacctttgctcctgtgtttgtgagtatgcgagcacatgtgcctgccatgcgtaaagattagatgacaaccttggttgttggtccttaactctcaccttgtttgaaatagtctcttactgtctcacacatatgccaggctagttgttccagagacttcttgggtttctgtcccctccacctcacatttgagggaacactgcggttatggacaaacaacaccacaccagctttacgtggattctgggtatttgaagtcacgtggtcaagcttatgtgacacgtattctcccccccttactgatccattcatcttgctctgaacagtcacttttgtaccccagactgtatgtgcattgtacgtgtgtgtgtgtgtgtgtgtgtgtgtgtgtgtgtgtgtgtgtgtgtgcacctgtgtactgctgtgtctgactgccagggtttgagtttgggtttttgttttttctgatgtctgttttatgggtcacggtgttcataactgcctatttacatgttttgcttttgggaacatactgtaggttggctatcaaagaccttgaaaaaattatattcaaattatctttaaatcgccaagccaggtatgggggcacacacttgcaataccagcacttgggagacagaggaagaacgattgatgcattctccagatcagccagtggtgcacagcaagacacccccccaaaacaaacaaacaaacaaacaaaacaaaacaaaaaacaaaaaaacagtagggctggaaagatggctcagtggttataaacactggctgcttttccaaaggacctgagttcaattcccagcacccacattggcagctcacagttgtctgtaattccagttttaggggattggatatccttacgcagacatacatgtaggcaaaccaccaatgcacataaaataaaaataataacaaaaagtgaaactataatcttgggaacccagaggctaatacaggaatttgccgttagtttaaggcaggtgtggacttgcataatgaatgccaggctagcctgagttacaaagtggggcactctcaaatcccagctaattttgaaaaatgtaacagcagtgccctggcaaggtagcttagggaaaaacctttgccgcacaaggcctgggttcagttcgtggaccctgcggtccgcaggagagccaaaccctgaagtttcctctgacctccatacacaggcttcccaaagtgtatccagggctggagagacggctcagcggttaggaacactgactgttcttccagaggtcctgcgttcaattcccagcaaccacatggtggctcacaaccatctgtaatgggatctgttgccctcttctgatgtgtctaaggacagcaacagtgtactcacatacataaataaaatcttacaaaaaataataacatttaaaaactaatatctgagtgcggggatggtgactgccctggggtagttttgatgtactgcgttcttacctccgcaccattctagcaccatgaaaggactcttgccatctctgtctacctgcagtctgaacattctaagcctggagcaaccagaacgcccagtactacgtacccagtactatgtgtacccagtattacatagccctcaccttagctttcctccacctccctttgaggatctgctggctttttgctcccttgagctgaccccatctatgtgagtcggggtcaggaccaaggtccatctgctaacctacagggtctaaacccaaaaggataggctatatcaggcccagcctgattatggacatataataaacacagctagcagcagttctgtggcccccatctcctgtgttgttggcctctgaggcttctaatgacattgatctcataccaacttcccacgtactgcaggaaggtgggtttgacatcgatgcaagtgttttatttcagagccgagagcagacaattgctggttcaatctcaactggaagctacctgtggatccccgagccagtcactgcctgtcctttaacaggatcccaacagggtgtgagcatgagcagcacagatgtaaaggtcatttatggaatgtgatgtctaggcacccttgggttggtgacaacagctggccttgtagaaccaacacacatgtttctaagcccacacagaagatctaatgactgaggcgagggctcagtagacaggaggacgctgccgttcatccctcagcacttcttgggctggatgcctgtacccaccttctggatcctcagtccagtgtgcagtagacattcagacactccatgctgaggacacaggtcatagcctctgtgtttcatcccagagactcggggtcacaggaagatctcactgccttggaaaatctcttggagatcgaatggaggattcttgggcagtgtggagagccgtgcctcgagcaatctcgtgcgtgccatgagcaatcgccattataagatggcgctggcttccactgtgcctaactagtaagcaagccttatgcacaagtgcaagagtgataacgatcttgtcacggttttgttgggttctgagcttacaaaccaaccagagcataaacacaagtccacagcaggtggcaacaccaaataaacctacccccacccattccttaaaataagaaaatgcagatgaaatccaggaggagaggccctctgtcagtgacaggtccactcgtgtcgagttgatcctgagaacagctgctctcagggcctcaagggtctcatcgaatctttcagacgatgacctagagttgtctgagtgaatgtggggcctgcgaaattatctgaaagaatgttttatgccacagacattggtcataaatggacacattggccaacaggtttgtgggctagctaactaaaatgccacaatgatattaaagttaccagaaatcaaaaggctgctctgaaacctgatcagaggcagttggacaaggtgtggactcaataaagtgttatcagaatgaccaagatgtgagatgctatcccagagacttccaggtgactgtgcgattcatagagggtcccacactgagagccctcaacctcaccaggaaagcatgcctttcacaggcaggggaaatcaccacagcaaatactactcaaagcctctccctcaaactccccttctcttacctacagactcctcactgtccctcagccagcctggggtggggagcaaggataaacagcagatcagcagcactggaaagctgggctggttgaactgttagtggaaccacagcccacaaagcaggccttcacctgctcactcagcataactagggtgctgtctgctaaagttaaagaatctgctaggctcctgggtaataggagtaaatgtctgaaatacaatgaaattaccagtcataccaagaaatgctagacaaggctgagaaagattatgccaacatcaaggtgcattgtgggctagatttcaaagtagcggtcaaaaaatgcatcagcaaaaaaatacaaattctcttgaagaaaaaattgacaaaccacccagaagaaacagagactacaagcttggaagtatgctgatagacgtttaaagtcaaaccttcctaggaggctggtgtgatggtcagtcgaaaagcttgtgccctgtaagcactaggacttacgtttgatttacggaattcacgtaaaaacggtgggtgtagtggcacccacttgtaatactagcactgggcagtgagacagagtaccagggaaatgctagctaaccagtctggactacttggtgggctccaggccagtaagagatcccatttcagaaggggtacatggtgtttcctgagggtaacgtggaaggttgttctccaacttaacatgcgcacatacacacacatatacaagcgagcgcgcacacacacacacacacacacacacacacacacacacacacacacgtgcatgtgcacaaagccaaaaatcttcctaggaatttttgacagcaaagtggatgtgacagaggacagaattggtgaatttacttacacaccaatagaattcatgcagactgaaaaaaataaagtaagctttaggcatggggaactgcagacactaagaagcagtccaacatacagattagtgagcaccagaaggagaagaggaagagagaggtactagatagcatttaaagagatgatggctccacactccccaaatctgggggatgggaaagatagatttatagacacaagaaaccaagtaaataatatcaaccaaaatccacaatgcaggctaagagaaataagcgaaacacacacaataatatttcctgatttcatttctttgtagaatctaaaagatgaagagacaggagtacagaatggaccaaatatatagagattgacatcaactggatctggatgtgtaggaagaggaagagaggaggaagaggaggaggaagaggaggagatggtagttatagttctgaaaatccagcagatagatggagacctggagtacagtgtgtggatggtgggtcataatagtgttccgtattgagatttccttggaatgagcgggttgaagctggtcttcacacacacactgagatgatgtacttattagtgtgtttctatctacggatcactgtgtctcatcacacatatgccttgagtgtgcacacattattttactttaaaaattcatgacaagaaataaaattttctgaaaactaaagagaaaggaaaaaaaacctacaaggagccatggggggaattctgggtcttgtatgggcacacaagagcttgaatggcagtggtttgtatgaagctgtgaaaggcaggacaaagccaggtcctatagaagagcagtcagtgcctgtatccactgagccatctctcaagcctcatcatgtagcaaaaatgaaataccccagacaacagtaaaatcacccattttattttaattaccagagcatccattataataatgggagggagggttaaattcaattgcactaaacatatcaagatagaatttctgaaatgccaacccttaggaagtagaagacagaagtaggaaaaccaaaaattaaatgcagcaagctgaaataaataggacaacagatttgccccaacacactgtaatttccttaatgcataagtgaccaaacttcaccagtcaaaatactagttggctgactgggaatagcccagccacatgctgttcagaagagacttcaaatcagtctcgctggatggttgagaatcaaaaggtgtaagacgggtaaattatacaaacattaaccgaagccgtcaggcaccacttgctggaggacaattattttatttgccgtggagtcaataaagtacttgcccaagacagtggtagaaacagctggagcggcagtcaggaagaatgtaggaaaactgaaacaacggaagctcccagcagcttctgactgacacatagaacaacccacagaaatagtaaagttgggcatttctcaaaatcctcatggaatgtccatcaaagtagatcaagctgtcagacagacaaaattcaacaaatgtatgccatacaacagagtttattcttgtatagtaaggaattatcctcgaaatcaatgaagtgccatggtgagaaaagtctctgcacacatggaagatagagaacacttttctaagtagcagggtttgtgtggggccgaggtagtgggcaaggaagcctggtgtttcacatagaaatgaatgttccgtagaaaataaaactagcatccatggggtgtagctaaagcagtggccagagtgaaatttataagtctaaatgcctgtactagaaatgaaaggtgttacagcgatgactggatgtagcctgggctgggctgggcaccacggaggcctaccaccccaatccattcgttactcaccccacatactggattcattgtgctccctcagtgttgtatggggcctgagatgaacctcttatttgtaaacacttcagacagccatttaaagagtcttagaaacatctaccaccatttcatgaggtacagagacttcacagtctcagtaactccttaacttaagggtaaggaagcttgcggctgtccacttcttactggacgagccctcaagcctggcacgtaaggaggccaggtctaaattccagggctacctagacaagtgagctcatcttttatccatctgctgtgttgcctggccagcatttccctcttcgtgcaggactggctcatcagtgcaatgaagctacttttccagcctgttatgcagggcaaagatggataggaagagtgtcactgtgtcactaaaagcttccccactttgacaaagagcatccagacccttgctctgtgcatgcgtctttgtagggcagatactggaaaaccagaagctcagcagtttcatgccccgtgccaggtctcctgggttctgactctacactgagtagattaggtctgcagagcacactcgagctaagtgcctgctgtttgctaagtgcagggcatcactatggttggttggtttatgtgtccaagaagccacccgctgagatgagtcccaggaatcattagcctgggcacacacgtgtatgtttcccctccatctgggtgaggatatgacctcaaattctaagtcaacaagaattacctctgtgctctgagctgataaatctctaacctcctgcagtgacaacgggcttatgattagctttctacaggttcagtggccctgcctgcttttaacggtttgaaaacagcaaattggcctcggcttctaaggcataagtagtgtggtggtcatgctcactgagtcgcttgcttctcagactgtcttggcagtggcccagtctccattcacagaccatgaagtttagggttgtgccttggccaccagcaaaaggaaaaacacaaagaatgtgttgtttcacaccaccgaatgtgttgtttcacattcggtgctttctacatcctgccttctcaggacaaccaacaatgcagcagaggaggctgcaggaactcagtccctgcctctttgtgcatgcacccttcccgggcttcccccaaagtgcaggctgccttctaatgccaagaatcaagcaaaacctccattaccagtgtgctctcctccctctgcccccagctttgtgctgcgtggagccagccagttgttgagaattcagtgaggcgatcctgccccctagtggctatcatagcttcctacagcagggtgtctttataatctgtaaattgttgccagctttaaagggaggatgagtgtaatgattagtccccttagaaaagtggctctcaacctgatggtcacaacccttttcacaggtgtcgcatatcagatattctgcatatcaggtatttacattaggactcataacagcagctaaattacaattatgaagtagtaaggaaaagaattttatggttggagtggggtcaccataagatgaagaactgtattaaaagatagcagcactgggaaggttaagagtcactgccttagaggataaaagtatagttactgaagccctgttgcttatggcctgggttggacctgaacttcatggtagaccctggacttagagctccctagttattgacaactgcaggcctcagccctcccgttagtcccagatgaaacctgacggggcgtgtggaagccaggaagacaatcaaatgagtggggggaatgtttccaacaagtggtgttatcaccccaactatggcaggagttgcaaaaagtccaacattcagactgaaaacctgaggtcggtctcataagtagtgtcacaaataatccagtatcatccatgcccccagaacagaggtagccgacacgagccagcacataaagcactgtcctcgtgttttcatgtttccttggatgtcccctgggagctgaaacaggttctgtggaggtttctaagggaaggagagagggtgctgttctttgtctgttacatgtgaatatgctctagcagtttaaccttgtgggtagaatgctagctctgtctgccatgacatatgtgtatgtatgtatgtatgtatgtatgtatgtatgtatgtatatgtgtgtgtatgtgtgtgtatgtatagtttctgacccccttgtgtattcccatttcctcttcattacctctgcagaagcatagttctctgggtatttgtgtgtgtgtgtgtgtgtgtgtgtgtgtgtgtgtgtgtgtgtgtgtgtgtgtttctgcatctggagaccagacaaaagcgccttctctgtggaatagtgggcctgctctaaaaccatggcgagagtgaactgtgaatactctaatagtttacacttgtgagtagaagggttgctatgccacccgacttccatagacatcccctgtgaaggagacctttaacagcgcgatgagctccggaggccttggggacggtgacatctgttgaagctctcccccctgctgacggcctagcagggattatggtcccgagcaggccgttttttgggggacctatgcttttaactcagctgaaaccaaattttatccacagatgcttttccagttggtgttggtttaagaaacaaaaggaatgtgtgtatagatggatgggtcctggaaagcagctctgcagcctttaattgtgtatggtgtgtccgctaaaaacacagctctgtccttggaaggaaaggagaccatttattccaagcctaatatgagtgaccattggctgggaacatggatccaggtggcttcagatagtaagttccaacctagaactgctatatgagctgctatagccacgtatcagaagaagttattattattatttttgattgactgtttatttattttttaaatttttattattattattttttaattaggtgttttcttcatttacatttccaatgctaccccgaaagtcacccaaaccctccccccccactcccctccctcccacactcccacttcttggccctggcgttcccctgtactgaggcagataaagtttgcaagaccaatgggcctctctttccactgatggctgactaggccatcttctgatacatatgcagctagagatatgagctctgggggtactggttagttcatattgttgttccactatagccttgcagacccctttagctccttgggtactttctctagctcctccattgggggccctgtgttccatccaatagctgactgtgagcatccacttctgtgtttgctaggccccagcatagcctcgcaagagacagctatatctgggtcctttcagcaaaatcttgctagtgtgtgcaatggtgtcagtgtttggggtctgattatgagaagaagttattattcaaggtgtttttttaaaaaaaatcacagatgggattagcagggcagcaaatcagggagttctcttgtcgcgtcccactcgaccagcaagaaagacgcaaccaccggttcttctttaagcagtttactcaggcagctactttcttcaaatcccccccagcctctctagttacaagtatttttctccactccagccacaaccacgcccccaccaatcaccacaggtcacatcacctcaccaggcaggcttgctcagccaatcagggattaagggtgggccatccaccaaacatgggcttgtttactacctggaacagacttccatcctgctgaccaggaagtctggaatggctccctacaatctctaatgcaggtttcaggtgctctccgaagacattcttggctttagcattgttgaaaatcggcagtctactaagaaaatacatcctagagcttttagctgctagttgtaagattttagaataaagagatcgccaaagaattgctattttttattggatattttctttatttacatttcaaatattatctccttccccagtttgcccccctcctggaaacctcctatcccatctttcctc

SEQ ID NO: 2658 - DNA, 7163 bp, Mus musculus
ccgggagaatttaccacgtgtccgcacaactttaagaaaaaggactttaaaaagcccagagtctgtggagtgtgcagacagaccattgacggtcaagggattgcttgccgagcctgcaagtattcctaccacaagagatgtgaagcccaggtggtgactccctgctctgtgcaagtccacctggaccaggctcctgagagtcccacacctgctgttctccgctgtgacaagccttcaaggaccgtggttctgagtccagccatggaggacagccacgaactggaccttacgtatgtcaccgagcgtatcatcgcagtgtccttccctgccagttgttcagaggagtcctacttgcacagcctgcaggaagtcacacgcatgctcaagtgtaagcatggagacaactacctggtattaaacctttcagagaagagatatgaccttacaaagcttaatccaaagatcatggatgtgggctggcccgagctgcatgcacctcctcttgacaagatgtgcactatatgtaaggctcaggagtcctggctgaacaacgacccccagcatgtggtcgtcatccactgcaggtttctcagcgggctactgtctggagccatgaagatgaacacctcacctctgttcctacacttcgtcatcatgcatggtgtccccagctttgacactggaggagcttgccggccctttctgaagctctaccaagctatgcagcctgtgtacacatctggaatctacaatgtcggctctgaaaaccccagcaggatccgcatcgccattgagccggcccagctgctgaagggtgacatcatggtgaaatgctatcacaagaagttccgctcggccacccgtgatgtcattttccgcctgcagttccacaccggagctgtgcagggctacgggcttctgtttggaaaggaagaactggacagcgcctgcaaagatgaccgctttcctgactatggcaagattgagttggtcttctcggccacacctgagaagattcaaggatcggagcatctgtacagcgaccagggagtgaccgtggactataacacagcagacccgctgattcgatgggactcctatgagaacatgagtgcggatggagaagtgctacacacacaggggccagtggatggcagcctgtatgccaaggtgaggaagaagagtgcctcagatactggcatccctagtagcccccagggcatgccagccactagcagtccagaccacggagaccacaccctgtcagtcagcagcgactcaggtcattctactgcctccgccaggactgataagacagaagagcgcctgacccccggagcacgaagaggcctgagccctcaggagaaggctgagctggaccagctgctcagtggatttggcctggaagactctgcaagctcccacaaagacatgactgatatgcgcagcaagtacagtgggacacggcatgtggtaccagcccaggtccatgtgaatggagatgctgccctaaaggaccgggagactgacattctagatgatgagatgccccatcatgatcttcacagtgtggacagcctgggtactctttcctcctctgaagggccccagtccacccacctgggtcctttcacctgtctcaagagcagccagaactctctcctgtctgatggctttggcaatggtgttgctgaagatcataatggtgtcctttctccagacctgggccttggtgtagacaccctttacgatcgggagcggatgtgtgggggccgagagcaaaaaccgctgcagcccctgttgaggaagccctctgcacccaccccagtgcaggcctatgggcaaagtaactattccacccagacttgggtacgtcagcagcagatggtggctgctcaccagtacagctttgcctcagatggggaggccaggcttggcagccgcagcacagtggacaatactggccttgcccagcccccaccccacatcccagttactcccaaccgtggagccagcagcagagtggctgttcagagaggcatcagcaatgggccaaatccccccgacacacagcagctctgtcctggtaaagctctccagcccagatttcaagatgacagagtcacgaatggagtccatcaggagccgaacactggctcctccccaggctctcctactctggatattgatcagtccattgagcaactcaacaggctgatcctggagctggaccccacctttgagcccatccccacacacctgaatgcccttggcatctcagctgtgtgtcctgacggtgtgggaagtgggctccggtgtagtggccggctggactctgtggatggccctggccggagccctggccggcaaggtgatgaccccattgggggacggcttcgtaagctgagcatcgggcagtatgacaatgatgctgcgagccaggtgaccttctctaagtgtggatggggaaaggctggagtggacccagccccaagcctgggatcattttcctctcctgaagacatcaaagagacggtgatcactgcatatccctctgacctcaatatgatcgatggcaggattccaaacagcaaggagtcatctatgtgtctgaccccagcattccctgtgtctccggaaacaccatatggtaagaaagaagaaaaactagctgggtacaacttggtacttcaagatgggggagtgacagtatcctttgttgtactgttttgtccagtgaaaacatcgccacgctaccctccgttcagtccacctgagccccagctgagcagcccagccagtttgcacaaaggtcgagaaccacgaggctgcccagagattattagccacactgtggggatgtcagagagccccgttggacccaaacccaccatgcttcgggctgatatgcctgcaacacccaactttcagcaggtgtttgcatcatcctgcacggtttcaagcaatggccctggccagaggagagagagcccgccttctgcagaacgccagtgggtagagagcagcccgaagtccaccctcaccctactggggaacagccacccttctgaaagtcccctcggcactcatgagttctgtagctctggtaaggactcaccagggctgccttgcttccagtcctcagagctccaggcctctttccacagccatgagctgtccatgtcagagcctcagggtgctttgcctcctgcgggcagccaaaccttcttaggtttcaacacagtaaccacagcaacaagtgttcttccacctggtgaggacgctggcaccttgctggtcaattcccatggaacatcaccagctcctggaacccctctgctgacgacaggggctgctgacaacggctttctgccccacaactttctcacggtgtcacccggagccagcagccaccacagtccaggcctgcagaaccagaacgtgagcctgcctgggcagccacccctcccggagaagaagagagcgtcggagggtgatcgttctttgggctcagtctccccatcatccagtggcttctccagcccccacagtggcagcaccatgagcatccccttcccgaatgtccttccagacttctgcaagccttcagaagtggcctcacctttgccagatagcccaaatgataaactcgtgattgtgaaatttgttcaagacacttcgaagttctggtacaaggcagacatctcaagagaacaagccattgccatgctgaaggacaaagcccccgggtcattcatcgtgagggacagtcactccttccgaggggcctacggcctggccatgaaggtggccacacctcctccgtctgtcctgcacctcaacaagaaagggagcctgacggctttggtgtgccagcattccattacgcccttggctttaccctgcaagctgctcattccggagagagatccactggaggaaatagcagaaaactctccccagacagcagccaactctgcagccgagctgctgaagcagggagcagcctgcaatgtttggtacttaaactctgtggaaatggagtccctcactggtcaccaggcagtccagaaggccctgagtatgaccttggttcaagaacctcctccagtgtctacagtggtacacttcaaggtgtcagcccagggcatcaccctgactgacaatcagagaaaagtctttggatttgtggcccggaaacagggcagtgctacagacaacgtatgccacctgtttgcagagcatgaccccgagcaacctgccagtgccattgtcaattttgtgtcaaaggtcatgattggctcccctaagaagatctgagcccttcctagccaaacctgccagatgcctcatagggccctcaacatggcagtggggtgaggcagggcccccattcgtaccagattgacaatcttcacattccagactcaacaagaggagaagaatatgacaactcttcaaaccaagaacaaacagtgtcaccactgactggccttaaagaagctgctcttccgacacacctatatagtcaggcgcattttgagtggatggatcttggcccgggaaatgcctcatcggggccccaaggacaagggctgtacaaggagggagcatggaagacaaggctgtccccagtccctggctcattagcatctgtgtggaggaagagcatctgtcctgcttgacagggactgagtagccatggcacccacttgtcagcagaaatgctccctcatcttgtctttctacatcagtgatggaactgaggaggagatgcatggtcagtgaaggtctgagcaggttggaacatggcggggacctaagtcaggggcagcggaagggatgtgaggtgagggcagtggagaaagcctctggggtcagggaggaccacgtggggtctgagagccactgctggggggtaaggactctgtgattctgctctcaggttgtcacctgggctgtggagagcctagaggacctggagaggaaaatgagaagatggaatcaaaaatgccattttatataatatatattttacttatgccaaattatttataaccgcttgccattgccataccgtacccatgtcaaatgctgcagccgactaagctgtgattactaggaggcttgtccccttgtagacacaccagagacagctggcccgtcagctggaaggggaacagtggtctcagggtgatgccacgagatccttctcctgtagtactgccaaatggatttgccttaagcagcctccctaccctctgcctggcgcagcaacatgtcttgtccagatgcagatggttttgttcctgatggaaacgtctgggagacgtggaagactaagacactgacgtcagtctcagcctcttctgcaggactggctgggccatgtagaggtctgcgtcatctaaagcacacgtggccttttaccgtgatgctcctgtggtacctgcagcttccgaggggaacttctgtggggtccagagggggagaagggatgaagggaaagatcaagaactccagcactcacggctacgtttgatttgctgagtcatcttagttactgagtcaggtgtgatggttcttgctaagatgggcatccccctgctgcaggcttcctgtgcccagagattcggaagaatgcggtaagcccgtccttcccagggtggaggtggaggagggctccggctccgtggagacaaagccagggtctcctcagtcagaaccttctaccccaggaaggctctgagaattcctggcctggcctgaaattcccactctttgccttctaaaatccagacctagcttccacatttcacgtccaggacaggctacagttgttaagctgggatttttgtggtgaattctgtttcaaaaggggcagagatgtaactatgtgtagaattgggatcaactgtcaggatgagtgtgtgtgtgtgtgtgtgtgtgtgtgtgtgtgtgtgtgtgtacaggtggactattccatttttgctcatgtgtatgtctgtgtgtatacaggtggaccattccactttttgctcatgtatgtctgtgtgtatacaggtggaccattccactttttgctcatgtatgtctgtgtgtatacaggtggactattccactttttagctcctattgatgcaccaaaagcaagtgcctcatttctgtgccaaatgtttgccttggtctttaaggacctccttcgtggacactctgatgtgcctgttagagggaatgtgccaccattccctagaggccccatgtcttccacagaggcttctagtgttccagttactcatatgcagctaaactccagatgggggcaggggtggggctgaagtttgtgctctaagaagtatcacatcctatgattataagtttatatgcagatgtggcccagagatcacagccccgcactcttttcctcccgctggaggggggtgggggtggggggagagggcctaattagaaatcagctgggctctgctgaagcccagctttccggtgaattgaatgccacaaaggttggcatggaatgcatccaagaagccacacgaatgtgctttcaaaactgaccggtgaggtatgatttttactcaagataaaagtagtcaagggtatcaatggatctgatctgaggaaacacaggaagacagctctacaactgtctacaacagctggtagggcaaggctctgtcttctgtgtgtgacgcgtgtattgaacagaacaagaacagtatcatagactataccgtgtgctcagaaacactgcgaaaggagtattgcccaggcttttgctacaaggccatcggttgggcacaagttagtacattattctatgagtaaattcaatgatgtcccaccacttccaatagatagccagggtcccattaaccttctcattaacggtcttatagtttccagtgttgggctgtatccatgttaaaagccacactgcatttatcttcagtgtcaaagacattgtaatgccgccatatctgtcttatctattagcgcagttttcactattctatattgtaaagaatatatatccagtatgtaaatgagtgttctataaaccttttgtataggcatttcctctgctctttaaatatcagccttattcagagtataataaaaattatgaccttggtaagtctaat

SEQ ID NO: 2659 - protein, 1433 aa, Mus musculus
PGEFTTCPHNFKKKDFKKPRVCGVCRQTIDGQGIACRACKYSYHKRCEAQVVTPCSVQVHLDQAPESPTPAVLRCDKPSRTVVLSPAMEDSHELDLTYVTERIIAVSFPASCSEESYLHSLQEVTRMLKCKHGDNYLVLNLSEKRYDLTKLNPKIMDVGWPELHAPPLDKMCTICKAQESWLNNDPQHVVVIHCRFLSGLLSGAMKMNTSPLFLHFVIMHGVPSFDTGGACRPFLKLYQAMQPVYTSGIYNVGSENPSRIRIAIEPAQLLKGDIMVKCYHKKFRSATRDVIFRLQFHTGAVQGYGLLFGKEELDSACKDDRFPDYGKIELVFSATPEKIQGSEHKDQGVTVDYNTADPLIRWDSYENMSADGEVLHTQGPVDGSLYAKVRKKSASDTGIPSSPQGMPATSSPDHGDHTLSVSSDSGHSTASARTDKTEERLTPGARRGLSPQEKAELDQLLSGFGLEDSASSHKDMTDMRSKYSGTRHVVPAQVHVNGDAALKDRETDILDDEMPHHDLHSVDSLGTLSSSEGPQSTHLGPFTCLKSSQNSLLSDGFGNGVAEDHNGVLSPDLGLGVDTLYDRERMCGGREQKPLQPLLRKPSAPTPVQAYGQSNYSTQTWVRQQQMVAAHQYSFASDGEARLGSRSTVDNTGLAQPPPHIPVTPNRGASSRVAVQRGISNGPNPPDTQQLCPGKALQPRFQDDRVTNGVHQEPNTGSSPGSPTLDIDQSIEQLNRLILDPTFEPIPTHLNALGISAVCPDGVGSGLRCSGRLDSVDGPGRSPGRQGDDPIGGRLRKLSIGQYDNDAASQVTFSKCGWGKAGVDPAPSLGSFSSPEDIKETVITAYPSDLNMIDGRIPNSKESSMCLTPAFPVSPETPYGKKEEKLAGYNLVLQDGGVTVSFVVLFCPVKTSPRYPPFSPPEPQLSSPASLHKGREPRGCPEIISHTVGMSESPVGPKPTMLRADMPATPNFQQVFASSCTVSSNGPGQRRESPPSAERQWVESSPKSTLTLLGNSHPSESPLGTHEFCSSGKDSPGLPCFQSSELQASFHSHELSMSEPQGALPPAGSQTFLGFNTVTTATSVLPPGEDAGTLLVNSHGTSPAPGTPLLTTGAADNGFLPHNFLTVSPGASSHHSPGLQNQNVSLPGQPPLPEKKRASEGDRSLGSVSPSSSGFSSPHSGSTMSIPFPNVLPDFCKPSEVDLPDSPNDKLVIVKFVQDTSKFWYKADISREQAIAMLKDKAPGSFIVRDSHSFRGAYGLAMKVATPPPSVLHLNKKGSLTALVCQHSITPLALPCKLLIPERDPLEEIAENSPQTAANSAAELLKQGAACNVWYLNSVEMESLTGHQAVQKALSMTLVQEPPPVSTVVHFKVSAQGITLTDNQRKVFGFVARKQGSATDNVCHLFAEHDPEQPASAIVNFVSKVMIGSPKKI

SEQ ID NO: 2660 - DNA, 327028 bp, Homo sapiens
cttgcggagcaggggcccaggctggttagggcagccagagctgtgatctcagagcacgcagtgcagctgaggaattccgcagatcagaacgctttccttcaaacccttgggaatatgcccagctaaattcttgaactagtttaaaaatctgcagatttttgtttcccaatgaaaaacagtctttaactacaaaagaggctcaggttaataatgctccaagatagcaaggcactccccttaaatatgtacattttcctttctcatgcagtaagtacaaaacctggaggctttttttttgtttgttttttagcacattcctggacccagccctggaatttagaggatctgggctcaggaatctgaatgtttaaccgccccctcctccaatgtgattttcatgatcagtcaggtttggaataaacacctcgggcagattttttggcttcgggcggagctagggaggagatgaagccaacttcggtagcttgctttgctgctgtcttctcttgacagcccctaattcagtggtcattatgtttaggggataagctgcccctggggtagcactgagggtgagatagtcatagtggctacatttgcacgaactgctcgacacagttctaaatggatcatagaacatgtacttagtgttcacagcagcctgctaggattggttctggtatcatctccatttttcacagaagaagaaactgaggcacagtttctctgaggcacagagaaattaatgaacttgccaaagccacacagtaaacacgcgttctggcattttatgttatttttatttatttactttagagatagggtctcactgtgctgcccaggctggagtgtaatggcatggtcatggctcgctgcagtctcgaacgcctggtctgaagctgtcctcccacctcagcctcctgagtagctgggaccacaggtgagcaccaccatgcctagctattttgcctactcacatactaattattgttcatgtgcaatacccaagtcacatatcaacgtcatcatagcttgtttctctttgtttcatagattgctttgtccaaattatcttcttgttcattgaaaccctttacagtgagggagatggggattactttcttgttttttgttttgttttgttttgttttgagacggagttttgctcttgttgcccaggctgcattgcaatgggacaattttagctcaccgcaacctccacctcccgggttcaagcgattctcctgcctctggcttccgagtagctgggattacaggcacgcgtcaccacaccaggctaattttgtatttttagtagagacgagctttctccatgttggtcaggctggtctcaaactcctgacctcaggtgatccgcctggctcggcctcccaaagtgctgcgattacaggcgtgagccaccgcctctggccggcattattttcttttctctttttctttcttttttttttttttttgagacagagttttgctcttgttgcccaggcttcagtgaaatggcgtgatttcagctcactgcaacctctgcctcccaggttcaagcgattctcatgcctcagcctcctgagtagctggggttacaggcatgcaccaccatgcccggctaatttttgtgtttttagtagagacagggtttcaccatgttggtcaggctggtcttgacctcctgacctcatgatccaccggcttcggcctcctgaagtgctaggattacaggtgtgagccactgcgcccagccctgagaaatagttcttctaattgtcatccagttttcatctgagtcctgttgttctttggatatgtgtcctaagagagagaaagaagaagagggaaggtgagaaagggatagggagagaaggattgagaaagggggagagacagtgaggggcagggggagagaaggagaaaggagagacaggaagaaagataaaggggagagagaaaattatgccactgtaatctaaagagagaggaagagagagagagtgagagagagagagatgacagagggaaggggggagaagaagggaagatggaagaaagaaagaagtgagagagagagaaagaaagagagagaccataagagagaagaggaaagaaaaggagaaaaagagaaggagaggcagaaaggaagaaaaggcagggtcagggagagaaagaaggggagagaagaggagagagagaggggaggaaggagggagggagggagagggagtgcctgctcacacaggtgtctcatgccacttccactctggctgtcttcctgctgtcagattcttagctgctcattgctcccccacaggctgtgccagcaacgtcccaggcccaagtatgggagtgagcaggatgctgacctaagaacatcgccacagagctttcttctccaagtctagacacagcagagaacattctggaatcctacccaggaaaccagaagcagactcttgctattttttttttttttgagatggagtctcactctgtcacccaggctggagtgcagtgtcgtgatctccggtcactgcaacctccgtctcccaggttgaagcaattcttctgcctcagcctcccaagtagctgggattacaggcatgagccaccacgcccggctaacttttgtatttttagtagagacagggtttcaccatattggtcaggctggtctcaaactcctgacctcaggtgatccacctgcctcagcctcccaaagtgctgggattacaggtgtgagccactgtgcccggcctgggtcttggtagtttctttttttttccttttttttttttttgagacggagtctcactctgtcgcctaggctggagtgcagtggcacaatctcggctcactgcaacctccgcctcccgggttcaagcgattctcctgtcacctgattagctgtaactgcaggtgtctgccaccactcccagctaatttgtgtatttttagtagagacggggtttcaccatagtggccaggctggtctcgaactcctgacctcaggagacccacctgcttcagcctcccaagtgctgggattacaggcgtgagccaccgcacccagccgctagtttcttttgatggcacttggggaataaaatctgggtgtatctaagtgataatgtttactttgattcaaggagtgttttttagttcctggtgcgtatgaggaaaactgacacaacggcagcactgagggaagtttagttaatgactgtggtgcctgcagtggcatcagaagaggacctgagcatatggggccaggcactgtggagacttgtgcatgggggcgggtgggcagtcactggactttcccctcctaggttcatttccttgtagaaaatgacatcatttttcagaaaactagacaactgtagtcttaatttttagaaactggtatgttgtgcaaaggacatacagcatgaaaggtaggaaggggtgttgtggagatgaaaaccattcccaaaatttgtgcggctctgagtcagagccagtctagaccagaagattacactccattgaggtgatggggggcagccaggcaggctcctagcagaaacctggtggatgagctggaggttttcttttcttttttgagacggagtttcactcttgttgcccaggctggagtgcaatggcacgatctcagctcactgcaacctccacctcctgggtttaagcaattttcctgtctcagcctcccgagtagctgggattacaggcacctgccaccatgcccagataatttttttgtatttttagtagagacggggtctcaccgtgtaggccaggctggtcttgaattcctgacctcaggcgatccacctgccttggcctcccaaagtgctgggattacagtcatgagccaccacgcctggccaagttggaagttttctagaataagcggaaagaggcccttccaggcaaagcgacagagggagccagcagaactggcttttcccttatgtggggctcctagccgtcagtcaggtagctgcaaagggctttacgtttccagtggactgctgccaagtggacataaaacatttgaatagacattcccttctccaattcataattgtttttatttattaattattattattttatttgaggcggaatctcactctgttcaggctggagtgcagtggtgagatctcagctcaatacaacttctgcccctgggttcaagcaattctcatgcctcagtctcctgagtagctgggattacaggtgttcaccaccaggcccagttaatttttgtgtttgtagtagagacagggtttcaccatgttggccagactggtctcgaactcctgacctcaagtgatcctcctgcctcagcctcccaaagtgctgggactacaggcatgagccactgcgcccggcccacaaagcaaaaccacagagccctaagccaatgatctagctgctttggtctatatttctgtgagtacccctaaggcaccagaccctgtgggaccagcggtcactctcaggccagggcgcctctcaaggctggttgcactcactcccctctccagccaatctccaaggcccgcccaggctgacggcacctcccaaacagccgtggtttgccaagttctccttatgcctcaggcactgtgctaagagcttcaggagggcaatctcgcccagttctcataaagtccatgtggctttagttttaataccctcattttacaggttagaaaactgaggcttgcagaggtgtttgtgatgcagctccaggattcttactaaaatctacctgaatttaaaggatccaagtttagccattccaccatctggccccctcctgcatgtttctccagcctaagctcttggcagcctcctgtgggctctctctcaccacctgtctttgtcccctctggccatctccttgcattgcctggcacaggctcaagcactgccccctcgcaccgacaccaagctcttacagggcttcccgctttgcacctgcagcctgcccctcctccacccacatggctccaggaaggtctgcctggcagactcctgattctcaggcagcccctgcagagagccctccccaggctccctctcctgttcccttatagctattgggagacatctgtcatgatgtcatcagagtatcactgctttccaagaaaggccttcctactgggcaaagaatgggctgatttctaccaagctgagtgatccccatcattggagtcagtcaagcatgtgttaggggtagtgaaggggccattgactgaaggttcttgcagtcggaaaaatctggaatctcagatccaaccagagtaaccaatgttgacttcattcaggctctgtttttttactgcagtgatcctagaagcagagggccatggggctggcacagggcacgaagtccctgtaggtatgttaagaagaagagcatgggccgggcgcggtggctcatgcctgtaatcccagcactttgggaggccgaggtgggcagatcacctaaagttgggaattcaagaccagtctgaccaacatggagaaaccccgtctctactgaaaatacaaaaattagccgggcgtggtggcacatgcctgtaatcctagctactcaggaggatgaggcaggagaattgcttgaacctgggaggcggagattgtggtgagccaagattgcgccattgcactccagcctgggcaacaagagcaaaactctgtctacaaaaaaaaaaaaaaaaaagaagaagaagaagaagaaaaagaaactgaatctgcatccatgcagtgggcatccacaaagtgggctcccagggtccatgtttgtagaagttggtgtgcaggtgcagtttttggaaacaaggtgctgtattagggttctccagagaaacagatccaatagggcatatgcagatctatagaagaaatttaattaattaattaattcatttatttttgagacagagtctcactctgtcgcccaggctggagtgcagtggcgcattctcggctcactgcaagctccacctcccgggttcacgccattctcttgcctcagcctcccgagtagctgggactacaggcgcctgccaccacgcctggctaattttttttttgttttgtattttttagtagagacagggttttaccgtgttagccaggatggtctcgatctcctgacctcgtgatctgcccgcctcggcctcccaaattgctgggattacaggcgtgagccactgcacctggcctagaagaaatttattataggaattggctcacacaattatggctcacacaactatgtctgcaaactgaagacccaggaaagttggtggtgtaattgccagtctgagtccaaaggcctgaaaaccaggagcactgatatttgagggcaagagaaaatgaatgttccagctcaagaaggaagaggaagaactcaccctttttctgcctttttgttctacttgggcccttgaaggactggatggtgcccacccacactggtgaggatggatttgctttactcagtctacccattcaaacgctaagctcttccagaaacacgctacccacacacccagaaatcacattttaccagctatctgggcaacccttagcccaatcaagttgacatctgacatgagccatcacaaacaccaaggttatgtaaattccgaaaaggttctgagacacggaaaagctcaggtgcctctagccaggcctggcaactgtaaagcccactttgttgagctgtaggtgaggattcgtgtgtttgggaagagaaaaaggaagagaggaaagggccaggtgttctagtaagagtctcaagggacttagtatctttttttttttttttttgagacagagtcttgctctgtcacccagactgcagtgcagtggtgcgatctcagctcactgcaacctccgcctcctgggttcaagcgattctcctgtctcagcctcctgagtagctgaaactacaggtgcgtgccaccactcccagctaatttttgtatttttagtagagacggggtttcaccatattggccaggatggtctcgatctcttgaccttgtgatctgccctcctcggcctcccaaagtgctgggattataggtgtgagccactgcgcccggccgagactcagtatcttaaggcaaaacacaggcatttgctcatgttccaactccacagttctctgaatgcgctgtagagctttgtaactccatcctgtgtaatgtttcctgctgtctctttcagttggtctttgggaaatattttcagtgacagaaagtaagaaataaggaaaaatatccaagtccttgctcatatacctcccttgatctagggatacaaattcagatttttgcggtggcaaagacaatcttcattgcaatgacaagcttccaacacatcttctaaaactcctacaggggaggagcaagaatgagtctgcaaagaagggctcagggaggaaggagattggcgggagtttcttgcccagactcccctgccctctgcttggcatactaggagggagaggccactcttggcatattgctgctttttttttttttcagctaaatgttggagacttttgttttcaaagttgagttttttttggatggctaaggatggaaaaaatgcacattccctttttcagatactggttcatgccctgtttttgtttaatttcttggaaacttgaagttgcagcctgcgaagtggggaggccctgggctggggaagcgaagctctggaaggggcccaggtcccgattggggatccagagaggcttcccttcatgtgcctctagacgaggtgtggggaacccggggaacagccatcccagccaacacagagtgcgtggggatactggagcccggtttttcttctcctttcttgggacactgccagggaatataaccacagacactgcacgaatgagcacccaagtcacagtttttctagaaacaaaggtgtggttggggcatcccattccattgctaccccaacaagggcagtgtggccggtggggccatctggcttgggtgtgggtagcagtttggagagattttagaagaggctccctgacaaagggtcagagaaccccagcactgcactgagttttcctgactgtgagctctcagacaaacaacagtgtcacctcctgtaaatgggtgccctaacactgcaagaagctcaaattcatgttgtcattcagccaacatggtttttggcattatgatggtttctgtgatgcacagaatagcacgtaattggctctgggtgtgaagatcaccacggtcttaatggaagagagggttgagcaaagtgatgatttagtccaattgcacagagtggatggtgtgggcaggcagctgggaagaagttaagagtagcctcaaggccagatagtcctgatccctcccactttcttcgcctgaccaggtgggtgaccttgaacaagttgcctagaatgtcagatcctgtttccttatcaggacaaaggagatcgtaacagtaccagcctcacccccattcctaacccagctggctgtgacctcctccccaccttcccctatggcatcttccctggcaccccttgactcatctcattgactcttgacctggtgtctcctagagtgtaggaaaaatgcctgcctcatctctaggggctggggcatggtgctcatgaagcctttgcctgggaataaatacccagatcagtctggggatgagaaatgacactaccttccagagcacagcaggggttgttcaagtcttccagaaaagcagctcttgtttctcctcatgtggtgggagtggagtcagagcgtggctcaggccccacattctcagctgtttggatctggggactcgaagtttctggtggttacttctgaaagtcttttccaggataattattcttgctcggtttctctgccatctctgacaggctgttttccctgcttcccccgctgccctgaaggggccagaggaacagggcaggaccccagggctgcggatgggttaggcagctctgttcccgaatccaaagcagttcttggtgactgtcctccaagacttgccctggaccctgctccgggtgggattctgagaccgcctgctccacgtggcagatgaaatctaggtctcttctgtgagaggctggcggggaggatgttttcctggaaaggaccacaggacaaaccgctgatgaaatttctcttgtgacctccctggaggaagagcacttctgatttctgcaaactttttccattcccccgatctcacaaatggggaaactgaggctaagcgactgagttcagggccatctgaatctcagggatggacagtcaggatggacaacctataggcctttcctcctctgagaatctctctgctcgggatcgtttttctggtttcccctggcttgcctaaattctgctcatttgtcccggcgcattttaagaagtcatgtgacttctaaagacttccctgacctcctcccttcattagctgggtatttcaggggcttctacggcaccctaggctttccggagcggctgtgctcctttatgtatgcgcgactcccactaggctatgagctacaggagggagggtaggtcttgctcccggagagcaccttaatcacaggcgctgaatgaaagaatgaactggttgtgcaggaaccaggatccgaacccgcctccccaggtactctaacaccggcccggcggaacctgcaagcctccagaccacttggagcctgggctgctcaatgggtctgataattccaggtcctctctgcggccagcgaagggaggtcccagggcgcacctcggcagggcgggggaccccggtgaagggcgcctggaggcgcgctgcattgttagggtgatgaggccaggtgacccgccaggctcggggcgcgggcgcgggggccggccgtggcgattgcccgcgccgcctcgagggggccctgccgcgggcgccggcagccagccaggaggacgggcccgcccgcgcgctactcggagcccagcctcgttgcggccatcgccctgccggaccgcgcctcaggctcccccaggtactggggccggggaaggaggaaacgcggccacgcgccgcggtcctctttgtttcgggcccggcgcgggctttcgcgctccgggcgcaggaacgaggcttggggagcacagagatctggagctggggcgcggggactgagttcggggagcgcggagacagagttcggggagcgcggggtacgggagctcagggcgcggggatggggtcacgggagaacccaggttagggagcgcggggacccggttgggggcgcacgggcaaggggtttggtgcgcgcgggtacggggtttgcggcgcgtggggggcgggggctcggcaggagtcccaggacaggggctggggcgcgggccagcttcgccggagtccggggacgggggcgctgactggctgggtttggggactggctggggcgcaggaccactcgagtgggacccgtggcgcccgggcgccctggactgagggcagagaccggagcagctatgtcgcagtcgctgtcgggaccgagcggactttgctccctaggactccgtctcgagactccaggtggagagcgcagctaggggcttcaatgggcaggctcaagacccttctcctactttttctaggcaagctctccagtgcgtctctttccctttccctttggtgggtgggaggcagggggtctttacgcgcttcctttttttccctgaaggacgggacctcggggtggggggatattctggggtggggggtgctgtcccaggctgggggccagctgtgtggcatgtgcctcctggcacgcgggagctgtcgctgacaagcaggaggagggagggtcccggacggcccaggggtctcagtgtcggtgctgtgcagcggcctgacatgtgagtcccgggtcctttgcttggagtgatttgagtgtctgtggcgggaagagattcaggcgttcctcaggcattctccagacagtgtcagcagatgacccgaactccagcgtggttgaaaaactcaaagcgccatcagggtgtggggccagcagagagcactactgagggtggtcacaaccccctgggaagcccccaggcttccttggggcgcattcacacactttgatcttccgggttggctttccccccatttttttcactatttgaatgcatgatcatggaggactctgaaaatatactgaaaagtatgaatgcagaactcattgtattaatattgcatggcccttctgaactaaccaaccctttgacattttagattttcttgaggctttggtctgtgcatattaattttttaaattgctttcatgctttcccttttgaatgaggtttacttgttctggtgattctggttcttctctctttggggcctgtgaggttatatttgcaaatcaatcaacaagtattaagaaaggcttttctgtgctgaggccttgagggccagggagggggtggggagtcgctgcagctggagggtggaggggcaaggccattacacagagatggaggtgcactgggtcctggtgggggtgtggtagcacagggggtggggggtgtgtacacagggaattgacaggaggaactggcagcaagcccgactcctgaccttaggaatagtaatggtgaccccgaagacaaagtaacaggcataccgattgagtgtttgcctgtgctaaatgctttgcatgcattcatttcatttcacccaaattacattccttggagggagttgggattatgattaccccattttacagacgagtaaactgaggcaaaggaaggctaagtaacttggccgagatgaaatgaaacatggtggtagtgcagcctgggattctgggacaggactctagggtcccagacccctgttcctggctgctgctgcgcgtctgtcgactgaattctaatgcatgtccagacagcgattcctcagctgaggctgccatagctatcagcagctcagctgaattatgtctttaaaaaactaccaagatagaaaaactagtagccccagggcactacttattcctgaatgcaaattgattttttttttttttaacaaagtgtctctttggcacctaatgttttgaaagtgagctgtttgcaaatgtgactctggaaataaagggcaggagagggggtgtcaaagtatgctcttccactgcaggaggtgttgctgaaggggatagcagagacctgaggaggaggcagtatggcaagaacagtgagtggaagggctgacctaccatttggcagtcgcagcttatatctgcttaggactctacacaaggacccattttacagatgagtaaaataccaagtaaattcttaaagtctgggaacagttagggatctgaatgagcccagttctctgactctgtgtgccccattcctttcttaagatcagcctgttgtaaaccacccctgttcaggggaagcctcttgttccctccctgtgtccctgtgtatgaacttgagagggggaggaactttccaccttcctgagggcagaaagcattgtttagatccctgccacttactaggaagccagagacatttgctgagtgcctcagcagcacgcttagaattgaggcttcgaggcttcctcacagcggcccccatagatttcccagggaggggcctcctgtcttgcgggttgatctggtgggtttgccccatgcagcaggagctatcatgggaagggtgggtctgggcgtctgaagctctccaggaggtcagctgaccctgggaccccgggtccttcctgtaggaccccagaaatcactggggaatcagctaacccctgcaagctgtgcctggaatgacctagagccagtcctgtctacctagaatcctctgctgctatccttgttgatctagaatgagggatgctggttagttggttaattaagtaggtggttgattaacttagttactctcttcctcacagcaagagtattaaaaaccatcacaacatggaacacagttctttctttctgcccccacagtgaagggcgtgttgcgtggcttcatcttcacagggatcatggctcacagttgtgtcgtttccacgctgcctcactgctcctaaaacgctgagacaagaaaaatcgctgccaccaaaatgctgctgagcaggactaaattctcctagattgagggcgttttgaatcttagagtatgttgaatccggatgcaggcccgtgtcctgccgtggggcttttcgagtgcagctcgggcaggaacagtggtttccttgatgtctatccgtttctcgtaaaagcagaaaactagactctccaagtttcgtgagctttctgtttgtactctgtgactcaggaatgtgtttggtacacatccatcactgcaatgtgggatgtagtgctgagctcagggtccctcgggtgtctccattgtctgcatggcggcatctcctgtcctgctcagtgtactccaggagcaccgtggccctctagacacacctctaaccaccgcccccccccaaccccctgccccatgcacctggcgcagctctacctggtatccctcacctgttgcctcctaccctcgctgggagttgcctctgcgaaacaggagggaggaggccagtgaaaatgagggtgactgaggatgggggccatcaacttggggatgaagcactgcacacaatttagggtccctcggaatgcctcactgtgtcagggaaggggaggattctcacatgcttctttttatttttttatttttatttttttgagatggagtcttgctggagtccaggctggagtccagtcgggccatctcagctcactgcaatctctgcctcctgggttcaagcaattctgcctcagcctcccaagtagctgggattacaggcgcataccaccatgcccagctaatttttgtatttttagtagagatggggtttcaccttgttggctaggctggtctcgaactcctgacctcaggtgatccacctgcctcggcctcccaaagcgtggggttacaggcgtgagccactgtgcccggccgatttttttttttttttagaaggcagtagtctactactcttttgtctcctgggcaaaatgaatgaaagattatactgaaggattctatgtctgtgatctagaaaattccctctggcagagggaggtgctcccagagctagggaagtgctcctcagagccacccctcaggggagagacctctctgtccctgtctccaccccagcgctgggcaggaagccctgggagccctctgcaaacagcccgccagctctcagcctaataacgcggctaacaagacccccttccttttactactcaagtatccaaggtggcttgggcactttctgtccctagtctgatcgttgctgaaccgtgcatgtatgccatcctgatggtctcccttttctggaagagagcgctgagacttagcgagctcaagtaacttgtgtgtgttgtgaggatactgagccttggatctgaatcccggtccgtcagcaatgcttggagttcttgccaagatgaggggtttgtgcagtccccacccacagcccagcccctggagtggccaggccaaggctcaggagctgcggcgtgcctgctgtctacctcaaccagtgcgccagccccagctgcttcctcggaccccaaggctgggcctttctttactcttccttcctccctcagctctaattatggttcatgttagattgtctgcccttcctcttcctcttctcttttggggaaagataatagcacttaatacgccctttgcaggcctggctttgtttctaagatatcagaagaatctttaggaatctttcttccagctgcccaagcgagcggcaacctgtcggcacccaggaaggatgaatacgggtgccctgctgacgattacaagtgccactcctagccaggccatgcccctggggacaccggggacacctccaggtggactaaagtgtgtcacctcctttcattgtgtcttggcagccacagtgtgacgtggcacctcttgtgtgtagagtttatgaaactgctcctgaaaagtagagaccaattcgttgatgctttgaatacactggaatacactcgtggcgatactgaaagaaagaaagtcctcgggaagtgtctggccaaggccgttcactgccgtctgcagttgcttttctttttacaggagagcccgggctctgctccaggccctgggattatttctcgctggaggattcaggaatctgcgctctccccatcaccctggaacacagctgcagtgtgtaacatttcactcacttggagccacacaataaaaggcacaggcccacatctggctgtgcagggcaggcgggcaggagagtgggccctggggcacactgggccattagcaggggcatctgcgtcctggcctgtgcacattcctccctggagcgccgggctggctctgcaaacaaaggggcctggtcctggcattcttctccaccttgtaatccatcacctttcttagaggtgtccctgggcgcctacccctttcatcactggccatttgggaggtagatcaaaggtacgcacaggaggcagtgacataggccaggctctggcatcccacaaacctggggcagaactgtcctttgtcctgagaggtcctggggttattgtgactgtgtttgtcatttgtcacctgcagcctggggttgtcgttcctccacaggtttgctcctccactggttccggagctcaggggtgggagccacgtggggttttgtttcctccttttgggctccaggcccagtgtactttggtcctgctgaatttccatggccccaggggcctgaaaagcaccttgtggtccttctggagaaccacttcctcattcttggaggtgctaatctgatccactgggagggagctgtgtgctaagtggttgacacaggggaggccagcgtgatagagatgagtttttctccaaagatcaaggacaggtgtttccagtttgtctcctctggaaagacctgcagagccgggtggacagggctggaggaaagggggcctgtgtccatgtcttgggtaggtgctaagggagacaggagggctctacgtgggtgaagaatgcatttctctcttgtcctgcacgcaggagggaggcacattttttatctgtattactcggagagtagcagaagactctcaagtaatgagcatatttttgctgctttttttttttttttttttttttgaggcagagtctcactctgtcacccaggctggagtgtagtggtacaatctcagcttactgcaagatctgcctcccgggttcacgccattctcctgcctcagcctcccaagtagctgggactacaggcgcctgccactacgcctggctgcccggctaattttttgtatttttagtagagacggggtttcaccatgttagccagaatggtctcgatctcctgacctcatgatccgccctcctcggcctcccaaagtgctgggattacaggcgtgagccaccgcgcccggccgtatctttgcttcttaatttgctttttgactatttttctacaaaatagttttcttgtaatatgtgctcattgtagacttggaaaagatagagaaatgctaaggaaaaaggaaaaaattccttctaatatcacctccacagaggttcatattttagccttcttgtgtgccatatgttttctgtgcttttttaatttaccaagctgagatcataccatatgtattattttgtatcctgcattttaaagtcaatgtggcagtataagcatttcccaatccagaaatagctctgcataaatatgactgctgatgacagtatagtactccagtatgtggatgtaccatgatatttggacttcactatttgttcattgatcatttacatcctgtgttatgcttgcacataggtctttgggcagatcgtagctagtcatgctcttgaaaggatttctagcagactctttggcatcaaagaatacaaacatctttttttttaagctttggtaaaacatgcataacatgaactttgtcgttttaatcatgtttaactgcggcagttaggcgacattaagaaccttcacgttgtgcaaccatcaccaccctccagctccagaactctttccattttgcagaactgaaactcggtgtcccttaagcactaactccccatgttcccctccccccagtccctggcaaccaccattctactttctgtccctgtgaaacggactacatcgggtgcctcatacaagtggaatcatacagtatttgtattttttgtgatttgtttatttcacttagaatactgtactcaaggtttcatccatgttgtagcatgtgtcacgatttctctctttttaaggctgaataataccgtgtgtgtgggggtgtgtgtgtgtgtgtgtgtgtgtgtctgtatgaatagcacattttgtttatccattcatctgttgatacacttcagttacttctacccttcggctgttgtgaataatgctgctatggacatgggtgtataagtccctgctttccattttttttttggtgaacacaagctttttggaactccttagtatatatggtcaaattgcagttgagacatagggtgctggctggattctcacggtgtccacccgctgtccttaaacatggctaggttatcacccccagggtaaaaaccaggcctgcaggaaaaggaagagggagacttcttaccaagctattttgacagattgtgtaaactctgtgattaatgggatgagaaagcaggaagaatgtctttcatttaaaaaaaaaagagccttcggggttgcttggttttattttcaattaaaagggtctgattttgtttctggagaatggttttaatttggataaatggttcagtctgggaaccacatgccagagcctatgatctatgagtgcaattactcagggtttcctcggctgcttttctgagggaacggtccagaactgggctcgctctggtttggctctgttaaaacgtcgatgcaggccctgggcagttggagtgaggcggttcttgtgatcagtccttgaagtgcagccataatgccctccccataatgccttccccaactgatggtggttaatttttaccctctaagaatgtgttcacaattccaaatcaggaatgtcaacagcaggctgtcgttttcccctccttggaacatgttgaaccagaattactggcatcttttccaacgtgggcatttgcagaattggtgggatttgggggctcaaggaggaggcagactcatcctgatgtttctcctctggattacttgaggtccctggccgggcaggcctgcaggcccagagacggggtggtgggttgctctatctggagtcaactggtgtttctttccaagaggatgctgggctgggggaggtgagggactaaatcctgggcgactttgcagaaggacccgtcgcgatggaggggcagcgtgggcagaggccctgggcagggccacctgctgtgttctggagtagcaaaggggatttgcagaaggcaaagaagaatacaaagacacaaggtagggtgtttcaccctttcggagaactgtggcaaagccctggacaactttccatggcgcttgtagatttgagaccaatgccccagcgacctagcgggctggtgggaggcagcgtggagggcggcagggtgtccccagggtgggaggtggagagagtctgcacagaaatttccaagagcacagcccataagggaagaataggcttgctcgtgaggtgggtgaaggcattgccctgctggcttgtatcagggcgttggctcctgggtcctcaacaaagggcatattagcataatgaatagttaagttacttggttgggcttcagtccttggggccgtggtctctttccgagggaaggactggtgggtgggccccacctctggagatccagcctgcattgggaccacgtggtttgagaaatgttttcccaagcctgggccacacgtgacccttgatttctggggcagccctggtggcaactccccacatatccctgtgaggcctttctcattttccactggcaaggattcaggtgtaaccagattattctgatgaaaaatttgagtgagacaggtaacccgcaacacacagagttgctatgttttgctcttttttttttttttgagacggagtctcgttctgtcgcccaggcacgatctcagctcactgcaacctccccatcccgggttcaaataattcttctgcctcagcctccatagctgggactacagacgtgtgccaccacgccccgctaatttttgtatttttagtagagacagtgtttcaccatgttggccaggctggtctcgaactcctgacctcaggcgatctgcccgcctcggcctcccaaagtgctgggattacaggccttagccactgcacccgatcatgtgttgctctttaactccccacccccacctccattaaataggaataatccaaaacataggtcatcgagagcatactgtgcttttaaggcattttgcttattattagtagagattttgcgacaactggaatggtgtttattcactttttaaaggctcactcttctcacaggataacagaacacacgatcattcattttcctcttcccacgaaggtgtttgcagcagtgggcgtgagaagcatagtgtgtgtgtgactaccgcgcgaatggttctcccaaacctggatcccgacctaggcgttgccgttgccggtctctgggtgtcaccctcccatttatgactgtagtgacttctcagaacgccctggagggatggccttactccaaatggtccctcggctgccgggctatttgtgagtaaaagatgtttgtcagtgctgcttcttttagaacatgcccattccacatcagctcagcttgtcgggtgtctggttgtctgtgcggagcccatggggaggtctctgcagcctcacacctagcagtgaggtggcccctctgcgtggtcatgccctgcggagttgcattcctctccctgatggctggctgccaggacctgtgggccctggcggtgagaggagtgggaggtgctgtggctcctgccaggctagctcttcacagactgggttagttcttccaaagcatagttccctgggacaccacgcacggggcaagcacagctgtgtggccagcggcatgctgacagggctagacacgcactgggccgcttaatgccgaccttggcctgtgagtctgtgaccaggactcttggtgagcggccagctgggggctgttggtgctgagttcagctttgtagccaaaaaggttccagctgatttccagacagacccggcttccgttttcaatgccaagatgagctgggcgaatgagtgggagcggacagaggcttttggccgactgtgatcgctattgtctggagtccccttgaccctctggaggtactgcctctcctttcatttgtacacaccggtttttctgcacggtttcgcctcttgtcagctctgtgagccgggacaccagcttttccgtttcccatactgccagatggctttgagcaaacaagaggaaggccccagcgtgggtgcagcctgtggctgcgttgtcctgcctgtttaccctgggggtgaagcggaaagggagcaggctttgcaggaacccaggtggcaccccttctcgtccctgccacttgttctctttgtggccctgggatggtccccaaacttctctgaagtggtgctgaaaactgtgttgatagcacggacctcactgagctgttaggagtagctgtcgacactgtgtacccgaggttctttccagtggaaaccaggttagccttcgattccttttctttcatctgtggttggtcacccttttgagagctctgaccccaaaagaagtgtttttcagattggcccaagttcctccacgttgggccccccaagacagactgactgagaagggagtggagctgtgggcctcctgattccttcccaggctatgtcccttccagagtggtccaggtgggacgctgactaccagaggcctggccctctgttctgaggcccagttagccatggccttcatctgctcacattctgtgggattgggttgtgtaattttcgttgtatctctctgtcctcattaaatctgaattcctccaaggacaagaaggctgctgctgcttaaaaaaaaaaagaaagaaaaaaaatgataagagctttagaaggagcttagagttagctacgtgtacttgccaaggtgtgacatcactcagagcctccattccatcctctggacagccaggggctggcctcccaatccggtgctcactgggcacacttcactatgggaggggatagttacacatctagatgaaaacattctagaagtgattgcttacgaggagagagggaaatgccggcacattttcccaggcttttgttcatgtttttattagggccacaactttcattcttggagttttgctttgtaaattattcctttaacttgcagaagagaaccatttacaactcatcttacagacttgagaatctagcctactgatatttccttggaaaatagccacattgcaagttgttgtgttattgaaagttgatgacaaatgtccccaggagtccatgcaggtttcctgagaagagttgcacctacggagctgtgacttcagcacaaaagaatattctttctggacagagtgtgttgtggggtttgtttccttcaaatctgtactgccaaatggcaagaatcatttcctttttcttcctcggaaaatggattccagtcttgatgcagagccaccagcactgtgtaatcccttgtgtaatgtttatttatttattttttctttttattgagacggagtctcgctcttgtcgcccaggctggagtgcaatggagtgatcttggctcactgcaacctccgcctcctaggttcaagtgattctcctgcctcagcctcccaagtagttgggattataggcgcctgccaccacgcctggctaattttttatatttttagtagaggtggggtttcaccatgttggccaggctggtctggaactcttgacctcaggtgatccgcctgccttggcctaccaaagtgctgggattacaggcgtgagccaccacgcccgacctattctttttattgagacagagtcttgttctgtcacccaggctggagtgcagtggcaccatctcggctcactgcatcctccacctaccaggttcaagtgattctcctgcctcagcctcccaagtagctgggattacagatgaccatcaccacgcccagctaatttttgtatttttagtagagacgaggtttccccatgttggccaagctggtctcgaactcatgatctcaggtgatccacccaccttggcctcccaaagtgttaggattacagacgtgagccaccacgccccgtccctgtgtaatatgtatgtatgtgtgtttgtgatagaatctcactctgttgcccaggctggagtgcagtggcgccatcttggctcactggaacctccacctccctggttcgagcaattctcctgcctcagcctctcgagtagctgggattacaggcgcccatcaccacacctggctaattttttaaatttttagtagagacggggtttcatcatgttggccaggccggtctggaactcctgaccccaggtgatccaccctcctcggcctcccaaagtgctcggattacaggcgtgagccactgcgcctggacccttgtgtaatatttaaatgcaggttttgttcttataaagatgttgggcatccagcagacttgtcctgggaaaatgtctcctctcccgctttttgctttgtgctgagacccccagatcgtgttcacaaatactgcatcggggactgagtgcacgtaagacactagccaaattttggagagatgtttgggttcatataatacataggcttcgtgcctgaagcacatcaattctcagatgagcaactgctcagatccctgcctggaggaggagtgggtgtggtgatggcagccacgctgtgaatactgtgggctttgttcacagccacagtgaggaggagatagtgtgtcccggtacaagttatcgctctatcagcagatccatctgtccttcctcaaagaggctgcggcccacttcagggccattgtgtcaaacagttggcatttggccttggccctgggtaaaacacatggcagggtatcacgtgggtgccactcacgactcccccacatctgccggggtttccataacgcactgttctgtttgcagctgcacgaatgcgatatggcacagcagccgctcatagacctcaggcttgttgccatgcatagaagatgcacaccgcagagtggaggccgcaggcagggaagtaactggcatgaattattgactgtgtgtgaggccctgtgcggggagattcacttgttccttcctttattcattcattcactcactcattcctttcatgcagctcatgttcagtgagtgcctgctgtgtctcagatacatttaaccctcactaactctgtagaaactgaggctcagaaggtgaatgcagggcgaggtagcttgcccaccatctcagcttggacatggcagggcaaggggcttccgatcacgcctctcagacccagagtctgcttgtctccattctgcctgctccggagcccccagttcttccagctgcatctcgaaggtgaaggaagacgatcccgtggcctgctcaggactatgtgcctgctgctgtggcctggctcgcctctccctaccctctcctgcaggccccagggtcctctggagtccaaggcttagtgttttgaatcactggcctttcctttgagaaaaatggggctccctgtgccaacttttcaagagcttgatggcagggcagcctctcagagggtcttgggggagctcccagagtggagttttgccggggtgcctgtgggtacagacagcaaagtggaggcagcttagaaatcagcatgtcacattgggctggagaatcagccggatgcccgagcctcttgttttagggggcgactggcagaataagtcatgttaggcccagcttgttccttattactgatcgatgttacctacgagggatgtaccacagtttactcaaccactcaccagttgcaggacttccagttcatgaacatgatatatcttttcagttatttagattatctttcatttctttcattggcatctgtgtagtttggcatacaggtcctgtgtgtgtcttcagatttacacccaagtgtctcacttctttttttttttttttttttttgagaccgagtctcgctctgttgcccaggctggagtgcagtggcatgatctctgctcactggaagctccgtctcccagcttcactccattcgtctgcctcagcctcccaagtagctgagactacagatgccccctgccatgcccgactaattttttgtatttttagtagagacggggtttcaccgtgttagccaggatggtctcgatttcctgacctcgtgatccatctgcctcggccttccaaaatgctgggattacaggtgtgagccactgtgcctggcctcacgtcttaaagtgattgtgaatggccttgtatttttaattctgtgtctgtgtattcattactagtacatagaaatgcaattgacttttgtatgtttaccttgtatcctgtgagtttgcaaagttttgttttgtatattcctgggcatttcccatgtagataatcatgacatctgaaaatagggacaatgttatttcttcctggactttgccttgtagattgttgcacagtatgaatttgtacggttcttctctcctcattagattcaggataagcagtttttaaaaaatgattacatatgtgtgaggtacctctacttgcttgcctcacattaagagatggaatgtctttttttttttttttttttttttgagatggagtccggctttgtagcccaggctggagtgtagtggtgccatcttggctcactgcaacctccctccctgtttcaggtgattctcctgcctcagtagctgggactataggcacacacccaccacgtccagctgattttctgtattgttagtagagacggggtttcaccatgttggccaggctggtctcgaactcctgcactcaggtgatccacctgcctgggtgtccctaagtgctgggattacaggcatgagttaccgtgcccggccatgagatggaatgtctttttgtcctgctgttggcccgctaagtcagatcacttggttgagacccgattcccttcttacctttgatactgcctcctaacaactttcagccattttaacatacaaggatggcctttgcctgaatcagttattcccttaggagttatgcagtggtagttcttaactgtttttaagcactttagaaacactattgtcttgcacataatcagactgttacttagcaatcccttttgcttggggagcaagctcttcagagtaaaagggagagtagagggggagaaaatcgtatttactgtgttgattccataggcagtttgcaaatctgacaaaacaaacatgtgtgccttttctcaaaccctgactctgtaagagcaccctgagtacctttgggcagcacgctattgtaactgcagtggaaacgtgaatgtggctgccatcactgccaaatgatagatgcctgcccaggctcacctaccagccgggcagctgcttgggtggctctgttgaggagtccatgtttttggacgagtgctatcttaagtcagcagttctcacagtgaggtcctgacaccagcattagcatcccctggaaactgttaggaatgccagttctgggttccaccccagacagacctcctgcgtcagacactttgggttgcggctcggcagggtttagaaccactcatctggattaatcttttttccaatatgtagtactaatctgaaaccccagtgaagctgttaattgagatgtctttaaagttccatgtggctttgcagtaatccacgcatatcatgccatcagactgtggctggttgctcttccaaagcctcccagcgcccgtgtgaggaataagctgcatttacagttctcatacttaggagaactccttttagctccctgaacccccaatgtgaatttttgcctaagattaagaaatccagcagagtgcgaaattggaaagcgaggttggtgttaactagtgtaaatttgtgcgtattttcagcatttgtttatatttaactttgtcccccacctactggcttattaccttaagaaataaaaaactggccaagcgtagtgactcatgcctatctataatcccagtaatttgggaggctgaggcgggctgatcacccgaggtcaggagttcgagacaagcctggccagcatggtgaaaccccgtctctactaaaaatacaaaaaatcagctgggcatatggtgtgcgcctgtagttccagctactcgggaagctgaggcaggagaatcgcttgaacctgggaggtggaggttgcagttagctgaaattgcaccactgcactccagcctgggcgaaagagtgagcctctgtctccaaaaaaaaaggccgggcgcggtggctcatgcctgtaatcccagcactttgggaggctgaggcaggtggatcacgaggtcaggagatcgagaccatcctggctaacagtgaaaccccgtctctactaaaaatacaaaaaattagccgggcttggtggtgggcgcctgtagtcccagctactcaggaggctgaggcaggagaatggtgtgaacccaggaggcggagcttgcagtgagctgagatcgcgccactgcactccagcttgggtgacagagtgagactctgtctcaaaaaaaaaaaaatagaaataaaaaaatcaacatttctggaggccagtgtctttatagcctgctctactggttaaggattttgattcttcaccatagagatgcagactgagcttcttttgtgtgcaagacagtctgcttttcttacaacgaggagttcctatgaactcaggagcaagtaggtagccacgtgtgaatgtggaccaagctgtgagaaggggacatgtctgcagaggaaaagaaggtgctgtggaaactgagagctgaatgaggatagggtcggggaggcagccaagagcttagtgatattaatcagtcaggttgtccagggaagcagaaccaacagggcatgttcatatatatatgcgtatacatgtatatacgcatatatatatatgaataaattttagccgttcttgaggttgcagtctttttttgtttttttttgttttttttttttttgagacggagtcttgctctgttgcccaggctggagtgcgatggcacaatgttggctcactgcaacttctgcgtcctgggttcaagctattctcctgcctcagcctcccgagtagctgggattacaggtgtgtgccaccaggcctggcaaatttttgtatttttagtagagatgggatttcaccatgttggtcaggctggtcttgaactcctggcctcctgatctgcctgcctccgcctcccaaagtgctgggattacaggcatgagtcaccacgcccagcaaggttgcagtctggagtctgaaggcagcttggagcagaattcggaatctgtcttttctcttaagggcttcaactgattggattagccccactgacattatggagagtcatttgctttattcaaagtccactgatttaaatggttttttttttttttttttttgagacagagtctcgctctgtcacccaggctgcagtgcagtggtgtgatctcggctcactgcaagctccacctcccgggctcacgccattctcctgcttcagcctcctgagcagctgggactataggagcctgccaccatgccagctaattttttttgtatttttagtagagacggggtttcactgtgttagccaggaaggtcttgatctcctgacctcgtgatctgcccatcttggcctcccaaagtgctgggattacaggcgtgagccaccgcgcccggccttaaatgttaatcatatgtaaaaaataccctcatgcaacatctagactgaagtttgactaaacaattggataccatggcctagccaagaggatgcataaaattaatgaccactgcaaggaattgggattgtgactgtgactgtggtctggggcagtgggaagatttatgctggttggcaagtgggtgtgggaaaagccaccaacagtgtcctccctgctcagtggcctcaacccagggctgtcatgagataatacactgttcatcactaggcttgtggaacacaaaggtgagccactttctggagaagcggggcagagcttctgtaagtcgactttgatgacaccctgggggtgagattggatctccccaggataggattggtgtcctccagagggaatgagcatcctggcttcagaggttgggcactcagtcttgctagtgagtcctgccccatggttgactagctcaggacccaggaggtcatcactgggtcctgaagcttttctaccaaaactggtgaaaaggccttcttcaagggcacctttcagagtgagcacccaggagacgttcgtgaaagtgtgagctgccctcagcttaggaactgttcttatgtatttatctcaccgtccagatggtagggctgtggactttagatctttgtcgttggcctaggtttgagagtccttgaaggggggctccaggcaggaggggttctgtgtttctggcaggtgcccatgcagctcctggctgtgaccactccatctgcctcactcactctggatgatccttgtgtgcccaggcagagggcctggcccggggatgcccagggagttttgcctagcttcgctgttagggacataaacaagaacgggcatagctaaagaagggtatggccagagaaggctgggcccggagctgggggtggggctgtgtcttggctcccaacggttgttgttgttgaattatccccaggcactcatggagttgtcctgaaacccatcttccgtgtgccttgatttatccatgctgttcttacccatgtcatcttcagagagaaaagtctttttcccatgcacagccaagagactgactttacttgttttgtacgtagttaagaattccaccaaaaagaattccactgccataccagcatctccaaggatgtcccataaacttggttgcagagttttgtgaaatgttgcactccagtagaaggcagcagactaggcctggtgcggtggctcatgcctgtaatcccagcactttgggagaccaaggcggcagatcacctgaggtcaggagtttgagaccagcctgacccatatgatgaaacctcatctctactaaaatacaaaaattagccgagtgtggtggtgggcacctgtaatcccagctacttgggaggctgcgacaggagaatcgcttgaacccgggaggcggaggttgcagtgagccgagatagcgccattgcactccagactgggcaacaagagtgaaactccatatgggaaaaaaaaaaaaaaaggcagcagacgagactgaagggtgtgacctttcaagtgtttatccacctttgaccaaataaatctaattccatctctttgagtctacttaagataactatcaatgataaagattttttttgcagaactctgttgaggaaaaatgagctggcttttccatttccagaatgatctccgggtcagagacatacactgggtcagtccagggaggggaggccactcctcccctggatggtcagggtgcacagggaatttttgccatcattactgcaatggagaaatgtttacctatcaaactgtattgcaactgtgcttcaattacttgccaccttgggctgttagtaaggattgacctattcaggttaccagtagactaagtggctgaaccagctatctactgtgaagcagactaaataacttagtggtttaaaggaaaacaaattctttcttgaggtctagtgggctagctgcgtgggagctgtgctcagcaggtcttcacagcctggcctttctgtctgcatagtcctgcttcttagcaggtttatctcaggtcacccaagggcaaaggcagaagctgcaggcaacacctcaggttctattccattggccaaagcaagaccagctcggatgccagggttaggaaatagattccaccttttgacgagtcttgggagagaaatattgtggccatgtttttcattctaaaatgttgcttgactcttccatttacttattcagcaaattttattttaaaaattggccccttgctgatacctgcaacccacctaaggaatgacacagcctcacacttctgaggtgactgcatgatttggctatgagcttcctagtagccattgtgatgagggaaacaatggttttgaattgttttttggtatctaagcgatttaaaaaaaagagttaagaaaaacagataatgaacagaaacaagttattctggaaagtagagaagtttctgaggctgaatcctgaggtgggtggtcccatagggtccctgcatagtcctcagcataccctgcacccaccacattagagaagtggaacacaacagtctctaacactcccagtggtggccaaaggcagtgtgataagattcaggcccctaagaataaggtgccagggatttgagcatcctgtgctccatgtgtccaactctgagacacaaggacaaagcactagaatattgcactcgagctacagaagaataaacctaggtgtgtgggactacagaggcatgagcatctgtcctagcttaccctctgaagtttgcccaaccagcgtcgcaccacgtcctatccctattaccctagacaaagaggtgaccacgctgtgcctcagtttacttctggtgttacagtgatattttcatgaagtcacacctgaaaatccctggggtgagcagtcactgtgacctgacatcagaggccaggggtctggcagttgtgtatggggacacccatggcctgcctgatgtgggggtcacacaaggtcacacagggttgcttggggattacagcctgtttctagatggatctggtggcgcctgggttcctcactgaggacttggaggctccaggctccaggacattcccaagtcccccagccaggacctcagaaaggacactgttctgggtgggtttgagaggagcaagttaggggtgctgagaggtggggctgctgttgcccctggaaagggggtcatttgtaggctgatgtctgtgctgggatcccagttcgagggttgcaggagcagccagcgggaccacaggcagagtcggccaaggactggttgcccctgacagcagcagagaggtggacaagggagtctggagagaatgccaccgggtgagaagttaggtttagggctttggttgggcagatttatggaagacatgaaaacaccaggttttggacagagtgatatcttaattggtttgtgctgctacaacctgataccttagattgggcaattgatagacgacaggaatttatttctcacagttctggaggctggaagtccaagatcaaggccctcggtgtctggtgagggcctgtttcctggttcatagatggtgacttctatgtgccctcacatggtagaggggtgagggagctccctggggtcattattatgaggccctaagcccatcctgaggctccagcctcatgacctaaccaccttcctgaggccccagctcctcataccatcaccttggggttcaggtcttcaacataggaattgggggtaggggggcgggtcacagacattctgaccatggcaatgatgcagaaaagcccagtttgaggtgggctgcaaagggagacccgcggccggctcttgcagtcctgcgggggtggagcaggtggtgtagacccagcttcctaccttggggccccagtggccctcagcagcatcgtgaatcccttcatgctaggtgtagtgtgtgtggattgttctcagggtttgtagcttcatcagatcatcagggctgctcgaccgccgaatgtgaaggccagggtttccttgtcctatgctacagcagctctctctgcgtgtcctggtccccaggctgcccattgccctgatgaagatgcatggtggagcttgggcctggaatgagggggagtggaaggaggtgagtgcagagatggacaagggccccagggagactggggccataggatgctgtgaactttgatggaggcctcagagatgtagagcaggagggctggcctctcgtaagattggctcctgtggctcttgttttagccccttccagcccccatccctgcctcttgttctccattctctgcatagtcctggggtgcgtaaagatgatgtgacgaggctgaggcaccgccctgcaccagaaagttcttggaactcgccaagggcacattcctaagatgcaatgttgtgaagccacctctgctgtcccttggagaattctcccgctcccattattaaaaatctgaacatgtgtcttgatgtctgtttatttatttatttattttttgtgagatggagttttgctttgttgcccaggtgtgagtgcagtggcgtgatcttggctcactgcaacctccacctctcaggttcaagcagttcttctgcctcagcctcccaagtagctgagactacaggcgcgcgtcaccatgcctggctaatttctgtatttttagtagagatggagtttcaccatattggccagactggtctcaaattcctgatctcatgatccgcccaccttggcctcccaaagtgatgggattacaggtgtgaaccaccacgacctgcctgtctgtatatttaaatatgcattaaacatggggttggaagagtgacatgggaggtctatatacacgggcgttgcgagatttgcttctgccttccagtgctttcccttgggctccctctggggagatttcggctctgggagatttgcggccagttttgccattaccaggtgagtggaagggctcgagggggtcatgcaaagcttcctcctgctcatggccttggacataaccaaggagggcttggacttggaccctgagcagggttttcctgcaggtgtacacagaggaatgtcccatagggtggctgtgtgggagagtgggaccctggggaggcagagctgggaccctctgctgaggggggccccaggcagtgggccttgtcctctcctcatgcgtgggaaacctgcccagggaggctgtggttattttgtcccagtttttccatcgacgaaacaggagtcggtggaaatttgcaagtaggtgatgggagaggtgggcctgaaccccaagtccttagaatgaaaacctgggcctttcttggtccctgcaggtgtgctccactgcagggtggggaggtgctggggtcggcctctttgaagttgggctgatggacacaaaggggttggggttggtggaggcacccactcttgcatggaggagggtgtgggaccctctgccaagtgtcaagttagcctgaaatgaggcacagactgggagctttgctttttgccctggggtaagaataaaagaagaaaacaatgcaggccgaggaagcattcctaggaggtggcgcagcctctttgatcctcctcggcaccggcttgctgtagcttgctcttatcaggacggcaaataccctgtttccttttatgttgggaacctacaagaggctctgatgctagaatcgggctccctcattcttgcctgcaggaagcagtgtcctgtatacaggcgtcagcacccacatgggggtggacagtggagggccagcctgggcctgcctcgtgtgctcaggcctccttggtgggggtgggagtggtgcagaagttctcgtcatttgtcatttgccagagggacgatgggcagacagcagagatgtcccgaggcctgctcaccgcaggccttctacgcagccctctggaaaagaggccatccttccagtttggagacttcctctggagaattccatgacacacattcttgaactgtggatgtaatccagtaaggcgtggttcatggcatgtggtgtggaataattcattgttggacagtttgctctaggaatggcgtggcctccctacctcctcccactacatgctagtggccaccccagtggtggtgatggttaaaatgtcctcacatttccaaatgtccccagcgcctccaattattagtaggcagagaagtcagtcggcacttaaaaaaacaaactaggatgaaaaatcccagagagtattctgccagttgccacgtcatattcccataaaaccttcagttatttacccatatgggtgctttacctggttgttacttaagatagatttctgtatgtgttgcaaggaaaggcattgcagaaatggacaggaccatttttttcgttccacattgtgactcttcctttcctgtatttgaaagattaaaagatagcaccccctagatgggtgagggttgggttaaatagtagtgttgggacagaaaggtccatttgtgagctcgctgcaggcaggtttgatggtcctggtggaagtagccttggcggctgctggttttcaaagcctctgacaaagctgtgcatatcacccgtgactgcaccctgaggaaagacgaaaagtcagcctctcccttacgtaggacgcttgtaaactttcccagacgcactgttggtcttaaggattgttctgaccctggacatttgcaggacttgtccaaggtggatctgagcctcctcatgtgctccaggcagagatcaggattcggatgcatcaccaactggtggaagatggggactaggcaccctgcacaccctgcacaggtcaggttctgttgctccccgcccccgctgctcctggttatcgtctgtggggggcatggcttggtggcagggactggaggacagagggctgggagtagggcctcttggctgcaacctgcccttctgcccagcaccgttgcattgagaatcgccaggtgccattccttccttgcatgccatgctcactgtaccaaagacttgtggagttttgccatttgggtttatgggaggttgcattcccctcagcccagccagtgagagcgggcagcgtctggcctggggcccgcactttgcagcccctgaagatctcagctgttatgcctctgctttgcttccctcagcttgggaagcttcactcgcccctgcccccagagtgtgactcagatgtacccactgaccggaggaacttgttgggaggaagtcacaattatgggcttagggaaagaaaagtcaaacaaccaacaaaataataatcatgctcgcctgtggattgggcctaagggatgtggggccctctgtcgtcctcggttccctacctcagagcttcagatgcccagactcaggccggaggctcctagggccccaggacaggcagaacacccacattcatgggggtgcagagttgtccccagatggcctggagagacccctgctcagggggtcttggcccttagtgtgtctcaggatgaggactctaaataatctatctgggaacctccttagagtagctgacttgttttactaaaggtaattttttaaaaatcacgttttgattttaaagtgtctccaggatcttctgcagtttactagaacctcttactgcccaattgtcaacagggttattctacaaaagagggcatgtgggttcaaggagaatctgaacatgggattcacacactgaactccaactggttgcctccgcctttgtgtgtgtttatatgcgtatgtgtgtatgtaagtgcacgttcctaaatgtatatgtacacaagtgtatgtgtgtccacatgaacacacacatgtataccgtgcatgcatgcatgcacacctacatgtatgtgtctatgtgcatgtaatgtgcatgtgtgtattatgtgtgtgcaggcttactttggagatactgcagtttggtgccaactggaccattgcaataaaatgaatattgagataaagtaagttgcacacatcttttagtttcccagtgcatataaaagttgattatactaagctgtagttatattaagtgtgaaaatggcagtatgtctagaaaaacaatgtacatgtcaatttaaaaatgcgttattgctaaagaatggtaacaatcatctgagccttcagcaagttaaaatctttttgctgatggaaagtcttgcctacaagttcatggctttggacggatcagtagctactgaaggttggggtggctgtggcaattccttaaaataagacgatgataaagtttgccacgtcagttgactccttcatgaaagacttctctgtagcatgtgatggtgtttaatagcattttatccacggtagaacttttttcaaaattggaattagtcctttcaaaccctcttgctgctttattacatttacacaattacatttgtgtaactttcttttttttttttttttgagacaaagtcttgctcttgtccctcaggctggagtgtgttggcatgatttcagctcactgcaacctccgcctcctgggttgaagcgattctcctgcctcagcctcccaagtagctgggattacaggcgcctgccaccacacccggctagttttggtatttttagtagagacagggtttcaccgtgttggccaggctagtctggaactcctgacctcaggtgatccacccgcctcagcctcccaaagtgctgggattacaggcttgagccaccacgcccgaccacatttgtgtaattttctaaatattttgttgttatttcaataatatgtacagcatcttctttatcaagggtagattccattcttttttttttgagacagagtctcgctctgttgccaggctggagtgcagtggcgcaatctcggctcactgcaacctctgcctcccgggttcaagcgatcctcctgcctccgcctcctgagtagctgggattacaggcgcacactaccatgcccagctaatttttgtatttttagtaggacggggtttcaccatgttggccaggatggtctccatctcttgaccttgtgatccacctgcctcagcctcccaaaatgctgggattacaggtgtgaaccaccgtgctcggcccgattccatcttaagaaaccactttctttgcttatgcataagaagcaacttctcatccattaaagattgatcatgcgattgcagcaattcagtcacatcttcaggctccacgtctagttctagtgctcttgctgttcccagcacatttgcagctcctttcttcactgaagtcttgaaccctcaagatcattcataagggttgaaatcaacttcttccaaactcctgttaatattgacaatttgacttcctctcatgaatcacaaatgttcttaaaggcatctggactgttgaatcttttccagatttgttttttttttttgagatggagtcttcctctgtcacccagactggagtgcagtggcgcaatctcagctcactgcaacctctgcctcctgggttcaagtaattctcctgtctcggcctcccgagtagctgggattacaggcacccgccaccatgcctggctaatttttgtatttttagtagagacagggtttcaccatgttggcaggtaggtcttgaactcctgacctcaggtgatctacccgtcttggcctcccaaagtgctgggattacaggtgtgagccactgtacctggcccaaaatgtatttcttaaaaagtaagacttgagggccaggcacagtggctcacgcttgtaatcccagcactttgggaggccgaggtgggcggatcacctgaggtcaggcgttcgagaccagcctggccaacatggtgaaaccccgtctctactaaaaatacaaaaattagacaggcttggtggcagcctcctgtaatcccagctactcgggaggctgaggcaggaaaatcgcttgaacctcgaggtggaggttgcagtgagccggaggctgcagttagccgagattgcaccattgcactccagcctgggcaaaaagagccagacttcatctcaaaaaaaaaaaagtaagagttgaaagtcaaaattactccttgatccatgggccatagaatggatgttgtgttagtaggcatgaaaacaacattcatttctttgtacatctctgtcagagttgctgcatgaccacctgcattgtcaacaggtagtaatattttgaaacgaatctctttttttctgagcagtagtgtctccacagtgagctcaacagtaagtctcaacagtgagcttaaaatagtcaataaaccatgttgtatgcagaagttctgtcatccaggctttactgttctatttatagagcacagggaggatagattttgcataattcttcaggactctggaatcttcagaatggtaaatgagcatttgcttcaacttccaggcattagttgccttagcccctcacaagacagttagcctgtgcttcgaagctttgaagcttgacattgacttctcctctctggctatgaaagtcctaggtggcatcttctaatagaaggctgattttgtctgcattgaaatctgttgtttagtgtagccaccttcatcaatggtcttagctagatcttctgaataacttgcggcagcttctacattagtacttgctgcttcaccttactctgctatgttatggagacggcttgtttacctaaacctcttgagccaacctctgctagcttcaaacttttctcctgccgcttcctcaccttgctgagtctgcatagaattgaagagagttagggccttgctctggattaggctttggcttaagggaatgtggtggctggtttgatcttctaatccagaccattcaaactttctttgtaacagcaaaaaggctgttttgctttcttatcattggtgtgtttactggagcagcacttttaatttccttcaagaacttttcatttgcatttgcaccttggctaactgtttggcatgagaggcctggcttttagcctgtctgagcacatgccttccccactaagctgactcatttctagcttttaagagatgtgactcttcctttcacttcaacactactggttattaattggcctgatttcagtgttgttgtgtctcagggaatatggaggtccgaggagagggaaagagcagtccagagcatcagaacacacagaacgtttatccattgagttcgcagtcttatatggatttggttcatggcaccccaaaacaattacaatagtaacatcaaagagcacagatcacaaataaccatgaaagatataataataatgaaaaagtttgaaatatggtgagagcttccaaaatgtgacacagggaccagaagtgagctcatgcttttgggaaaatggcactgacgtggggttgccacaaacctttagtttgttaaaaaaaactgagtatctgcaaagttcaataaagcaaagcacaataaaacgaggtctgtctgcctgtgtgtgtcttgttgatttctgcaacggaggcagagagtgattttttgttgttatttttcttcttgtttctccaggcaaattgtttctcgccttcactcatgtgccaagctctagacggcttcctggcttggcaagattactgttaacgcatccctaagcattccttttatttgttaaatccctgttattctgttagaatctatcttgcagccaaaatagcctcaggagaaaaataatgaaaaaaaaagaaatgaattaggtgtgccagaagaatgtgatgggcgtggggaggtttatgcagataaatatggtgggtaagaatgccgccccttttcaatgtctgtttaaatgtttccattttccttgtaaaagcactccaacacaagaagtgcatttgcagagaggccaaggatcgctcccggtggacacacggttttgtagcctccctctccaccccacccctgccccgctccagctgtgccttagcagacgtcattccctgttatttcagtctctgcaagtgcaagaatttagggtgataacagccatacttccattccatgaatttgcacacttcttactctctacttatctaacacacatgtgcacagtgtgaaccttggtctgctgacttaactttgcctgtgtggggtgttgtttctctcctgtctgtggacacttactgagttgagattcacaggtgtggaaagagcagggtctgcagtgcgaatgttttcgtagttctcattgtagactgtccaatgacttttcaaagtgctccccaaggcatgaattattccactgggggtctccttgcctgtagttttgaaccctgacccagccaaaggctcccctgctcctggtggctatgctggaactctagctccttccctttggcctgaggtggccacacccagggctccagccacatgacgttttgtgccctcacccacctcctccgtggtctccccatttgcttaaggaaacacctggagtgagacagaaccatccagtccatggctgtgccccactgggcctccaccttcaggacgtgcccagggtctagccacctgcttttgctcagttcccgagtccagcggcaggaagtggacaccaggccagccttctgcccgggagctcaggtgctagagcttgtctgccctctgtgcagcagggagcccaccttgcccatttgagaaagaagcaggggcactccgaggagatgcttcctgaaggaaccgggtgttttaggaagatcttcctggcgcttcccacaggtctggtgaatgctattcacccaggctcccaagaggctgagcccctccttgccctttttctgagtgagctcatgttccttggctgggtgcagacttgggagatgtgctcagtcactccacagcaaaattctgtctctttggggtggcatgactcctcaggagtggggtaagactgtttaggaatgaccaaaacttaggtctgttttgttttgtaactttgttaatatcccatgggcgttttccatataagtgaatatggatgtgattattatttttagtgacttcatagtattcgaatcccattctatgttagtaccataaaatgaccagagcccagttgctggctattaaaactgcttccagccttttttgttgtgcataattctgtaccctgcccttccacgtagatctttccaggcatggtcattgccttagaacacattccttgaaggagaattgaccattgtgatatgtgtttgaaatgagaacatagagattttgttcgcatgtgccttgcccattgagaccctgctgcaaatgtgtctttgtgcttctatctcctggtcctagctgtcttgctgtgggacaactagggacagcatcttgcttacatgaggttgggaaggtgaaggtcagagggacagcaagccaaggttaccgccttacaggacggatcctgtggtctggctgctcacccatttgttctacgcgtttatcttttgcaaagggctgtgcagttcaccaagccctctccatacatcaaggcttcctgtggacattgctggccatggaaccatggggccgtgtttctattcccatttcccttcttccttccttcattaattcagcaaacaggcatggaccccttctcgcgtctgggccttggataggtgaagggcagggtgagggtgcagggcttccctgtgatgtaagaacttttgtggggccctgaggcctggggccagaagaccttgcccgatccaccctgagaaggcctcgcaggggagacctcagtgttgcatttggggaccaatgtttagctgagtggggatgggtgggagggatggaagaggggagaggagaccaaggcatgggtctggcacccctgtcaagagccaaacgaagtaactaggttgtggggatggggtgggagggcggggacgtgggtagagttgatactgcagtgttctggtcagagcatgaaaaacctggaatgggccagtaggcggtctgtgtgccagggcccatcaggagtatcattcattcattcagcaaatccttagctgtgttctaggcagggggatccctctgaaccggatggacagatggactagagtttatgccctcttagaggtgagtttttcatacccgatgactgtaagaccaaggtggatggacttttccctagggcctcatgcaggagaggcataaactgagcagggatctgggggaagtgagcccgtttgtaaggacagcaagtgccaatgtcctgaggcagcacctggctgaggaggttggagagcaggccagagacaggcaggggctagatcacattggtctgtgggctcatgaagagaacttttttttttgagatggagtttccctctgttgccgggctggagtgcagtggcgtgatctcagctcactgcaacctccgcctcctgggttcaagtgattctcctgcctcagcctcccgagtagctgggattacaggcacccgccaccacacatggctaagtttttttggtatttttagtagagacagggtttcaccatgttggccaggatggtctcaatctcctgacctcgtgacctgcccactttggcctcccaaagtgctgggattacaggtgtgaaccaccgcgcctggccaaaagaactttcatttatttattttttaagggtgtagattctaaaagctggagagggttttgtgctacattgtcatgtcctgattcctgtcttaagaagctccatttggttggcctgtggatgcacagagatggtcagttcagtggtgggtggaccaggatggtgggagtggagaccggggaactgggcctttttggggctttattttgcagggcttgctgacagattggctgtgtgctgtaagagaaagagaaggagccccaaggttgagacttgactgtgtggggaagtggtgctatttgtgcagaccgagcagcagggaggacatgttggggagaaaactgggagttcttatttggagggttgaagtgagcggtgcttcggggatggcccagtgaaggtgggagcaggtggtgctcaggactcagcaggtcaggggagaagaagcttggagtggtcaggaccatcagccggcagacaggtggtgggaagggtgacagccggcctgggggtgcattcacagggaggacctgcaggtcggagcccaggcaccctgaaacttagaagtacccaaggggataaaaccctccaaaggaggcaaaggcaggaccagtgaggtagggcacggggtcacagcgaccagggaagaaaatgcatcaggagatggtgtgttcaaatgcggctgggattggaataaaatgagggacaggtgtcccttactgggtctgacaggctatggctaggtggtgacttatggaaagttgcagtgagatgggttgaacatggattctggagcccatgaaccttggggtaaggggcagtgactatagtcagcctttgaggaaggcttcctataaggggaacagcagagagacaggccaggtatgggaaggctgggtaggcattcaaggagggttgtgttttcaaagatgggatgtgttacagcaggctgtatgccactgggaaagttggcacaggcaagaaaaacgtgaaggttaggagctggagggacggggtgggtggtgactcacccctataatcccagcactttgggaggccaaggagggtggatcacctgaggtcaggagttcgaggccagcctgaccaacatggtgaaacctcaacactactaaaaatacaaaattagccgggtgtggtggtgcatgcctgtagtccgagctacttgggagactgacacaggagaaacgtctgcacctgggaggcagaggttgcagtgaactgagatcgcgccactgcactccagcctgggcgacagagtgagactccgtcaggagttggagaatgagagccagggtggctggggacaatgctggagcccgctgtgcatgtgcatctgggtttggcacctggcagcgatgcacatgagctggtgaactgcagtggtctccattttcttctgggctgaggtttgttgggaggctttagctcctgtgcgtgttgctgcacagagcagctatgcactgatgagaaaggactgtggaggggtggatggcggcgtagacgtggggccatgctgagggctcctggaagtctgtgaccttggcttgctgtccctcagaccttcatcttccctacctcatgcagggaagatgcacaatgtggacctggccatctgatggaactataggattgtccccagtaccttgtgctggtgactaacagtggacacctagaggtctgggaggagcagctcccggaaccccattgataaaagtgtcttcgtgtccagtgtgtgccgctgccccctgcaatttcagcaatttcagcaatttcagcagaagcatgcctccaaatctaatgtccccagggctccactgagtgctggttactccttcacgtcccacccacacttgccttccactccccgacacaggccccttatctctcttaattcttagtccagttgaagtcaacacaattcttcgctttgccctccgccccactcccaccctttgctcctgagcctctgcttacctgttttggtcaaggcccagtctacactggagcccgacacacactgcctccctccctcctcaccctggagggtccaccgcctccttggctttatcttctctctgctccctcctaggctataaactcgggaatgaatgaatggacagatgaaccctgccagtataattgtaaaccatctaatcagaaactcaaagggcagcagataggaggccacagctcagggtgttccaaaggcccagcccagggcgtgactgaggggtgtggtagtcaagggggtgaccttaaaacctggcgtctgtctttgtcattttagtcattccatccgcagcgcctgttgagcacagccgtgtcttaccaggcgggtgctgagcgcacacactgagagaccgtggtcttggcacacgcgtagtttatagtatgagtggggtatgccgcaagcccatgtctgttccctgctagcctgggtggacagtgatggctgtcactgcagacatgggatgagaagcttcagtggtgaggtgggacttgaactgcctttttctttgcttgaataacatttaaaaacttttttttttaaataaggaggataagaggattgtgagtactatgctgtaagtatactttagtgatatttaaaaaaattataagagcaatacatcgaaccttttaggaagctgaaaacagatgtgtagaaattgccacaggctcccagcctcagcacctcaccgtcctgggccacctggggaggggttttcctcaggctcttattcagtggatgtgcacagggctgggacgcaggaagactgtaaggaaggagctctcctgcggtgacggcaggtcctgggagctcagtccagctccggaacagcagtgctgctgtgcggtgactgtgtgtgaggccagggggtgccggacgtggacgccacgtgagacaagtggctcaggtaagatggttaaggtctgagcctcagcgcctcattagaagcttttgaggtcggttgcaatttgatcatccgctttagcagatgaagaaactgtggcccagaataattaataataaacccgcaggcagtgagtagaggagtggggtcggggtccgccgcagctctctggaccacctcagtccaggcctcctgggggaggctccaggctacaggagagcagggcacctgcctctatccccagatctcatggctctctgtgcttcttaacccaactacaaatcagagctcctgggaagactgtgaagaaatatcactgcctagggttcccccaagactgtggagtcccctgactgtggtgtaagtggtaggggtggagtttgtgtgatgtcggtatgtttttaaccagctcctgcaggggatttgaggagcagtgttggctgagaactgctcaggctgcccccaggtgggatcccctagggcttcattacccacagttccagatgtggtccagtggtcattttctgatctaagtcaggcaatgttggggcattttcggtcaggaagaaactggggaggtgtgaaaggacgggggtcgattagagaggtttccgaaaggacagtggtaactgagatggctatctgtgggtgacccgcctcccactgccccagccttcccatgggagccccccaagggaggggagaccaggctgggtcctcttgctgtcagcaccctgtttaaggatctggtgcaggttttgaagctgagcaggttgttaaacttcctagagccttgggcgccttgtccacatcaaacagtaacagagatttctatgggaggggagtgtagaaagccctcccctttcgtgaccagtggcatgcactaccatctagctcttcctcagtgttctagaagagaccagtctggccaatatggtgaaaccctgtctctactaaaaatacaaaaattagctgggcatggtggtgcatgcctgtagtctcagctacttgggaggctgaggcaggagaatcgcttgaacctgggaggtggacgttgcagtgagccgagattgtgccacactgcactccaggcgacagagcgagactccgtctcaaaaaaaaaaaaaaaaaaatgccctcttacgcatctcaatgtattatcacggaagagtttaaaaggccaggcacaacaccaacaactgtgtcctttttctttacccccctggaggaagtgaacatacctctctccgtttttagtgttcgaggtgctcaaagtggcagagtaagtcctaacatcgtggatctccaggcttttcgtacaactaactctgcagggttcttctgcttggagtcaacttgatggtgaagaaatgcttggcaaggagtggaaaagtaaatcatgatgtcctcagcacagggcacctattaactagacagtttcctatgttctcattttcggttagaataggtggggcagctcatttgacaggaggaaactggcttgttggaagtgctgggatgcctactgatccgtgcctgggtcctgggacacccattggtagcagtaggtctgtaagctggacctggggacttgggcttgtggttatttagctctgcgacctcaggcagttctggaagctatcacagttggaggctggaagtccaagatcaaggctctggcagattgtctggtgagggctggctcctggttcatccaaggcaccttctatctgtgtcctcccatggcagaatgggtgaagggtcttgtggggtccctttcttaaaggcattaaccccattcatgcagagtctcccctcatgacctaagcacctcccaaaggcctcacctcctaatatcgtcacctcgtgggtgaggatttcaacatatggattttggaggcacacagagagcccgtagctgtgggggtccgttttaccatgagaaaggtgtgctccgtgcttgtgagaggtggagacaggtgggcccttgtttatcttttgggctgggcacccccacccccgacccatggataggtgaaggaaggaagatgctcctcttggcaccagcctctgactcttcctgctcctctgaagggagggaagggggcgagatcctaccagggacttagctggagggggctggggagagccaccttaatttaacactttcttttgctctcctgtgcacagtctgtaatgaaacagctctgttttgagcagagaagagggaagaagcacccactggaggggaattttgtaaggaaagcattttttatttacttctcaaagtcagggggaaggaactctgtgacgagtcagagcagagggaaacaaatgctggtttccccagggcgggcaaaaacaccatgcaaaggatgtcagaagtcaccatctgtttgtcagaagaagccctgaagtgtggcagtcgcagaatgacatttcattgacagcctgcacaccccaggggactcccatgggtggggacaggctgcgtgcccgggaactttgtagccaatggagacgttttggttaacctggtggaataaatacactctcctctgtggccagtggactctcattcatcacgttatctactgagtgtctgtgtgattttcatgagaaacagtgttgtgtaaaggacaaagcagtactgctttcaagtcctgcttccacccgagtgggtaactccagctttggaccatcttgagggtcaggcacttcacaaatggcatctttgatcattaataccactctgggagttggactccttgtctcctaggatgtcgctgggtcactaagagcctgggcgaaagccccctcaccgcagggactggaagtcagctccccacctctccagtctttcaggtgccccatgcacatatcctgagcccctgggacttgacgtaccgaaagtcctctgctggtcttccccctccagcatggccctggggaacaggtgtgaagatgtttgctggataggtgagatgcaagtgtgcctgaacacttcctgaatgtcccagagggtgagtgccctgggaggcacactgttacactgtcccttctggatttcggatggagcacaagctggctgcacagggaaagagacaaaagggaggattttcccaaagtctgtgtttggacagggcccaggtacaagacctgcccctagagacagtgtctgggcctcctgctgcccagtgaccagtgttcccacctttggacaaggagagagggccaggctcaatttctgcagatgagagctggcaacaacttgctgatgtcagaaattccttaaactgaaggcagtctttttcaatatcagaggcaaagtgcctttttttttttttttttgacagtcttgcactgttccccgtggttggagtgcaatggcgtgatctcggctcactgcaacctctgcctcctggattcacatgattctcctgcctcagcctcccaagtagctgggattacaggcgcccaccaccacacctggctaattttttgtatctttagtagagacgggttttcactatgttggccagactcgttttgaactcctgacctcgtgatctgccctcctcagcctcccaaagtgttgggattacaggttgagccaccgtgctcggccgtaaagtgcttttaaatgtgctttaggtggcacatagaaactccctcacactcggacaccctcaagccatggagcagtgggactggccatgtcagatttcgtgtcgacgggcatgtagtgggtagaggagagctaggagtcatctgcccagagtatctggtggccccaatttcagagcactgaggctaggaatcgggaatcagggctggatcctgccaggacagtggctctgtgagcacacgtcagagggactaaggatttggactctccacccctcacttgggttgtctggccaaggtgtggtgaggatttggtttagatgatgcctctctgcagaaacacccagtggtaatgcatattctcatctctgaatcacaggtggcgctgaccatggcttgtcccatccaaggtcatggtcaccttgaccccttgattaggtggagactgaagctttctctgttgttgacttactcttttcccttttatagtaaataaaggaaagtatttagagactatgtattctctctaaagatcaaccagtgacagcctattagattctgtctctccactgcacataactcccgagtctcccatcccacgacgcatggaagctgagacctttacgcttcctaataacctgctcccaggactcccattgcctctctgagactgtctctgtggtcatttgcttttttttttttgagatggagtctcgctctgttgcccacactggagtgcagtggcacaatttcggctcactgcaagctccgtctctcaggatcatgccattcttctgcctcagcctcccgggtagctgggactacaggtgcctgccaccatgcccagctaatttttttgtatttttagtagagacagggtttcaccgtgttagccaggatggtctccatctcctgaccttgtgatccgctcgcctcagcctcacaaagtgctgggattacaggcgtgagtcactgcgcccggcctcggtcatttgcttctatcagtagggactcaaagagtcttggatttgtattgtattcaatgggtcataatccaatattatcactattttgatctccaagttgtttacagtttgcctggtgggagcctcttcaggctggcccctgtgtctttttgttaaaaaacccattgttctgtgagcactgtcttactttctggccaaaaagaagagatttcaggctcattggggggtgactgttggtattggagcctccgcaccctccaaggacagatctgggagtatctctgtgtgtgtgtgcatgtgtgtgtgtgcactggttcgtatacacacattcacatctactttgatttctagatgtatctacgtctctagattggaaactctgagtcacaccaatatctgattcctgtctcccaacacagggcttactataatgtcccccattctagactagcaagctcctcccgaaggtgcctcccatttttcttctcacagatccttatgctcaatcatcctgtgcatgaccaatctcccgtcacctctccactgctatggccgtcctctcccctgtacatttatctgtgtttctagggctgttgcccgaggctgaggttctcttacctagagtttccatgtccactcctgctttctcccgagtgtcctcccaggactgccaggggtcctccaggatgaacatacacctgtgatgctttttcctttttgccagttagagccccctgtgacgttggagtccagcccagctcggtactggggcctccttccttgtgactgctttgtgcaatcctgctcaccaccctgtacttgcttcttgagccctgtctaccctcagtgtcccaacacagctgtgcattagccacccagcctttggccagttcaccaaaaatacggcgctttaccacccttgcctctcctcacctcttttcctgtctggaaagtgtctgcttctgcttcaagtcacaggccattcatggagttcttcccatgatctgtggactccgtgccccctcctaacactgcgtgtagatcgtccctctgggaggggcggggtgagccagccgctgtatttcctctgacatcgagcacacacgttgctcacgtatctgtgggtgaatgcatgatcgtgtgagggaatggactcataggagcagcctccagtttccagtgacaaaacgggcacgagtggcccctcagctctcccccagggaaccttgtacttggtgttaaagtctgactcatggaggggctcatgtccctagttccagctgggtttccaacccaggttgagatgtagcctctcttcctgatggctggtttgctgatgtctgccttagccgtctggaattcatcctccctgggaagaacctcattttgttcctgggaagaacctcattttgttcctgggaagaaccttgttttgttcctgggaagaacctcattttgttcctgggaagaacctcgttttgttcctgggaagaaccttgttttgttcctgggaaccaagtgcagtcagaagctagggtgagacaacctggcgagtaaaaagcacagaggattgtggcaaagcacgaagaaaattggaagctgggcagcagcacagagctcactgtggctttaagatggagtgaggccagtctgccacccaagttttgaggtgagggtctgtgcctggaggagtctgtgccctggcttctgagtcccttcgcatccccagaccctcagctacagcttacttctgggaggactcagaagggtgtggtctgagacaggcagtgaacaccggtgttgatgtggtggaaatacagcaaaggagaatgttttcattcctgcaccagtgtttattgctcctgcttggtgctgtgtgtggaaaatcccagacaaggttaggacttcctattggaggtacaagacttatgaccacactagagggtcagggccccaaccatccttgagtggctcagccatggaggatgattaaccagtctgggaggtcagatggggggcggatcttcaactgagcccaggacagcggttttcagccagaaaggagaatgggaaactgccttgggagaagccccaagtgagcccaagggcgcagagcagaaggaccctggagtgtaagagcctagattgcaagactggcaggaggaggtcagagtcgggggcagggagaggggctggagaggcggcctgctgatgaatgcggattcgccttacgattgagcactgtttcctgccagtgaaaaatcagtttgttgtcctcactggggaggtttatcacacgcacgatatttgttactagtaacgaagtgtgggagttttctgaatggctactcttttaaataagtaagagcagattcagggtatccctgcaataaaaagccaccttcaaccatttgccttccactctggcttgcataggcagtgggctggcctgtgctcctggccgttgttcctgggtggaccccagagagtgtgaatcctggtactcaggttggaggagttttatcctgctgggggctatctgttcattgctgaattcagatttctttggccggttcctgtgggcaccatggtaagggcggtggtagatccagctgacctctgggcgtgtttgccctgggtaaaccatgacagcagcatatcctgttcttagctgtttgtaggcactgctatgtacctggtattgtgtcagatgtgaagcaatctggaatgaatacgatacagatgtgttctcagggaaaaatgtttgaaaagactaaagtttggatatgctataggaaaaaaatgatgaatgtatacagaaaaatgaatgaaggaatgaatatagaaaaaggtgaataatggtgtcatttgaaggacagggggaaatgagaatgcctgcttgtctgccaggtgatgatttagtgaggaattggaacccagaatggtgtgttctaggaggaggttttttcctttgtagttaaaagttgaagagcagctttgctcttctactgcagaaacagaaagatggatatttagtgccagaacttgagaggttaacgtcagccagttgaattgatggctggaatttgcacatatgtcagccataaaggccacgacttagcccacccagactgctccccacatccaaggcatgtggagttgcaagtggagctgtagatctgaagttagagtgttggagccataaaggctgagctctgggacactgctcctaggctgggcctggagtgaaggccagtggtaggagtacagggttagctggcctgagactagaaggccccctatcctgctctgaggcaggggtctcttccgctgcccaccgtagaccacaggcagtggcttcatcttgaacatgttcttttagttttagacttgccacaaagcttcttgcagacagccaagatccactgccccgggaaggctggtgaagtccgacaggcattgaaaggagggatctgcctgtggatcttgcccgcctctcctcctggcgtttctaagtgaccctttcttcaggatcctggcttgtccatcttctcccatcaccctgtcatcttcacctcctgaacttcgggtttctaatttccttctaaaatcgcagacccataaaggaagacgggacttcagatgtgctgtgaattgtcctgatttgccaggagcaggatggcggggggtggggggggtgcggtgagggagggataggctgggagatagggaggtgcagcccagcccccaggtgtgcaaggccccgggcggtcctgtgctttgatatttgcttgaaatccttacctggttaggcgtgtccctctctgcaaggccaggctcctagttttttagtagaagaagcaaattagaaaaaaagcctttctgcctcggtgtttacctgctttccactccaaatgccctgtttgctagtgtagattatcagggtagtgtagattactgctcattacagatgcagagttgactggataatattcaagatttagaaattccgaaagccagagcttgcccggttttgattcttttaagcacctcgccagcgttctcggagaggtttgaaatcctagtaaagctgaaccctgcgccaagcgcggcgcgtcggtaattccaatcagatggcggctgcaagatcctgctccccccgcctggaaggcgtttcctcacccactttcccagtgtttggcggctcagcctgtgcctccgcgctcgctcggagctgcggttggggcgggcgggggagggagggctaattcgtgtcagatggagggacgccgtgcgggaccgtgcgctcgcgcctggcttttgttcccggcgtctgacttctgacgggcaggagtggccgtggaggctgcggcgcgcggctgggacctgggccggcggccacggagagcccttggcccctcccgtgttggccatttcctgggacttgtgtccgcaggggactcgggaggcatcctccccccagatagccgctggggaggggtcagcggccaccctcgcccggccgagcccggctccccgcgggcggcaggggcagccatgaggctgcgcgccctgacccctgggccaccgggagggttcgcgcgcggaacccggtcgcgccggcgccggcgccaggtgagtgcggcccggagctggtgtgcatggccaggggcgcgaggcacgggcgccttcagggctgcacgcacgtgggctgcgccgggtgtgcactggtgcccgtggacgctgtgctggtgtgtacccgcttgtgctcatgtgtatgcgtgtgcccttgtcagtgcgcgtatgtcagtgtgtgtgcaccccgtctgcacgtccacgcgtgtgtgcttgtgagcgcgcgtctgtgtgtgcaggcatgtgtacgctggtccgtgcctgagtcctcgtgggtgcgtgtgtacccttgtgtgtgcacgcgcaggacaaggagcgagagggccagtggagctttgcctagtgggggcgtcttctggtaagcgtggaagagggttcaggcttagctctttctaactcaactgcctcttgaaaaggcttcttgggttcatttccctgcaatggaattgggatactggccattgcgcagacctgctatccctcgcgtgtttcttgcaaaggtaaagggcattttagctctgcaatgaagtgggggatgcgctgggatgtaggaatccttacaggttccctggggaccgcatgggttccagcggtgctctgtggtccacaggacggcctttcacggtgtttgaattaaacagagcggtgctggttggcaccccgctaggttcagcctccctttccctaagttattgctgaattaaacagagcggtgctggttggctccccgctaggttcagcctccctttccctaagttattgcatttgtttttctgaagcttttgtaaggttctgtggggtgaaaaactgtcaaaatttcagctggttaacttgaggtgtactgcgttcccttttaaagtttagtggtcaaacgctgctgcctggaagtgtgggaacaatatgtgttggatgtggagggtgtccctcttgccccagataccggccccctgtgggctgggaaatatccccgaggcccggaagtgttcctggctgtttaacatcagagtaaagttgggctgggaatgtgtttttgatcagtgtctgcctctccagaatgcctctgaaggtttcccaggtgcctgaatgcctacctaaatcctcttactatggtggagctgaatatttcctgaaaggaaaacatagctgggattgtgctgatgcagctttgcacttttgcgtgtgtaaccattttgccagggcgacctttagccgggagaacctatccgagagatccctgcggttttgcatttcggcagagtggagcattcatgtggagcacctccctgttcaattttgcagagatttttctttctcaaaagagacctcacaatcaagaccagcactaattactgtgtccccctcagggagtccttgtggaaccagcagcctgctctctacccttccaacattttgttcctaacaattaagtgcaatttagattcctgaactgagcctgctaaatgcttcagcattgctgcctcctctccccctttgggagaaatgaaagcacagtatcaggtgaaaacaagggcagtctaatcccgtctggtctcatttcacaatagagatgttatgtacagatgaagcgtgagcagatgttattacactatcctaaatgaactcctcagagatccagcaattcaaatggctgagccctcgcaacagtgcttatgctgtttccctctttaagttttctagctgtggaccagtgggcaagaaagctgcaggaaaacagtgcctctttctccctggttggaataaaggtatttgtgaggaatgaaaggtcacagtatctttccttggcccacagactgtggctaattcatttggtcaacaaatattaattgagggtccatggtccactgtctgccaggcgctgggcagggccctaagaggacaaaggggaaagagcctggtgtcctgcatctaggaaattgcaatatagcacaggagagaaggcatataaacaaataactgcaatacgagtgaaaagtacgtaccagctgctgcattgcaatagagagatgtgtttgttaggtgtttgaatgctactcttgtctgagcgtgagactggggcttgaggcatatgaggcctgagtctcatatgcctcatccattggctgtgtggtgctgcatctcggttttgcatctcaccatcacggtttgtagactagtggtgattacggtaatgacacagaagcacttagctagtgttaccaactgcataattagcagcatcattatccttcttttgcagagcactgaacacacaacctgtgttatcagaaaggatgcaatctctttgaaaaaaccagataccgacataggaacaactacataataacagtaccttaaatgtatatagatacttacagtatagtcggttatatacagtggtggttctgtcttggccgcaaattagaatcacgggatggagctggggtggggggtttgacaacattccagtgttctgattcaacctccaggtaatctgatttaattggtctggggtggagcctgggtcagctgttttaaaaactgccccagtgattcctatgaactgacagatgatacagcgtttggtcatttacaatagctgttaagagacaggagggggaggatatcttttctatttaagagaggttgtgacttgtcctgggccacagagcttgtagtgtaggtatcagaacttatgtgaaggcttctgcttggttcaggactctttcccctactttatttattttttcttttttttgagatggagtctcactctgtcaacccaggctggagtgccgtgccatgatctcggcctactgcagcctctgactcctgggttcaagggattctcctccctcagcctcctgagtagctgggattacgggtgcccgccaccacgcccagctaatttttatatttttagtagagacggggtttcaccatgttggccaggctggtcttgaactcctgagctcaggtgatcaacccgcctcggcgtcccaaaatgctgggattacaggcatgagccaccgcgcttggccatgaagttctttattaggtgattgtattagtccattttcatgctgctgatgaagacatacccaagactgggcaatttatacaggaaaaaggatttaatggactcacagttccacgtgctggggaggcctcacaatcatttcgaaaggtgaaaggcacatctcacatggcagcaggcaaagagagagagcttgtgcagaggaactcccccttataaaaccatcagatctcatgataattattcattatcacgagaacagcacaggaaagacctgccgccatgattcagttacctcccactgggtccctctcacaacacatgggaattcaagatgagatttgggcggggacacagtcaagccatatcagtgattaaatgtttaggactgttaggtgttcttgatgaatcaatccttttattattatgagaggactttctatatccttggtaatgttctttgatctgtagcctactttgtctgatatagccactccaacttccctttgattaacatcagcaaggtacctcttttttctagcctttgtctttaaaaaaaaaaaaaaagggccaggtgcggtggctcacacctgtaatcccagcgctttgggaggccaaggcggatggatcacgaggtcaggagttcgagaccagcctgaccaacatggtgaaaccctgtctctactaaaaatacaaaaattagccaggcatggtggcgggtgcctgtaatcccagctacttgagaggctgaggcagagaattgcttgaactcgggaggcagaagttgcagtgagccaagattgcgccactgtactccagtgtgggcgacagagcgagactctgtctcaaaaaaaaaaaaaaaaaaatatatatatatatatatatatatatatataaaatctgacaacttttgttgacttataattgagatacttagactatttacataaatatgattattaatatggcaaggtttgaatctgtcatactgctacttgttttctatttctcctacctattgtttgttctgcctttgttttacttccttttgccatttagattaattgaataatttttattatttcattttatctctcttgtttgcttattacctataattcatgattttagtggttgctctagggtttatactatacctctgtaacatcacaggctaccttcaagtgatattatatccacttcatgaatactatgagagccttataatagtcttatgggatctttggggtgtccaatttctggctggaaacctctgtggccagtggcacctttgcctgagttcttgtcctgtgtccaggaagaatgagataggcagacggggaagggtgaagaagatgaagataagctttattaagtgttaaacagctcagaggagacccacagtgtcctctctgtaggcaggtcatcccgacctctgctgctctcagcagagaggaggccctggagagggtagttcctctctgcagctggaagtcccaacatctctgcaggtctctgaagctctcggcagagagggtagctcctctgtgcagctggtctcttgtggtctctccattctctctgtcctctctcttgctctggctgaacatggaaaagcccttggaggggaggaagtgcctgctgattggtccatgggcggccatgggctggctggaagaggcaccatgagtccccactccagtctgtgggactggcagcccgtccccagcctacaggccctccctggcctgaaggtggggccttactgaggacccacccccttctgcccaggactttgcctaccgctgccattcaaggccctggtacttgtccccaatcccgctctgagatgagaggtggggggccgggagaggagacaggccaggcagccagaatagacactcctgagccagcagggatggtgggcgggggggggcttcccatgcgcccgagggtgcaggccgcagagatgcctgggtgctgtgcctgggagggtggctgcagctgcctgcactcagggagctcctgcttttccccagctcccgcctgtgtggtggagtgggaggcccaggtctgcagccgtggatggtggctgcagctgcaccccggtgggcagatcctgcctgctcctggccccactcaagagcgcagggaggcttggatctacagctgcagtttgggcagctgcagtggcacccagggagttcccaccccaactcagaaggggtggagctcccaccggctccatggagagtgcagccccagcctcacctccctgctgcagccagcgtgatggtagcaaccgctgtcatcaatagtatatttccttttcttctttcctgaactttgtgctattttttcagaaaatttacttttacatatgtcacatgtcacattacactattgtttaaacagttaattatcttttggtgagctttaaataataagaaaaactcataaatttacctgtgtaattagcatttctggtgctcttcatctgttggtgtaaagccataattccatctgccatgtcctttttgcccaagcactgtctttaatatgtcataggtgtcagctggtgatgattttttttgggctttaattgtatatctttttttgcatattttaagaagtttttggttcacttttattttgaagagctatttttattgggtacaggattctagattgacaagttttctttcagtattttgttttattctattttgtttatttttttaacttttagattcagggtacatgtgcaggtttattatataggtaaattgtgtgttgtgggggtttggtgtacagattatttcctcctccaggtaataagcgtagtactcgataggtagtttttcaatcttcaccctccttccaccctccaccctcaagtaggccctggtgtctgttcccttctttgtgtccatctttcagtatttcctattatactgctgtcttctcacttatattttttaaaacaatgagaaacctgttatcctattggttggttccctgcatgtaatgtgtcttttggccccgtggttgtttttaagatctttctctttgttactgggtttaagcaatttgattattgtatgccttggggtagttcctgtcacatttcttgtgctagaaatatatatatatatatatattttttttttttttttgagatggagtttcactcttgttgcccaggctggagtgcaatggcgcgatctcggctcactgcaacctccacctcctgggttcaagcgatttcctgccttagcctcccgagtagctgggattacaggcaccaccaccatgcccggctaattttttgtatttttagtagacacggggtttcaccgtgttggccaggctggtctggaactcctgacctcaggtgatccacccgcctctgcctcccaaagtgctcggattacaggtgtgagccaccgagcctggccaagaaatttcttgagtttcttggatctgtgggtttatagttttcctcctggtttgaaaaagtttcagccattattttttcaaatatccccccttccctgcccttctccgtcagtctccattacacatatgttatgttggttaaagttctcccacagcttactgatgcttgtttatttgtttatttaggttgtctcatctctgtgtgctttgcgttgggaggttcgtactgtgatgtcttcaagttcattcacctgtgcttctgcaggatctaatctgccagtaatcgcatccagtgtatcttgcactgtattcttacattttcctcaatgaatgtttgatttggatctttttatgtttttcagatctctacttaactttctagcatatagaatagttattatgatggacatttgggttatataaagctgttatgacctttctttctcttgtggacataggcttttatttctctttagtgtaaataagaatggaattgctgagtcataggttaggtgtatgtttaagtttataagaaattgtcaaaccattttctaaagtagttgtaccatttattccacattctaaataccatttcatcttttcaaataaatttaattattccagtgggtgagtaatggcctcactgaatccatatggatattaagtactgatagaatacacggtcacatatcagcaaatagacatgattagtgcttgactctaaaagcaaattgaattcttataaggttatcatatagctgagagccttggctctacaaacatgaataggtagctgagtggttagtttttccaagtgctaatgcttgtaattgtgtttgaggaagaaccacatgtgtatcacaggctggactgtctcttcttctgcaggagagctcagagaggctcaagagcttaatggtgattctggaacacctttgaaccaggaaagccagttgacttcctcataacataattatgctgtttagctaattactttttccagaagaaaaagggttgagagtctagaagtgtatgtggattactttgtcacagaagtaggtggctctacggctgaagtctggaagggagtgcattttcacataatgatgttggttgatgtaatgtttctaggcaccccatgtggtgattgatgagttgggtgagagtgaacgtccgtctaggactctggaattgggaatgctaacatggtatccgtgggtcgtcttgggaattttagcatcaccaagatggtttcttgttctctgtttgcttggtaaaattcctgtttttgctctttacaattccactagatttattatttcccttaaatgaaaaggaaaaagaaacaaactatgagatgaaacgttgacaatttcttcctttactttttcagccggaagaattaacctcgagtctgcacgcttttaagaacaaggcctttaaaaaatccaaagtgtgtggagtttgcaaacaaattattgacggtcaaggtatttcatgccgaggtaagtctgtgtttatgattctctcactgattaatccagagcaaaacaaacaagaaacaaaacgaaaactttttttcaggagtttccgaaagttaaatcatggaattccccttcttagtttatatgtcccccaaccccctacccccttacttagcaggggccaaccgtatttacatagataagtgctcatgaggacatttttacagaaagagcagagtttcccgatgggagaggaggcagcaatttgtaaattaatcatttattctcaggtctgctctgaagtgtcagtaactcaggttgtttagtttgactttcagatctgttactcaagtttgcgaatgaaatgtttctatctttagatttcgggttcattttggtatggcccctttcagatcctgtcactaaactaagccaccagcttgggtaccagatatttagacgtcaagtaatgaatggaacttgccaattcttttgtgactgcacattaataaatctagtaagagaggtgtgactgtaatgaatgtgggagtggtggggggcaggggctgcttggcggaccagtggggtacaccacacagagggagtcactaggaggaccaggtccttggagagtgcgggggctgctctttggcatcatttcatctgcggggttggggatttcctctagaaaatgtgcagagtctcagcctgtgggcttctgtgctgttaggacctccccctcagtgcctccttccctgcagacccccagcagatggtccctgatggccactttagagtagggtgcctgtgatggaacgatgcacgcagtcaaaccttaatgggttgaggatgtgaccaggggcctctaaggggctcttgggattcttttacagttcaaaggcctgagtgtgggtgagaagactggggtgcccctcctctgattcggccccttggagaagtcagtgctgaagaatgtgttggatgagtggtgggtaccggccaccctggtcgctaagtagaagccagagaccagggagccacctgtgtaattcatctagatctgcatccaaggcagagaacacgggctgtagtgtactctgagccaactgataggacatcctgtgattcaaaacttttttttttttttttggagacagggtctcgctctgtcatccaggtaggagtgcagtgggatgatcagggctcactgcagccttgacctcctggcccaagccatcctcccacctcagccactccagtagctggactataggcatgcgccacatgcctagctaattttcttacttttttagagacagtctcattatgttgtccaggctgctcttaaactcttggcctcaagtgattctcctgccttagcctcccaaagtgctgggattacaggtttgagccattgttttaagcccgtacttgcaaacggcactgcactaggtgatatcttggtcatctgtgaatgctgtggcctgtcactggccattcccctgcatagcttgtccagttcaggagggccatgtcagccaaatgtggtggccctttgtgtttggggcctgcaggtgtaaggtgatgagaaattgcactgatgctctcggacaggcgtcctccatcaagcttgctctaaaatgtctgtgggcaaatacagcagcccctctgtgtcccacataccctacagggtccagtaggggctttgtgcctttccaggaacatggcaaaaatagaagcccaaggagtctccccatctttgaatgtcattctcatagaaatgctcatattttattttatttatttattaatttatttttgagatagagtcttgctctgtcacccaggctgcagtgcagtggcgcgatctcggctcactgcaagctctgcctcccaggttcacgccattctcctgcctcagcctccccagcagctgggactacaggcgcccgccaccatgcccggctaattttttttttttgtatttttaatagagatggggtttcaccatgttagccaggatggtctccatctcctgaacttgtgatccgcctgcctcggcctcccaaagtgctgggattacaggcgtgagccaccacgcccggccagaaatgctcatattttaaaattttggtctctaactttgactcccaagtgtgaaaagaaggaaaaggaaagtcgtggttgaattggaaccatgaaaccagcagcacagagaacctgggaatcagagctgtcagggcctggtgttgatccgagagccctggtcctgtgccagcggagccattgggcgatactgggagagctgtcatgagcagcatggcatcagcagggacacctgggcttgttctcggcttcctcaccctgtgatgacgtcccgggcaaagttgcacagccgaaggttccccatgaactgacttctgcctgtcagatgctatgtggggacaggtctgatttaggagcaaaggtggaggtcagacagagctgggtcctggcccagcccctgacaggggcaaagtctcctcactctgggtctaggacttagggtaagggctgttccaagggcagaagtcaggcttaaagtgcacagccagcgttgtggtacttaggtttgttgctggtgttaggattgctctgaagggaacccactgtgggtagctccacatggctgatgccgcatgtgtgtttggttagcctctgcaccacacatccttgagctgtaatccagtgggggagctccttagacacagaggccttttgcacaacttaccacagtggcttgggctgcactaggttggttatactgcttgaggagtaatttttccttctttgtataaaagagaactgagtttactgaagagtcatctcagacatcctttttaatacttcagtattctgttcctgccatttaagtagtattgactattttcagagtaaatggaaccaacgaaagagaagagcttggagaaagcacggcctccagctgtgaaacgcgcaagcacgtcttggacggcggggagcctgtcttctttctttatctggaggatcattgtcttggtgccttccctgggttgggacttgtgtctcttcctctgtcctgcagttgcacacactcagaagggccagggaaggaccccagattgatcctctgattccaaatgaactctgttttgtggtattttaaatatgtggcgtgtgaaatattacggaggggtgaggaggcctgccagagtggtgtgtatgtgcctgagtgtgtgggtgcacatatgcatggctatgtgtgcagtgcatgcatgcatgattgagttcatgcatatgaggacaagcagtgcacacacctgtgattgcatgtgtgtgcatgcgtgcatgcgtctgagtgaatgcatttgcttgagcgcacagatattccacattgtgagggaacatgtgagagcatccctcctgttcagaccactttgtagagttcagctgctctatgacgtccattatcttatcttgagggagatagaaacagagaaaatgtgcatgcacacaggagcagcttttgttcttgaaagagaagagagggaataaatagtgccctatctggacaagatgttcaacaggcttatcttgctgtgtgtcacctggttgttaaggaagatgcagtaaggcatgctgtctccagataatggtttaaatttcacacgcttctggcaacatccaggcactcacgagaacaaagcccagtgtggtggccccgtggcccatctactggtttctgttggtaatgatgctttcccgcctcctcttggaactctctggagttctgcttcggtgggaggcagcgagacacctagagcgtcacctccgaggattcaaggcccactttggcctggaggaccccacacgtacccaacatggacaagcaacggggctgccagctctgtcctcgtgcagcattatctcctgtcctgtttggctaatgctcctctactccagggaacccagtgtagcactggtttttctcactggtgaaatagatttttggtcagtggaggtaacaagggaaaaaacagccatgtaccttttttcatcccttgaagaaaatcactcatggacagctatgatgttaggtgacttcacccctctcctcacgcctggtttatccctttcttctttacctcctcctcccctacagcttactttccaccgcagggatgcatggctgctcccattgccttttttttttttttttttttttttttttgagacggagtctcgctctgtcgcccaggccggactgcggactgcagtggcgcgatctcggctcactgcaagttccgcctcccgggttcacgccattctcctgcctcagcctcccgagtagctgggactacaggcgcccgccaccgcgcccggctaattttttgtatttttagtagagacggggtttcaccttgttagccaggatggtctcgatctcctgacctcatgatccacccgcctcggcctcccaaagtgctgggattacaggcgtgagccaccgcgcccggcctcccattgccttttttaagctggttcctttccaggggcagccaggatgcaggcattatggacacacaggcacctgctcctgctgtgtccctgttcgtggctctgggcgcctcagctaggatgggatgtcttgtctagaggcagtagaaagagatcaggatgtggggtcaagttctggctgtgccactcacaccctgggcagttttggacagtaggcttttatgaagcccattttctcaaccctaaaatgggcatgaaaatgcagatccagtggtgcagagctgggactcagggaggggtgtacgtgaaagggcctggtctgccaggccagtgaggcaggacgggaccaccgcctccccaggggacggctgcttcgtgctggcaggcagtgctgcactgcaccctggatgtgccgcctctcagagggcgctggttcagcttctccccaaagagttgccctgagcttgctggctgtgaatcctgggggtggtgtggtgagttgcgttcacctttccagcctgggtgcctgcagtgcatgcatgtgtgttcttgtgtgtctgtgtctgaattcctccctcactccttgctctcctcttagcagtcccatatggtgaagctcttctgccttgagccctctggcctggtgggcttcagtagggtctgtccccatggtccctgggtcctttctttgtggtgggtggtggcaagcacacagctgctttttgcagagagaactggcagaagctgaggatgtggtaggcttgggaagctgcatgtcctgttgagttcatggcaggaggtccattatcaggagaaggaaccaggaactggcccagatgaaggaaaacctttgccttctggaggaaggagggccaccgcccttcagggagcacttgcaggctccatccccgaggagggacccccactcaaggcacttggtggaggcattgggaggaaacagcagccatgggcaccgttggaggcagaggcattctgactcaagggacgggcccacctctggtttctggcgctgttgactttagcatgtggtgagtgttgtgcccttgggcatatgtgcactgagatcttgaggacttctgttggagaagtgtctgtcttcttctttctgtggcatagttttttggaactgcctcacgtgtgccctgtgttatggtcagaatgtttgtgtctccccaaaattcttatgttgacattctaaccctccatgggatggtggcattaggagatggggccttggggaggtgatatgttttgtgagtggagcctcatgggtgggattagggcccttatgaaagggaccctagaaagctccctcacacctttggctatgtgaggatgcagtaaggaggcaccatctatgaaccaggaagtgggtcttccccagacaccacatctgtggtgccttgaccttggacttgcagcctccagagctgtgagaaataagcaactgtttataagccacctagtttagggtaatttttaaacagtagcccaaactggaggagacatcatgtttttatgcacatagctctaggaattatgttaataaacaatagaaactctttttttttttgagatggagtctcgctctgtcacccaggctggagtgcattggcgcgatctcagctcacagcaagctctgcctcccaggttcacgccattctcccgcctcagcctcccgagtagctgggactacaggcgcccgccaccacacccggctaattttttgtatttttagtagaaacggggtttcaccatgttagccaggatggtctcgatctcctgacctcatgatccgcctgctttggcctctcaaagtgctgggattacaggcgtgagccaccgtgcccggcctagaaactctttataaaaaacatacaggattccatgtttcagaagtcttttagacatgattgttttcattagctttttcagttatgttaagttaatgtgtgtgctagagaccaggaggtgttcagggatgctcccaagcctgaggtgccatggtctgttgaggccaaggggccctgtggacaggaggtgtcatggtgtaggctgaggcggctgagataagcccccatcatcagagcaggagtactggggggtcggaagttacgtggaggctgtgaggctggcctgggggtgtgggtgggatggactaccagtgcagaggcttgcggctcagaggtgggcagatctgaaatgccttagggagacacaccagggaatgtcacccgtcgagagccctaggcctgcaaaggctgctgatgcacagaggctttagttttctaacttaatgcaagcaacaaatctatgatcctgcttgcctgtgagaaggcgggggatatggtgtccccacttttggggggcgggcatcccatccctgctgatacctgggacccagatccactgaatgggagagcccctggccaggctttggcccccagccctgcctgctgctccacccttgctggccttcttcctggaggctgggccccggtctccatcgccgtgcagacctcccattcctccttcctaacccagcttccctgggtctggccctttgtctgcccaggctgggatgcccttgagatccagtctcctgtttgcctctccgctcctctcctgtttgtactcagagaacggctctgggaaactgtaaaccatccagcgggaagaacctgtgcctgcatcctcatggtggccctttgaggctgtgcctgccttatttggtctctcctgactcccccaggtgctttgagaggccggctgcacagggctcatttttgacctcttgctggactgtgctgctctgcctgctgaccctcatcctttaggtttcagctcaagcaccaggtcctcaggaaggtgcctccctgccctgccgctgtgtcccctagcatctgcccttttccctccagaactatccatggccagtgactagccagccatccggatgttcactggggcagtgattctctgccctcagctggagcccaggaggcatgaggggctggctctgtgttgttcaccagatgcctgtgcacagggcagacacctccgtcccaaagtggagtgctgtcttgtcttgcagggtgaaccctcaccagcacacttttactgagcaggtgcggcagctggtgcattgcgatgcccacggtgaccaaggcttcgaagggctcggagtctagtgggctggagtagtgagcaggaacaggatcccgtgtgaggagtgctttatcagaggtatttgcagcctccttgggagcacagaggagggacaggcaattctgggaggtgggtggggcagggagtgtgggcattgtcaggacgatggaggaactgctgtgttctgatcatttgtttatgaatctatctgctcccctgggccgactgcccctactatgatgcgatgcactgctgtttcttgggtatcctgagtctcagcaaagggcctagagcccagtaggtgcacagggaatgtaagttgcatgacaatccagatgaatttgtgcagataaacacctggctcattgatccgctcttctctggcaaatccatgtgaaatggctccagatgttatttccaaagttctttccagaacaattggaggtggtgagtcccccaaccctgagggcaagcccagccccaccctggggttgacttctaccggggaactgagctcagccctcccatcagacttgccccatccagagaggtggcaacacgacagaatctcccagaagctcccaaaggggaaggaggcacccaggccaaatttcatctgaataatttctggtcggtggtggttatccgatgggaagcagcacttccctgcctctaaattctgctcctctgttgcaatacaaagcctttctcagccgcctccacacggactttactcgtggattttgtctgaaatccttcctgttttctaactctgtggctgggaagaaggcctggacccctcccagatgtttctcaacggtctgggttgtcaggatttgaggtttctgcatgccagggacgtctgggttgtgttagttgattgtgctggtggattttgatttttaaaactcactgagtagtgtagccaagctcataaatccaagtatttgttttgcagtaactgtgatctggaattttatgttaagttgtggggttgttttctgttggtttattcagatggatgtaatgctactctctgggtgttcaaggtctgcctaggtgtggcaggggggcaaggccaagtggcaacttctgattccacatcctcgaagccagggaagaggcagtgctgtgcttcacggagcccacgtgggtatcagcaaccctgggacactggcaggcctgaagtgttaagaaatgtgaggagcggccgggcatggtggctgaagcctgtaatcccagcactttgggaggctgaggcaggcggatcacgaggtcaggagatcgagaccatcctggataacatggtgaaaccccgtctctactaaaaaaaacacaaaaaattagcaggtgtggtggcgggcgcctgtagtcccagctactcgggagactgaggcaggagaatgacatgaacccgggaggcggagcttgcagtgagccgagattgtgccactgcactccagcctgggcaacagagcgagactccgtctcaaaaaaaaaaaaaaaaaaaaaaaaaagaaatgtgaggagctctgttccagaggatggagtcgaagcctggcctctgcatgactcagccagacggcccctaacctagggtgagcatggacaggcaggatcccctatcaccctcgcccctccagccagctcactgtggctagcatgggtctaggaggtgcctactgtgttaggtgctggccacccacacacaggtggacatctgccaccgggctgctgggctagtgagggacaaagaagtcctggacagtcacacccatgtgtgtgggggactggggttcttgggagggtgctcctggtttacatggtgatgagtggccccaccgctggggtctgctcacacactgagtgaggtgggggacttgtttccttccaaatgtgtatttgaaggagacaattactaagagggtttcctgagttagacttaagatgtttttgagggattggtaccatcttctttctttcctttcattctgcaatattgtataatatgatccctttgaatatctgatggagatgcagagacattctcctttgcacccgtgccttgtgttggggggggatatcttaaatggggggcaggttgacaacaaggtaaagagacaacaaggttcgtcctatacatagattatgtaagtaatgttagggatgggagctggcgccctgagacgaagcagcaggcggggcctcagtgggtctcactgactctgggcttgattctctggactgtgaagtgggcagtgaggcctggctggccctactcacaggctgtttggaggaacatgtgagtcaagggacgtaaaaggactctgtcagctcctgagtgcttcatcaacattagtcagtgccgcagctgattcagtgtcctatttgtgaagattaagtccacctcgattgatttctgagaggctcaaaggttaaacctgtgatctccagagccaggctgatgtgagttcagaccttagctccactgcctctctgtgcttcagtttcccggtctgccacatgaggacaataactgatactcatcaaggggttgtgtgaggatcagattcatgtctgagcacgtgaaccatgcccatacgataagaatcccttgagggggataatgatttatttatttatttacttatttatttatattctttcttgtagagatgggggtcttactgttgcccaggctgttttccaactcataacctcaaataagcctgccaactttgcctcccaaagtgctgggaattcaggcgtcggcctctgtgcctggccccagtgattatttttcgagaaaagaaaatcattacgtggaaagaaagagagaaagagtaaaactgaatatctggggatgaaaacttcaagagttttaggggctgttgtcttgaagtgtgttgcagtgttcttgggcagatctggcgtggggaggtgaggatctgtgaggagagtgagaacagcaaatagataagagcatggagatggccgccctatgacatcggcggagggaccttgcggcgacatccaatcctacctgtgccacacgggcgcacagagagggctgctctgtctcgaatgggagcatcttgagccttatccccattcctgagtttgtgttcaacagagggtggtctggagggtttaacttcccttttgggaggcacctggctgaggaaatggtgctgtgggaggcaggctgggtgcagccaagagccttgggctctctgcaaccccagtcaacctgccacaaaggcctgtgcaaatactggagtttgtgagagtgactatcttggttgactgattcttgattgattgattattgttgactgattcttgattgattgattattgattggttgatgccctcaacaattaattttatagtgccttttgggtggtggcctccctcaggctgtgtgacccagctccctgtcaccttctcacccatttgctgctatttttcttcttgtctcttcagacttttcttgacccccgatacagaaatgactgtggaaccctccctccgcctttaggctcccgctgcaccttcctggagttactttcctgtacctcaggtcatcctgattgaatccacggttcctgttgattttcctttcctcttgcactgcagtgtacattcatgaatgttttttgtgttcccaatagtatccaggtccagatcagtttctgccctgttgtaggtgtccaggacatatttataggcttacaaaatgtttcagctgtgggtattaatgaatactggtggaattaaggagggaataaaaggtagaagtatttagtttggtgagtattaacttgtggttagctttgtatctttacaaacatctggtttgttggaggtggtgaaggtccctgcgggtgagctcttccccttccctttcccgacgagacttatctgaggcttgccctgtgggtggctttcgggggtaaagattggtaatgacacctttcctctaggtttcttttgtcaagcgtggggctgcaggacgctgtggctggtagccctggtaagatgagtgtgatttgaagcggggcttgtggagaccatccaggaaaacagcacagcagggtttctattgcaaggttgggcgttcttgtcttcagtcaacattggccagcctccagtaggaccatagaattggcacaccccatgacactgtgaaggaaaaagagcctgtgtaagtacaccaggctgaattgggatacaacacatgagctagatttttgtttgtttgtttttgagacggagttttgctcttgttgcccaggctggagtgcagtgctgtggtcttggctcactgcaacctccgcctcctgggttcaagtgattctcctgcctcagcttcccgagtagctgggattacaggcgcccaccaccacgcctggctaatttttgtagttttagtagagttggggtttcaccatgttggccaggctggtctcgaactcctgacctcagatgatccacccacctcggcctcccaaagtgctgggattatagccgtgagccactgctcctgacccacaagagctagatttttatttgtgtgtgtttgtgtatcttcacaggaaatcattttagccattgctcttgtcagcgtagtaggaggaggacggacctggcccatctccttacgtgctgccgcatgtgtagatggggcattagcagggtagggggtgctgcttactgagttggagctgggagccgggcacagtcactgtgggtgtagaacggggtagaggcaggatgtggggatgctgcagctcattgagttgagatggggtcctgatagtcactgcaggtgtagacaaggcagaggcaggatgggaggatgctgctcactgagttgagatggggtcctggcagtcactgcaagtttagatgggacagaggcaggatgtgaggactctgctcactgagttgagatggggtcctggcagtcactgcaagtgtagatgggagcctggcagagtcagggatgggctgctccacaggaagctgtggccctggacagttgcaccctatttctgttcctcagtgccgtgatctttacaatttgtacattagagtagttaatctctaggattttctctttctcaatagactatatagagaccactccccaaatagacaatttcatagtgttctctactaataattcacatatgtcatatacatttgcattttgatccctttgtgtacatgctacctggaaacaacaaggtattccctttacatagattatgtaagtcatcatgcatcacagtgatgtgacgttttggtagaggtgttctttctttggcttatttctggggaagcagcagagcgtggtggaggtgaggtggatggtggagacagcctgccagcattcctgctctgcctctttctgcttagagtcattgtgaggaatagcagggtaaatacacatgaaacacaaagaacactgaggagctccagaaagtgttcaatggtgtcagtaatgacgatggtgataatgatattgttagtgatggtgatgagggtggcaatggtatgccgataatgatgttgtaattgatggtgatgatggtaacgatgatggtgatggtgggtggtggcgtgattgatgatgatggtatattagtgatgatggtgttgatggggatggtgatgatgatggtatgatgttggtgaagatggtgatggtcaagatgatcatgatggtgatggtgagtggtgatggtgtaattgatggagatgatgatggtgatggtgtggttgatggtgaccatggcactggtgattatgttgacatgatgatggtgatggtgacgatgttgatgaatggtgacaatgatggtgatgatgatgttgatgacagcaatgatagtgctgtgactggtgatggtgatagtgatagtgtagttgatggtgatagtaacaatggcaatggtaacgattgtgatgatgatgctgatcgtgatgatactgatggtgatgatagatggagaagggttaggggcatattctgtgatgcaggccagtatttctaccgttccttttctggctcattcttggactttcaggtccctgactttcacattttaacctcctagttaaatgcaaatttcatatgtggttaagtagaaagaaaacatttcatcttttaaaaactgttatgttaacatgtaagggccctgttatctctactcttggaactttaagtaagggaaagaaaagatagaaatgacattgagcaatggggttaagtgtccagttgtggtttttcttacactcctcaaaaccttgctggtgtgctcataccatcagttaggactctgaggcaacccgttctcactacatgtcactgagttcccttgggtggcctaacatggtccagttgccatcgatatcccaaaatggttgtatttcacagaggacagaggaaggtgctgttatgggtgagtctcggcattctggaattgagtagattcggccccaaaagttacaagttttgtgggacttggtccctggaagaaggtagatccagggaggatccagggtcagaccacgtgtaaatgctccccatttgagagatggttttctgggatctaatagtggaatcagcgagactatcatggaatgagacaggatggcacagaataaagaagtgctgcaacaagagagacagctgtagggaaggcctaaaggagatgagagttgagaaaggaagcaaggagaaaggagaaaagaagcaaggagaaagctgagaaaggagaccagagggaaagtgggatgaagggagttttgtaagaaagatttggtaatgggttgttccacgcggttaacccaacattattaagcacctgctaggagagaaagatgagagttttgtgtcctgtctttgagtccatcggagtcagcaatacactaagtgattacagataaaggtttggagatagacgggcaggtcggtaggtgtgtgttttttgctttgggccaggtgcagtattaggactccaggagaacatggtagttatttaaaactaacaaggcaacaatggggtcatggggttgagcagtgaatgtgggcattgggcaggccttgtctggcggtcccccgctgtgggttaatcagtcccctcctgccttgtggagcctgttactgggacacagagaggctggcaaacttgacagttgatgctaggagaagcagagggtgactcacaggcttgtttataacttggtcaatatgtttcgagtgttgtataaaagattctgacaaccctgtaagacagtggcctggattcccaaggctggtggagacgttgtgaagaatagcagttccaagacaacatataaaaatgttgggcgtttgcaagccagacagctctgggctgtaactgctgcagcgggagccaggattcttaaacatgagtctggaaacctcgtctgacaagggaactgatgtgtggtttgcagactgtcagctgtggagccgagtgttcaggcaaagccatgagaaggggcctgccacacaccagctcagacgccggagggtaagctgggctggagaaggttcaggctcctcacaggaaaacgcttttggtggagcctacttgcatggaatgtcactgaccctctcacttgagatttttcagcttttcagtttttgcaagttgatggatgaaaagtgatgtctcctttttattatgtttttcattcatctggtgattacatgaggttgaacatctaaaaagatacaaaaaagctgcctgcagcatttctgtttacttagcaaagtagcctttcaaatcctttgttcattgcttatttaaaaattagattattttagggcgtggtgaggtggcttatgcttgtaatcccagcattttgggacgccgaggcgggagaatcgatcgaaaccgggagttcaagaccagcctgggcaacaaaacaagaccccatttctacaaaaaatttaaaaattggcctgcacagtggcacgcgccaatggtcccagctaccctagaggctgaggcaggaggattgcttcagcctgtaaatttgaggctgcagtgagctatgatcatgccactgcactccagcctgggtgacagtgagacctcatctctaaaaagaaaaaaataaataacattttgaaaattaataaatttaaaaatcatttttttaaatttctgagacttcactatattatgaatactaaatcttatctgtgatattaggcagaacttttgccaatttctaatgacatttgtcctcagaaaaggtcagtttcttatctttccactttgtacattgcaaacattccagtcagttgcttgtctaagtttgtttgtggcctgtttgtcacgcaaaagttgtaatgtttggtttgttcagatctactcatcttttcatttagttcatactcttgttccttgttgtagaatgtctgcccttttccaaagtcacaaagatgttctctgatattttattctaataattcatttcagcttttccaattccgaatcagttctatgattgatgcatctgaaattcatggtatttctgttattattatgatgatgtttttcatggagtaaccagttttcccagttttgttgtctggctcctcctttctgtctgagttgtgaggtctctctccagtgtcattttctctcctatagatgaggccaccgcgcatgtctgtcggtcacaaagtttatttcatacaacacagagtgctgtatatctgttagccttgccttttgtaagaactctcacatgtgaaatagtttgagatcataatttttcaatagctacctaatattttgtttgtatatatatgtaattttatctttttattgcttaggtaaactattcttttcatggcagagaggaatcttggctatcaccctgttctactcctaattacagaaggggaaatgtgtgccagaggggacatgactggcacggatccttggagaggggctggagtgagcatgtgagttcagactcctgaggtccctggacacctgctcctggtcctggtgtgtagctcatggtagatgtttgctttagtgggctcatgcatgtggagccccagttcttgcaccaggcacagaagagcctttgcacaccagctcactgggtgttccagtccagctctgggaggtgggctctgcccatctagagctgggctggcagctggtgtcactgcttaacctgctctgtcgcccagggcaggcagcttccgctctgtgctgcagtttgctgttcgtgcaacggagtgagaatgtgactttctccctggtccccatgggaacaggtggaacaaggcgtctaaagtacatggagcttcgtggaaggcaccgtggcagccaataacggggctgcatggaaggagcctctcccagccagcagggcatgtgtcttctgcagggggaggtgcagcggccggcaggctccgggcagtgtgcctgggccccggttctgcaacccaagttctccaggttcttcttgtgggtccagctccgtgctcagagggggaggttccagaagctgaggcattttcccttgcttcgtttacaggagtgggaaggccttcgccagaagcccctgggagaattcacttacctttctgttggtcaaagttgggtccttaccccattctgagagcctcaggcaaggagaatgaacggggttgccctcgtgctgcgggtctcgggcacccactgctagggtcctagaagaccctaaagggctcctgtcagtgtggtttgtattcatcacgatttaccctattagaaatgggaaactgatgagtatttaaaatatttaagtcagttaaaagcaatggtaatgaaccaattacatgttaaaatgaacataagcttaataaaaaataactatgtttcaaaacaacaaaatgagaggaggtgcatttttttttgtgattctgttatgcagccttaatcaagaggctggttacccttgcatgcagtcttctgcaatgtttggtttgaagcgtcaaagacaatctagccccataaacatatctacttggaaaaggaggcattttaataggcttttccggccattgtagctatttcattttgattctacaccagaactcaagtgacagttgcttaaagttcagtttcactgtggaatctgaaattgtgtcagtagagtttttcctacgctgttttattaaaatccactggcctgtcttgcacaccaagtgcatcttttacccggtgtggaacaccacgcactggacatttggaaattattggtccactgacaatttcgcagaacttctaaatgttgacatatttgttatacaatctcaggaaaatccccacatttgttaataatattgttgattttaacagaaatgtcctaggagttgttaggccctggtgatgggtacaagtcttttttttttttttttttttaaagacagtcttactctgtcacccagggcacgatctcggctcactgcaacctctgcctcctgggttcaggagattcttgtgcctcagcctcccaagtagctgggattacagacatgcatcatcatgcccagctaatttcttgtatttttagtagagatggggtttcactatgttggccaggctagtctcaaactcctgacctcaagtgatctgcccgcctcagcctcccaaagtgttgagattacaggcgtgagccaccgcacctggcctgggtactagtcttttaaaattctaattttcacttgaaatctcaaattttgacattggtttatgatgacagactcacttcatttttgagaaaatgacaagcactcgagtctgaataactgcattttgtctgctaggagttctttcaaataaaaatgacatcccctgagaaggtggctagtttagctgccagctcacacaactgctattccaaaaaggaggcgggtctgcctggctgagggtcaaagtgaacacatacgttttgtcttctgggcctgtgtgcttcagagatggattttggtgcgaagttcttcttctgttttggagcctcccttctggccagcaccttcacagccccgaatccctaagtggtgatcaggtaatgaggtctccatagcttgtgggcctgctggctatgggcttctgaaagcagacctggaacaggtcaagattgggacacagttgtccagcacgtgaatcctcagtctcatccacaaaccccagtctcacattagtaaaacaggcgaagataggtagcttctttccagggtgtggtggaaatttggcaatacgcatgcagttcaaacttttaggtgctgagtgtattagctgcctgttactcgtgttagtgctgctattgtgagaccctggtcatgcacaacagagacgctgtcccttgaggagcttgcagcccatcgggagagatggacacagggagatcatcatgatatgacaagccatgatgacctgccatgatggttcagtggcacagaagggtgtcaactcaggaacggaggcagctgagccgggcccaggaggtgggtgcaggatggcgtgaatgaggaggtgaggttggtatgggcagggttagggcaggcaggggtagggcaggcagggggctgtctcctgtgggcggcaggataggaagctgggcctgggcactgtttgattcatattttgtaatatgtcagaaaggcagggagagtatggctggatgcaaacactgaatttgatgcacagacgggctggagtcccaccttcatggaccatggctgcccccttggctgagtcacccttacagtttctccccgagaggtgcttacgaggagcaagtgcagtaacatacgggaaagtatcttgtacactgcctggtgcggtgctgaccagagctgggccacggatagattgacggtggacttgctactctgaggattatccatgctgctgacaatcgagtgtgaagtcctagtccaaacatttgtaaaactttgagggtcacttgtctacataccagaaacaatggccctgcctctcaggattgtagtcttggctcatgggcagtttatatgatttcactatgataattgaatttaatgattttgccctacagtgccgatggctgtctggtggccgagtaggccacccaccatgaatgtatcataccactgccacccttgcactgaccagggccatttttttgtgttgagttggcgtgttgcatgacaaatgatccccaaagttagtaccttaacatagcagtaagcatctgttatctcccactgtgtcagtgatcaggaatttgggacacaggtgactgggcagttctggctcagggtctctggagaggctgcaccatctgaaggcttggttggggttggagaccagcttccgaggtggcacacttctgtggctgggaagctggggccagctgtttgtgggaagcctcagttcctctccatgggggcctctccacagggctgcttgagtgtcctcacaacatggcatctggctgtcctcagaatgagtgatcctggagaccaggacagaagtcacgatgtcttttagccacaaaagtcacacaccatctcctctgccaggttgcactgtcacacagcccagctgattcactgtgggagggggctatacaccagcatgggggccaagagacgaggtcacccaggccatctggaaggctaaccgctgcatgatgtcgtggtcctgtgacatgctgctagacgtgtgtgggcagaattctttgcctgactctcactcagccagaggccagaggcctgcccaccgcccttctccttatctcagtcctttgtgctggcctctgctggggatggtttctgtctggacttttaatcttgtgtggaagccccttgtttcccaatggcaagtctctcttgatttgaaaatcactgatcacctttgtgtgttttgcccatcagaaggtgtaggataaatacatgtctttgtgaataatcttacaaacctcaaggtatagaatgacaattcagcaattcaaaaatatagatcatacaaagataacaacctagctgtaactactggagttctaataattgccaggcagtgggcaagtgaccttatctgtttcatcctcattcaaccctacacaaacctttttgactttgacacatcatagaaaacagagtgcaggagggggagtgagacattgattaaattcacggggtgttgacacgcagagctgggatgtggggcccctctccctgacttctgaggccttggtcttcaggtcccacacacttctgcatgtggacattgctttctagtttcaaagcagggtcccttgaaggattccatttgacccatgatagctccgtgggaggaagcagagacccagcttgaggggcagagcctggataggaggctttggtcactgttccccaacccaggtctctttccctcctcccacagctgtccctgtgggctggcaaacgtgggggaagggagggcatgtacccgacgttcccttggagctggcacaggaggctgtgttgggattattaggtgttgttgcttcatttctctctccctgtcctgcaaggcctgcctgcagcatgcccgtggtgctcgtggggaggtttatgcctcatgatcacagctgcagcctctgggcagaagggcctgtgaaatccgcattggttccagctccgcattgcattgttagggcctccgaagggacacaggactcgctccgttcacacaatggcccctctggaaggattctcctataggaatttagacatgaatttattctgacagtcagttctcaggttggccggaagtggaagcacttccgaaatccagatgcacgactttctcacaaatttaaaggctcccatccggtctttcatggacactttaaattctgattcttaaggggcatcttccagtttctcttcttttttcagggatcagctataatttctgggcacacacgaatgcattctgctgctgaaattcactattcttctttagggatccagttcggctggacgtacataccccttgaaaaaccaatctgctcatgaccccttgaaaaaccaatctgctcatgaccgtgctcccaagacattcctacctgagccacctgagctgttgctaacagacaacagttgtaactctgctcttgcacaccatgtcctcactgccttctgtccacactgccgtgtgtcatatgtaaaaatctctctcgtgccagagagaggccacctatgggatcttcaagccagagactctgaaggattgagagggtttgaagatgtaagaattcttgctagagagactgcttgacacacattctttctcttttttttttttccagcctgcaagtattcctgccacaagaaatgtgaagccaaggtaagcattccgttgctttcccatgggactttttatagctgacttggccttcattgaatgatatgtgtgggggggcctctttggactgcagccacggaaagaaaactctttaggaaagccagggctgggatacggtgtatacttttcatctcaaggataaaccaaagagctttgaaatccacggttttgattatggaaaataattcttaagaatttgatttcagataagaattcaatagttgtcccctggccacatcaacagctccttctcagtggcacatggtccctggtttctcactgccttgtcatactgcctctcggtggagagagggcaggagcagggaggtccagggcattcccctggcctggagacttttctgcctcattttggagatagttgtgcatagacggattggggttttcagctgccacggaaacctgggaaccctggagtaaggtttagtgatgttcactgaggtttgtgagtctctagagaggttcaattgcccgatggcctctatgaccaaaggaggcctggctatgtcctgttgggcttagggttttggtgagtggggaagtgaggtggcctggaagtgccgtgtgggaagtgacagacaccccaaggaagaagcacatggttttctacgttgtcttggtgctcgcaccttcagatctcctggggatggtggctgtacttacggaatccccaggtatgatttgggtctgcagtcggggtgtcagcagtgttttgccccatctactgtttggccctgcctatgggggctctgtaggtgccctgacaggttgtccccatggctgtaggtccagggaagaggagttttagagtcttgggattttgctactgttacagacctcatgggtcagctgttttgatcatttccagccctgccttcggctccgagtggaaggctatgctggaagctgacttcatgttaccatgaactcactgcatgtgggtctgttttccatgtgaggactagggcggctggtttccccgaccctcccgatctcaggcatacacaaacacacacatgagtaaatacacacatgtgcatgcacataaatacacatgcatgcacataaatacacatgcacacaaacacatttgtgctcacacgcatacatgcatatgtgtgcacagaaatacacacacacacacacacacacaaagttggaagaactagactagtatagctctatttcttttctcccaagagactttttaaagtcttcattatggagaatgccgagcacgtgcaggagcagagaggatggcacagggccttgctgcccccttcctgaaccccagaccagcagcccctgtgacctggccacacctccttgctggctgcctccttcagatgtcatgtggggtgcacttctcgggcctcctgggggctgtgtggagcgcttctcctcttgctttccaccctgctctggagagggcttccccttttccagaggagtgggcatttcttgttcacacactcctaggcgtagctgatttctgaccgtggtttatttgaggttttttgtccacagataggctcctttcctggggtgctgtgcaccttcagtggtgtgggagcagtgcttctgaatgcagtggtgagtgggaagattgtacctttgggggagcatttcagacttggagagcttccccctcccctaggaggactgggatgtgttgtccctcacccctgttgtatggtgcctttgtccgcattgcttgcaccttgggtcggctgcggagtaggaggagggggtgggctgcttgtcctgactctgttgtgggcccagccacctctgagccacagccgcagagatgagcctgctgttgttccttccatttcttaaatgaagcctgtcgccggctgcttaagggattgaattctttggttcaaagtgtattccaaaatccttaactatcactgaatatggaatttctaacggcagcaattggcagtttgctgagggatggataagctcttattcctatcagatcacagtgtggggaaatatatccgtgttcattttttttataatacagctttgaaccacaggggagaaagcccctggcaataacaaagcaccttctcattccaaaaatataatgccgtcgttgttggggatatgagggccataactccccagctgctcctgcagggtatgtggctaagggagccgctcggtcttccaggaactgaatatggctgtggcttctcccacattattgcactcggcttttgagtccttcattactgtgtttacatatattgcccagtgggctccttagacgctgcactcagattgctcaggcaagtatgaagccttggttcagctcataggctttggtctggcatcagacccaagactgggtggtagcgtgtgctgtgttaaaccccctcgatggtgttcccctctgtgtgggagcacttgcgcctgtgtctacaggctccacacatgccctggagcatgtggctggtgtgtggtggtgctgttgatctgctgctgtcagtgacattgtcacaggctcctcccatccaggccctcagagccccttctgtggcactgacaatgtggagaaaccatcctgcagaaatggggaccgagacagcagctggggacctgcctcaggcagggaggcagagccatcgttgggacattttgagaagcgccaaaagactgctatcactctcttcttgagccattggacagtatgtcctctcaggccaggccatgcagctcagtggatggatggaggcagagacctggacttggatcccagtggggctttttgtctcctgaagcctttctagtcccccttgctatggtcttgatgtttgtgtctcccccagattcctgtgttgaaacctgacccccaaggtgatggtagctggaaatggaggcctttggggagatgattaggtcgcgagggtggagtgtctataaatgagattagtgcctttataaaagggaccccagagagatcccttacctcttctgccatgagcatacatggcaagaaggcaccctctatgaaccctgaaaagggcccacaccagacactgaatctgctggtgccttgatcttgtacttcccaaccctagaaccttgggaagtatatttctgttgtttataagcctcccaatattttgttatagcagcccacatggacttagataggccctgagcctcactttcttcctgcataaaaaaagtgaataataggtttctgtaataaacagaaaaataactttctcttagctgttggttatgttaatacttacttaagtttcagggaagtcacataatgtatgtacaatcacttgaaagtttgggatttcaactgttttgcttcctggaatgcagtgcttattcatgtgagccacatgagctgtgtgggcatcatgacttgcttttttcctggctgtcacttgacttactggcaagagtgaaaaaagaagtaggagaaatgaagcagttgtaggaaagcagatgttggggaggggagaagggggaggaaagggtggcaggtggtgcccccctgaaggaaatgaaggggagcttaggcaagcagatggaggcatgggaatcctatccttgaaacctgcagcctggcatcatggtgagatgcctcttccgcctctgcccacttgcagacacatttgctccttagagttgcactttgtgtagggtattgagtatcatcttgaatcatcagaggtgaaatggacctgcagataatttttttgtaaacttaagaccccacgtagggaccatacgcaggagttagtgaggggaacatgcgcaggagtaatgttggggagatgccctgcacagggtcccgatgcgcagctccccctttaatccaggaaaaacacagaacctcctaccacctgggctccaatgctctcagaccccctggctcatcctcagcctttgcagcctggctgcgaaggtccagcttgctgtttctctctctgcatgtgcctcggtttgcacccttcttggatataaaatacaggagtgctggtgttgcctccttgctgagtctgtagaaggagagtgcagcaagaggagagaggtcccaggctctgtccagcctcttggctcctgcaggtggcctcagcatcttcttccactgtcccggtgctacgtctgggcacttgccaagccaggagcctttccccgctctccagctcgctgcttgagggagagagaactttgtgataggcttgctgctctttttaagctgagactacaggaggtcctggggaagtcagcggaaccccctgctgccctcatcgcctgctgccctgggggcctttgctgggctctcccatcagggatccccatgtcctggctgcggctgatgcaggagctttttcacttccaccagacaggcccagggcaaagacttggtcctctgccatggaaaacacgggacctagagtttatggcttcttcagaaactgtccctagacattcatcctgggcgtcaacagacgctcagtggcctaactgataagtttcaaccattaacttctgtctggcagttaactttcatcttcagatcactccttttctctgcatgctaagagccgcagctgccgtgcagtgggatacgggcctgctgggtcccagggattgacctctccagccccctctccccattgtctgatgaaaaacctcgagaccccagggaggtgaaacaacttacctattgtcacctagcttctgggcccagaattcatgggcgttgcatttcaaagttctgatttttgctgttccatgtgttctttttggtgctttgccatcttcatgtatcagaaatggagctgaggtttgtgtgggtgactttagcccaccttgctcgtatgcctacagaacctactatgcctcttgtgaactccagctccagggccaacttctctaaaacacgagttgagcgtctctcccgcttggcttggggctcactcctcttgggctgcatctctatttctctctcatgaaatgatgcctgagaattctctgactcccgcatggctcaggcctcttcttccccgtgaaggctctgctcatacatccgtggcatcttgtccgagactcccagtcctcccacgagacagtgagcaggggcagtatctctccccaattcccatagctctttgcaaccctgcaggggcctcggctgtcgcagctgtgcgtttctgttttggaccttctcacccgtgcacaaggagggaggctgtgggagctgctgctttgctgaccctgagctctcggttactgcattctttgagcctgtctcatcttccatgtccagaccttaccctgtctagggccccagagcctccactctccagcatcccaccagccagctccgctctgctcagggcaggggcctgtctttcctgccagcacacaggccacggaggctgcagactctcgtccccaccttcagcagggttggtgctccctgggctgttggtggaggatggaatctggtgaagctcattgccacagcttttaaggttggggtgtcagctttgacctccccaaaaggtgtaagtagtggcctttcttcatatggtcttcactaggaatgaatgatctgaatttgctagtaacaaggcctaataaattctttctttctctcttcctttctccctccctccctccctccctccctccctcccttccttcctctcttcctccctttctttccttcctcccttcctctcttcctccctttctcctcttctccctttctccctttctctctttctctctttctgtttgtctttcttccctccgtcacccgggctggaatgcagtggtgcgatctttcacagcaacgtccacctcttgggttcaagggattcttctgcctcagcctcccaagtagctggggttataggcgtgtgccaacacgcctggctatttttttttaatttttatttttagtagaggcggggtttcaccatattggccaggctggtctcaaactcctaacctcaagtgatccacccaccttggcctcccagagtgctgggattctagtgtgagccattgagcccagccaggaccaatacgtttttcataaccaaaaggaaaatccctggccctgcgtgtaaaagctcttttgttgtttgtgagttcatctctttcctgcccctatttgtaccctttacaatagcttcaggaagatggttactccctctgaactcagcttcttcatttgagcataggatttttagggatgtcatgagatacatctctccatgtccagcctgtgcagaaggaatgccactcagtcagcgctgttgagggatctgcaggaccctgccgagtgctttagatatgctctgtcatttactcgtcacacttctgtctgaggaggcttgttctgctccctcttacaggtgacagggctgggaccgagcagttgcatctcttgctaaggcctgcgatggtcctgccccagctcacgcggccagcacgggctctgcctctctctgccgtctcagtaaatgtttacacgggcatcccttctcctccctccccacttcttgctctaagggcagaggcagttaatttttaagccagccagttcagcagacatttcctgagggtagctctcggccgtgcacagagctggacccagatgcagcatgctgtccacagggagcttctgtctgcagccccacaggacgaaatgagagtctgattctgccagatgattgcaggtctccacctatgtttgccaagtgtgtgtgtgtgtgcgtgtgtgtgtgtgttttaatgtttgacagcttttaaaatggtttttaaaattagaagatgttatttttagagcagtttcagatttgccgcaaaattgaggggaaagaaccgagggctcacacacacgtgcttacatgtacacacgcatgcatattcacgcacagagacacacactctcctgccgtcagcatcgccgcaccagaacagcacatttgttagaattgatgagccagtattgatgagtccacagtctacgttagggctcactctgggtgttgtacattccatgggtttggacaggtgcatgataagtgacatccaccatgacagtaccgtatggagtagtttcgctgccctagaaatcctctgtgccgcgcttctctctcctgcaccccggcagccgctgaccttttcactgtcttcatagtgttgccttttccagaatgccatagggttggaatcatacatgtgtagccttttcagatgggcttccttcacttgataatatgcatttaaatttcttccctgtcatttcttggcttgatagctcatttcttttcagctgaataacactctgtcatctggatgtgccacagtttaccctccattcacctactcaaggtgggtactgattggtggcttccatgtctttcttttttgctagttgtcactactgtcagaagaaccatgaagcatccttaaattctgctctttttgaggacacttttattccttttcctgtaagatcccttttctggtaggctgtcctcaccaatcatttttgactcattttaattagaaagtcactttacacattaacaccttactagaggcatgtttatacctgtgtctctttttctactgggaactattactcctgactcccagagtctgggaagtggccccactgtgtgaatcccatcagccaaggccaccatgtgggctctaggctcactctcaaagtcagcaagccacatttggcttttcatgtcagcacaattatactttgtacaaaagaattaaggtttctaaatccctagtaatctgagcctcaatcagaggcattcattgtggacttctaggcctttcttggactcgaaggtggccagcaggaccaagccactgtcaactaaggaagtgcgtcagctgggcgacaccagctgccagcagctcggggccttgccctgtggggctctgctccttgcaccgtctcggcatctgcggggctttatggtgaccctgctggcattccacaggctgggaagtcactgagttcgccactttacaccagaggaaacaggtctttgaaactggtggtgacctttggccgggctgacgggaccatgttggctgtctggttatgagtgaagttctcgccctgtgatggcaggtttgttttttagtgcggcataagtgtaagctatatttgtgtaggaagtcctagccctgccccaaaaagaggccaaaagagaattatgatcttttgaaacaagatatttgttttaaataaataatataattttaaaatgtatcctgtgttttctctgaatcatcagttttcattccacattgtgttgtaacagatgaaacaacacatacctggaatgaatctgcacctatttgccacatcattttaactacgtggccagtaacctaattagcagctctgcagccagcatctgtatctgtgtcctgggcaggaggctagaaggtgcagccggagggagaatgtgggtccctgcatcctgcacgtggctcaggccaggcctgtctgccttgactctcggcatctgtgaaatgagggtaactttccatggcactgtggttacatgggagggtaggaggctgttggcaagggcaccccgtgcctgcaagtgtgttttattgattaaactagggctttcgaggtgccctggaaatcttcttctgaaccccacctctgtgtcttttgaccagttctaacctgagaaagaagctctccctgcagaacctccattacttgagaaataatttgggcaagcgtgctgttggttaaggttcactccccacctccaccctgcgggatgttgttgggtgtctgtttaccaggggtgtcacggaggagagaaggggccagctgacctcatgcagccaggctctgatgacagagtgggacacccagagaagaagaggcccctgaattcaaaacagatgccactttcatggtgacagtaatgaatgtttgagtgactgccctgactgggtcagatagaccagggtggggagcccggtcctggagggagccccatatagctcgaggggcaggggacagagcagcaaggccaggcatccatgggcacacgtcgctccagtgtaaacaaaaacaaaagaaaagagcacgcggtgaacatttcctgctccgtgtgtgtgtgtgtgtgtgtgtgtgtgtgtgtgtgtgtgtgttccatacgtgaaactctgtactaggcgaatacttattttctcttgcctggcctctttgggagaacagaagtacaaaatggaaatttgcatgtgtagctctcagaagcagcttctgaaactttgaggactcataaaagagaagaatgaataacagacctgggtctggatcctgactctgctttgtcttacccatgtgaccttgggcttcagtttcttcctctataaaacaggaattaacccctactaagaggactgcggagaactgaattcaacagctccccaagcacagggcctggtggcttctgcaggagtgctcttttccccttttaataccttaatctgcatcattgtattaggaatcactgtagatgtctacagtgtcagttgctggaaactactctttctgcagttgtggtactgacgctagtagatttatttcatgaaatgttgcctaccgctagcataaatcactatgcattttatttattaactgttaaatgacaagaaagtatatatattttctaaattttcttctgagaatggggtctgctcttttaagcaaacaaattccatttagtgggcttaattagtgcctcagacttagcctgaggcccacctgaaagtggttccatatggctaatggcagagccgtgggcttaatattttctgacactggaatccaagtgcctcttgctcgatgctgccttggttctggcgagctctgtgacctttcccctgactggctgcccttctttctactccccccagcctcctgcatttgcacaggctcaccctgccttggctcaccccacagaggacttccgtagtcctggcccacatcgctgcagccagggtatctgggcctagggcagagctgggtgctgcaggtgtccctgcctgcttggtcttggacttctgatgtgatttcccacaagcccctgacgagcaggtacagatgcatccccagccctccgcctctctcacctgtgcctggcgttctgtactgcgtgtgcgtggactctcccactcagactctgtttgcgttggccaccatcgcttttactcccgcttctcttgaaacacgttctggccggtggtgtgcagatgagggtttataccctgctgggggtgcagcgggctgattggcagcctctgctgattcccctggtgaaaatacctcacctccccccgcctgcttccaagctaccagcctgacattaatcagcttgaaacactcctgaaaatgccatttggctccagcacctcctgcccatcagctctggtcacaggggaaacgtccctccttccacacatgtggccccaggtgctctttctgctgactctggctgccatctgcaggagcccttggcccctttctagaagaccccaaactctgtattcccctgtgtgagctcacatcctgttcagtgatgtccttttttgacgtgcttatcttactaccccttttttcagaccaccattcagtttttgaactgctcagagtctataatgtatgcttcctcccattatcctgtcacccctcctccaggctcactggggtcctctcctctcctcaatccagggcctcttcacctctgggcttctgggctgggtggcatcggggcctctccccagccctgtggcaccgtgtgctccttctggatcacagctcttcctctctgaccctgcctctggctctgtccaggttagaaatccacttgtcataatgtgtgtggtttcgtccactgctctcctgagtggtctgtccttaccccttccctctgccgagatggaggaggaaggtgtgctgcagttggggagctgcagaacggcctgttctctttcaatgtttagacaccatatgcagtgcatctttttaaaatttctactacagtcattcttccacatggatgccacccaccctggcatctagcaatgtcatctctgcagaagcttatctccgggactttctggcagtcctgggccctggctctggctgggagactgcattctggctctgagtgtaggttcccagtgggatcttgttcctgaggcctctctatggcccgttcagactcaggtcttccagagcctgagttcaggctgggagaggtgttggaagcccgcccctgttgggacataaccatccctgtcaggctaggagagacctctgcaggcctcgtcctcagggcgggggtcgtggccctgtgcccaccatacttccagacaccccactctgtctcgtgcagcccctgccccagacgctgccctctcatgttgtcagcgtgtgtgtccatgagtctcagccccctagaccacaggacaggcacttagttgatgtgcggcactgaagcctgtgctctctggcgactgcaccagtgttgctgtgcatgcgccttcatgcctctcattgagacatggcttcacgttccatggggagaagaacgtttcttttttttttttttttttttgagacggagtctggctctgtcgcccaggctggggtgcagtggcgcaatctcggctcactgcaagctccgcctcccgggttcacgctattctcctgcctcagcctcccgagtagctgggactacaggcgccggggagaagaacgtttctaatcaaaccgctggctttatttttgtggggctacttctgaagggtaggtttcctagtgaagcccccatttcttctttttttcagccacatttttatcagcggggccaaaacccataacgaagcattcaaatccccacctccagattttgaattgtaaaataaaacttgtttcaccatgggtttccccttccccccttttgtaaagcagttaattttaggcagggattcaggaagtgcctactcccattttctgtcaagcacagaaatagctcgcggggcgccctctctccgcctcccgggagcagctggcggagttcatttttgtgtgtttctaggcatttcaactcctgcctttctgcgcactgtgtgtgtgtctgtgcaccctcaactccaaattaccctggaactttccgaagcccgcaggcttcctttctgttcttaataaagcggtgtgcaaggatctgagctgttaaccctcccttatcactggaaactgccccctgttcagaaggtctttagaataacaaactcacaactgtgtctttcaggggaggtggagtggatagaatggctgaatggttgcaatactgtgatgtgagaaattctgctttcagaatctttatctaaaacctttcgctttttcagaggtttctttacttctaaaaagcatttggaggggagtcgattgaacctcaggaggttggttagaaagcttagcactgcccagcaagagctggagtggcccaaccttgaacaatgggtggggtcagtaggaagtagacttgtgggcattttaaaggtagacctgttaggattggcatacccacccggtgggtcagaggcacggcttgtgagtaatccttaggttttgaatttgagacactgggcagagaggaatgccactggcaggattttgtgaacaggggtggaagtttagctttagacctgcaggaaccagtttaggtttcatggaatatgtttatgtggacattagagttaaatggaatgccattatcaagattttgtgaacaggggtggcagtttagcttcagaccagcaggaactagtttgggtttcatgaaatatgcttatgtggacattagagttggccagttggccatttgcagctcaatgcttaattttaaaagatttgataagttgtgagctcttagggtttctcatgttttcttttcttgtcagcttttttttttttttgagagggagtctcgctctgttgcccaggctggagtgcagtggcgcgatctcggctcattgcaagctccgcctcctgggttcatgccattctcctgcctcagcctcccaagtagctgggactacaggcgcccgccaccatgcccggctatttttttttttttttttgtatttttagtagagacagggtttcagcgtgttagccaggatggtctcgatctcctgacctcgtgatccacccgccttggcctcccaaagtgctgggattacaggtgtgagccaccgcgcccggcctcttgtcagccttctttagagcaaaggacagttggtaaaacccaaactgttcatcatgtgattgttaaacactcttgccaaaatgtatttcagggaaaatttctctggtgcctacctttgtggaatttaccattttcttccctgaataactgttgtatgtttataccttttcttccattttaaactgaatttcgaaggcaactgctaattctttctcatctccgagtgccccgaagtgtgatatttgatatgccattctgcaatgaatgaatgaatgagaggttgagacaactgacccaaagtctggcgaagtgaccagctcacttatttgtgctattccttttctttacggatgaccactgaacattgactgtcagagctctgcgcttcactctggagggtggttttattcgagatctgggcatcccctccctaggggtgaccacttcctctgccttgtcattagcaacaggtcagtggaagccagggcttgatatgaagagcctgctattgatttcatatggaaacctcagatgccacagacccccaagaagcaggagctgggggtggcattagctgatgtcatcgcccgaggctctgctccctgtgagctcagtgccgtcctgatgaatgggccttggctctcacaggcagtgggagctcctcctgctccagagctccatgtccggaaccccgcctttctcagcatgaggctggcgtggttgaaaatacaaacacctgcttgcctgctccctggtggatgtggggcccacccctcattttaaaagcctcggaaaactgtgctttgttttagtgttactgcctccttggaccttttcctttaaaataagaagaggatattacaaaatcacaggagcagagggtcataacatttctgtgctcttctcttgaagcagaaataaaagcacatcttatttgtgtgtctcctgaagaaggggccttgccactgggccttgaggcacaggcacctgcccagtaggaggtgggcaggtggttttccaggcagagggagcagcctgggctgaggctcacaggtgggaggtagggttaggcaagggagttgagcctggactatgttggctgcaggtgaggacagaggataagaagagatcaggtgtggggagctgacagtgccaggccctggagtctaccgtacggcaggcagggcagcctgccgatatgcggctgtgtcctccatgaaggcctgcgcaccaggcacatgggctccaaacccagccttcctgctgctggccaaacagagagctgtggtgaggggctgcccccactgtggggtggccagagccatgacagaaagccagtgtagggtggacatgagatgatgactccctgtcattcgtgagtgggattaggagtcactggcacacagttggaaagggagccatttctggtgccaatagttaaggtccccactcagtaggcccctacagcttcttcagagtcaggtattttaacttgtattttaaacatgaataaatcaaagcaaaatcaaaaagcgttccttcatttgcttagactaccagttgagtgttttagaatgttcatggtgtcaggcatggcatctggacccgtccttccaggagcctgtaggatcgctctcaggaactggctgtgattgatggggccatgcacacatcaacatacacccggggccatctctgtaggacatgactctcgggtttcaccgtcccactcaggcctatggtcttgggcagtggttcctccctgccttccttcaggtgaacaggacggggcgagggacatgtctgttttgcccctggttaagtattatcatgaatcagtctcattgctgcagcctcatcatcagaaaattgtccaggaaatgcctagtctgaaaaatatggagttcgtgtttcaggagagaggcaaagtctgtatggccgactgagatggccttcggtaactatgctgctgtctttgaaaggccgtggggtcccctttcaccctcactccaatctgacagtgtatatttgatatagtcccactgtcaagactttcctatgagcttgaggttcacatccaccccgcgaggtcgtattatccctatgtcacagatgaggaggaaaattgagttcacagaggacagtctccgtaaattcatcagagccagctgggagaagcagagggcttgccctaatttcagtctctggatgcaaagacagagctttttcggttctgtccagtcactctggggcttgaaacagtatatatatggtttaaaatacatatttgtttaaaaccgaagcttacattcaagaacaccacataccgtgcatgttcagcctgatgcattttttggtgaatcgcagcgtagatggacgagaggctgcccctctgcctctctgcccactggctagtgtcctgggtcatgtctgcccgcctcgtgctgaagccacagccgcgctctgtcggcctcttgcccccaccatcggcggctgaaatctcctcatctgtgacagctcatggcctcattgctgctgttggctttttcaagtgctgattttgagcccctttcctctacttcccgacacagagcactgaaggatggcattctggtgcccaacacactcgtctgggcatgctggggctgtgcgcattgctgggcacactatttctgttctctgttgttgcctaacaaatcccctgtacactcagtggctgaaaccaacaagctgtgatggattcgtgagctggctgggcagtgcttgcttcatgtggtgctgacagggggactgggtggccagaaggtcacaaacgccctcatgcccatttccaacgattggcactgggcacctcggtgcccccttgtaggtgtctccatgcggctgttcaggcttcccttcattatgggggctgggcccaagaatgggatgctccaggcgaaggcggcaactgcagctgtctaaggccaggcttcggagttctgccatattccaccactcacagcaggccacagggcaaacccaggacgagcccagactcaagaggaacagggacagactctacctcttgatgggggaatggcagagttcctttacagaagaccctgtgtgatgccaccgtctttgaaaacacaacctactaaacttattcaggcaatagcatgcagggatgttattgtagaggtaatcatcagtctcttctgatgaattaaaatgtaaattactcacaaatgtcagtgtcagtactttattactttattattaattataggtggccggtgagaattataggctgatcagatgtagctggtgaggaatgcatgagttgggacctggattttccttgtggaaatggatccagtaatgtggatgcagttaaatcttggtccttggcattataatgctctaataaaaagacggttcatcaactcaatactaccttttaatctttctgcaattaggttggatttatgatttatgagtttttcttcttgctttttttgcaagccattagcattttatcaatcaccagatgtcctctttctctttttgaaaagataaggcgtaggactgtggtaagtgttggccttcaggggtctgtagaccctgattctgcctctgtgggcctcggctgcaccatgagatgcttggcctccctgctcagccctggtcttgtaagacagactcactgcaggaaggcgtttgggcccccgagcgatcctgtgctgtgccctttgctgggacttgtgtatacagcatgcaagtgatcctgaaagtgcttttcagccacttcgagaatcccctggacattgttccaacaataggttcacatttgatttctgatctgagacaaataatggtgacataatggatagaggatactatgcttttgctttaaatctattatattccctaccagtggtaacttgtttgcctgaggccagcgaaggcctggccctgccttgtgggccatgggcctcaactgggtaaaggtagccaatgttaaacagctacacagcctaagtaaagaatgaaaaagaaggttccagtaggttcagctaagcccatctgggataggggcactactcttttgtctaaaaattattagattccatagagttggattgaaaggggaaactgaggcccctagaggtgaggagagccgagaccaagccaagaccaaggactgggaaagcttgagcctttcttttttcattttactgtgccacagacatgatcttcactagctgcttgttaactgtaaggaaaaatataatgacctgattctgggaattttccttctctttctcttccgctcctgtcccggttctcagcccgcaggctgagaaggtttaattgcgtctgccgggcgggtgttttctcatggggattagagcaggctaaattgggctttgacgcttagtgggataacagagcttcctgaggaatgtgaacctaattagggattccagggtcaagcctgacaaaggagacacagaagcaaagttagggtgagctcttgaaggaagcagagaaagttaataaagtctcgaatgtcctcattttgtactgccattctttgtatagatctgctgttgtttgcaggcttgtgttgaaaatctgaccctgggcctctcttcaaccctctacctagccccctgtccccaggcaccattggaaaagcagccttgaatgatgagtaaggccaccttcggcatgtcaggagcccccggcctcacctgggggacccagctcctgttggtgtgcccagaacgttctgtgtcgacctgacgtctccacccgtcctgtcagacctttgattgttagtgctggggggttgcattttgtttccccaaatttaaatgttgaagtccaaatccccaggaccccagaatatggcaggatttggagataaggtctttaaagaggtaattaggttgaaatagggtcattaggatgggcctaatccagtatgactggtgtccttagaaagactgggacacagacacacacaaggaatggccacgtgaggacacggggagaaggtggccatctgcaggcccgggagagaggcctcaggaggaaccaccctgcccacatcttcatctcagcctcctagcctccaggactatgggaggataaacggctgtggtgtcagctgcccattctgtggtatgttgttacaacagccgccccttacccgagctaagactgttgcttatttaagcagataaacacttgggtcagtgtcagcactgggaatgaggggactttccttctgtgattattctccttaccctgcccttgtaataaatgataataatggtaatataaacacatgaacaatgcatcctttttcaatcttaactaatgggtgaattaaagatcttgctattttattgatcagtaacatacaatgtaagaagtcaaagctgtggtataatagaagtggcccttcgtaaaagctccaccctccttgcaaccaggctgctactccgtgtagagattatagaagagtcccaacccccaattatatcgtaaggtcctggtggtcagcaaatatttggcgtccgtatctgtttttccctggctagttcagggcctcagaggtaggttacctctgactgtttttatgacttaggaaagaaagtactgccatcttggcgccatcacgaagtttctttaaaaagaattgtttttgtaaagataaaataaaagtaaacttcatttctgagtctttgcaacttatcttagagttaaaactattatgattaaagtaattttatgtatgatagaacttgtgcataaggtgatgtctctgtacttggcttaactcagtgaattgctttctcccttgtctgcaaggtttggcaaggtcagtggctggcccgtttgtctctactcagtttctacttgttttgcacctgaatgctgtcccacggatttgcattcggtgttgtgtggtgtgtgtgcatttgtggaacgcccgtttcattgctgtgggttggtattgttgagctgattctcccctccagaatcctgacatgaacaaggtttgcccaggcctgcttgataccagagtagagtagagacttcacctgtgggcagaatgacctggagaacaagcaggaagaaacgattagaggagccaagcctccaggctttccctgtagctgccgggtgtgtaaaagcatgcttgacacttgagggtgctcgcttcagttctttttttttttttcttttgagacggagtcttgctctgtcgcccaggctggagtgcagtggcacgatcccagctcactgcaacctcccaggttcaagcaattctcctgtctcagcctcctgagtagctgggattacaggcacgtgccgccacgccctgctaagttttgtatttttagtagagacggggttttgccatgttgaccaggttggtctcgagctcctgacctcaggtgatccgcccatctgggcctcccaaagtgctgggattataggtttgagctactgtgcccggcctctcttcagtccttacttcatgtttctgtgaggttctaggaagctgattcacgtgacccaccatgactggaatttttgatgatttggaaaagatagaattgaaatttacatttattctctttatacagaatatgcatgtttatacagaatatgtagtgcatcagctatacccacacggctttagagaaactgatggaaaaatgtcactttctatatggctgtttacaaagtgaaatttaataagaaacaacaataaaagctgagtttggagttttattgtgttcatcaaaaggaaaacaatgtcggtcaagcacgaggagaactgagttgtcctttatttctcccaggacttggatctcccagaagtaagcagagagggattggttcaggtttgaagagttgatctcactccttactgaggaagatctgcacccgaggccctgtgtctgttagcactgggggtaatggtggccgggccagtgcaccttggatgaaagcactttctaaggcagaatgtacttgttagctgaagtgctttcattcaccttgggggatagaactgcagggctaagctttgttgtgtgtgcacacacacaaacacacagagacacatacaggtatacactcacacacggagacacacacagacacgctctcacatcaatacacacacatgaggcataggcatacatagaaacacacacagacacatttacaaaactcagtttcacacatgcacgttcatacattctcacaagcacacacgctcacaccccctacacttttacactcccatgcacataactactgactcacccactcatatgcaaactcacaacactctcaaacttacacacattcacacaaaagaatacatttgcagatatccacagtaaaatatacctagtcaaacacagacaccaccacatgtagtcactcacacacacacactcacccacacacccacactcacacacctgcactcacccccacacacactcacctccacacacccacactcacacacccacactcacccacattcacacacccacactcacactcatccacacacacatacgctcacccacacactcacattcccaaggacacagtcatgacttggtggcaagcccttgtccctctgcccctctgtcctgtggacctgctggcttggggacaaggttattgatgccagtgtacccaggcacccacgtagccaggtgtggggcaggcacagcagtgtttgtttgtggtttccttgggaacagtagattaggatcccaggatagctgaaagaaggcaataaagaggctcccaaacaggcttctcagaggggccctcgcctccaccatgggagggacggatcccggggatgccacagcccatggcttttggcccacagcccatgacccactgccttctctccagccttctgtagctgctaacgggagctgctctgcccccttccttgtctcactgttgtcacctcttgtcaccctaatccctgagggagctgctcattatgagagagggtgcagctcctatcaggagaggagcctggagctggggcaccagctggagtcatctctgggagagttcccgtggctggcgctggccctctctgagacgcagcttctcatacacagagtgggggctcgctggccttattgtgagggctacagagaaagacctacagacagggcactgtttcgtgtttatccagctgattcgagtccacacattggatgagccgtgggcctccccaggagtgtgccttgacacagggaacgctgcctggttcttgtctcatcctctcacgcccctgcagctcactcagcatcatgttacagagcaggcaaagcacaaggccagcgggtgcccatctagactcctggccatgccaccgcacacatcccagccatgctggctgtgcactgatggggccaggcgcagctcagaggcttctggttggcgtctgcaggacggtctcaggggatgcagtgcaccgggaccctcccagccctgcagcgttgggtggctgctctctctgaataagtcagactggcatgttaagaacataagtgctaaagaagtgttagcttctttgtgccgaggaaggccaagcccacctggagttggccccgacccacggtgcttccctctgtccagtgaaaacagtgaaagaaccccacagtgctggggaatgtgtgatcagagctggagtttgaggtgaggagagcaagcaggtgtgccttactcccttacctggctccatccacaggagataccctcctgatgcatgggaggcagggcagcctgtagatcagtggagagctgtgtgcgctccagcagggatgcagctctgtgcacggaagcactgtgcttctgcctctgctaaggctgaagaacagcaagtgacacttgactgtccagcaaatgcagctgatagcaccgtcgcacagtccccataggttccttggtgctgagcaggccggtatgagcatccccagcccggccgcctcatcctgtggttctgtctgtggtcagcttacctgccttagtataagggaggaaaagtgtgacggaaatacagtctcttttcagggacttcctgtcctggaatctggttttagccacattgaaagaacaagtgccctctgtgttcacttggtcatggtttttgctaaatgagatgtttgtacttatagaaatgatgagttttctctttatcaacaggtgactctttgcttctagaatgtccctttttctctggttggtgctccatgtgcatttttatttgcaaatccactcccacaaaaggtctttcctgagacatttttgtctgcattttgtaacagcacatgtgcaaacagacagtagggcctgtgactggttctcttggaagagaggagcaagttcagtaggatgcgaatgtggaggctcagggcaaggctgcctgccatttgctctgcagaacctgggggctgctcgccccctactgttccccagctcactttcttaaaaacgattcattttatgcagtttctattacgtgagccgtaagctctgtggggttagggaccagtctgcttcatttccaagtgaagtcctggcaggagaaggctgtcagtgaaaatgtgcggcacaagtgatggatggagttcgacaagattgggcgtgccaacttatcgcgcgagccggttagccatataagccgtggatggtctggggtgagatgggactcgggcagtcccggcttacagagctcacctctccttttctgtaggacaccctggggccaggccaggtcgtgggccgttattgcaccccatctggccacagagggatgtgggaacacacagacctggcttctggaccaaatccttaagtggctgccgtctttaaaactcaagtttctgacattgcacaaggcttttcttttcattgtctcaacaaacgtgtgcttccagagagtgaatttaaaaaatgtattatagactgtatttttaagagagttttagatttatacaaaaatcagacactcaggccaggtatggtggctcacgcctgtaatcccagtactttgggaggccgaggcgggtggatcatgaggtcaggagatcgagaccatcctggctcacacagtgaaaccccatctctactaaaaatacaaaaaattagccaggcgtggtggcgggcgcctgtagtcccagctactcgagaggctgaggcaggagaatggcgtgaacccgggaggcggagcttgcagtgagccaagatcgtgccactgcactctagcctgggtgacagagtgagactccgtctcaaaaaaaaaaaaaaattggacacactcttcttcctcttcatatataaacattttccattcctgtggtacatttgttacacttgattagccaatattgatacagtcttagtaaccagagccctcggtttacattaggattctctcctggtgttgtacattctgtgggtttagacaaatgcagaatgacgtgcgtccatccttatagtgtcaagcagaatagcttcatggccctaaagagtctctgtgctctgcctgttcctctctccctcctaatccctggctttcactgaccttttcactgtcccatagttttgccttttccagaatgtcacagagttgaaatcatacagtatgtggccttttcagagtggcttctttcacttagtaatatgcatttaagtttcctctttgtgttttcctgccttcatagctcattttttttttcatcatgcttgacatgccattgcaggaatgctgatagtgagtttgaaaggcaggggccctgattcttcgcacatttcttgcctgcatgtcacatgtggagtgaggcaacaagatgcatgtgtgcactgagtagataccatgcttgaggggagataagtcacaccactctgttaaccatggggtctccttgtccggctgtttccgccatcctgtaaggttttgtctgtgactccttctgtttccaaagctgttttttgttttgttttgctttacatttatttgtttacttattctctcatccattcatcaaactttaaaggggccctgagagaggacccctgccccagacatccgtctgagtcagagccatggtggagtaatgatgtgtcccagacacaggaacggccatgtgtcacatactccctgaggactggactgcgtaagataagcaagaggctataaatagttatcctggtaagagccaaggttacgccgccgcccaccccaaaccacaagtacaattagtcagatctctgagattctctacgattctccttcggttgcacattttcagaaaactctttgagaaggcaggtgccagggatctggagggggcagtgccaggagaaagctaaggagtgaggtcactcaccaggaactgaatcctgtttgctggcgcctggctcctgagcggccccccagagcagcgcaatgcctgcctggctcccttagcccctgccctgtgccactcttctgagctcctcacgcgccatctcttaattctcaccatgaccctgcccggaaggcactattgttacctgcagttttcagatgtggaaactgaggcccagagagattaaaggccaaggtcctgtggctagtaagtggtggagatcctgcccaaggtggggtctttgccctgcaggactggtggctccctgtgcctgttactaactgcctctcctgactgtgtttgagccgccttgcctccgttactttctttatctttcccagggagctctcggtcttcagagactatggtggagtcaaagtctcctctccccgtctcttgtgcggaatggaataaccaggttgacattgccacattcagactcttcagttctacttgtagaaatagttctagaaaagatggccccttgtgtagagaatgcatgcccctgggtgaggatgggaggagtggggtcttgaagaccaccaggcagagccttccacctccttctctgggccccgctcccaagctccccaagcacggaccgactcagaggtttccatccttgaggtctaccagttctttgtgaaagtgggggctaaattttgtatctatgagtgatttgcatttttctggaaggggaggccccatggtttccatgacattagcaaaaatgacagggactttccaaaagtgaacaaaaccctggactctcttaactctaaatcttgtcagtcttgatctgctacagctttgtagccagagtgaggttagagacagtttcattcagtctttgggagcctggcttgattattatgctaattttttcctggagaatccatttgcttatctgtttcttctctctttgaaaggtggtgattccctgcggtgtgcaagtccgactggaacaggtaagccctttgcatttctttggctcccttgttccatccaagaaaggactaagtcctttcttgaagctgctccctctttggggatcttttggcttcctctaggatccatgccctccctttgacctgtagcttgcattcacaaggctctatctgaggtcctttgaccatgctgcactggccatttgcatggttttttagagaagaggatccgctgcgcctttgcgggagctgcctttctatcagtaatagttaccttcggggcgaatctccctgggccgagtttccttggctataaagtgaagacagcacaagtctgttgtcttagtgataaaaacctggacagtgagggtgcctgggtcgccaggtggctgtggacagtgtagtgcagtggtttgtagactgacatccagctctgacaaatactgggtgtgtgtgtgtgtgttcaaatcagattgaaggtaaacacaatagcactttctctttggcttgtgattaggcaaatttaaattgctgtctgcttttcaaatgcagctccttggaaggtcgtggtacctcctggtgttttctttgcctccatcctttggagctgagtgagtgaagctttgtttctgagggcttattagcagcttgcaggataattgaaaggctcactgtgccaagacagtaggatacaggaccctcttctctcactgcaagtcagaagcgactccctgggaggcaaatgggaagctgcctcttgctgctggggaagtgtgtgcaggtctgggcctccccggtggggcagggaaacaggtgcaccctgtggttcctcctgggcatctgtcaggtgtgttgttccctgtacttctcaagtagggcagggctttctgctcttggctccccctagcttcgccatacacagaatctggggtgttctgccggagatttggcagcctttctggattgtgagcctggtggcctccagacatggaactggctaactggctctgtcttgtggtgcagtaggacatccttccccaggctcggccagcggcgcccgtgtggcagcttccctgctttgatgaagtcaagatcagatcctggctccagtggctgggccttgcccttgccccctgcccatctgagccttggtttcctcctttacccagtgggcgtgggggtggctctctaacctcatcacttgagtggccaggccctgccctcgccccctgcccacctgagcctcggttttctcctttatgcaatggccatagaggtgctctctaacctagctgcggatgagagaagagggactacagggtcaggcctgtcacagaagcctggccacaggcggggtgcccttattatgctccttttaatgctggcatgtggtgtggtctctttggttctggaagagcaaagtatgcatttgaggtcataggaacgttaaaaataaaatctcacccagaaacctaaaatattgacaaactatgagaaacatgttgcagcatcaagagctgaggccgtccggggcgggcgcctgcctggctgtccctgctggcctcagctgtgtccccaggcctgtggtccagtctcactccattcctcctgtggcactcaccgccgacgggggggtgggggagtagggggcgtggggggacttgggagcctgtgtttgtagttggttttgacaggctgcggtttgtgactgatttcctcaggcttgtcataggccccgggagccaggggctgaggcccaggtggccccagagctgtgtgcctgtcccgaggccctggctgaagcctgttttcctggtggcagctgaggctctcccacctcgcagacagtcccttgccatcagatttgttggtgagccctggacatcagaggcaccagagggctaaagctgtgtgctggctctaaagatgccggttgcagggctgtcagacaggccagagcccaaagggcccatcctggctgcttagatgttgtcattgttccctctggagcccagggtcccagagaggagtcttcagtctcctggagcacagccctccccctgcgtcaggacacggcctccctgttaaccttttcacaggtgtggttgctaagagatctcgctcttctagcccagcctggctcctgcccactccccttgctgctgctctgtgtgtgtgtgtgtgtattatgtgtgtaattgttgtgcgtacaaatacatacatgtatgttatgcatgtagttgttacatgtatatggatagacatgcatgttatgtatgtaattttattggtacatgaacacatacatgcatgttatacatgtaattgttatacgcacacaaatgaatatgtatgttatacatgtgtcaacacatgaatacatacatgtgccatacatatgagagttatgtatgtgaatatatatgtatattaggtatgcagtctttatatgtgagtgtatatatgttatgtaattgtttatatgaaggtttgtatgcatatattatgtatataaatgttacacatgtgaatatatgtatcttgtatgtaattattcatgtgtgtaggtttttaatgtagttgttatatatctgagggtatatatatgtggataatgtaattgttacctgtgtgtgaacatatggatgtgtgtgtttattatgtatgtcagtttatgtgtatgtgaatgtgtgtgtgtgtgtgtgtgtgtatttccctgagatgaacatgcatgagtccactctgtactaagctctctgtggccttttcaacttgccttgaccagctggcccccaggtgtggtccctggacctacagcctcagcattgcctggggacctatagaaatgcacattctcaggccccagcccagacctactgaattgctggggccctgcgatcggtgctttaacaaaccctctggcaaggctgatcagctcaagtgtgggaatcctggctgtgggctggaactggggcagagatcagcccgtgggcgtgcagtcaggggtggccttggcaaatgcctgcctttctgggctgctctccccgtgtggtggtgtggggtcatgagagggcctttgatgccaagacacccagttccctcacatctttattttgcatggagctttctcccctaaacagggcagtgctgtcttcctcctggcatggaggagtaaatggaaggatggacgtggcagcccagcccagcctgagcactcttctgcctccctgctgggtggccttgtagaagcagacccccccatttagcggagcttgggcaggagggtttccgcctgcaccgtgtggcttctcagggcagaaagcacagaatcttttttttctttcctgatcctgtctgggctgagtcttctggcactgtgatccttggcattttggatgggcatggaattgctttcagataatactgacatccccgatgtcacctgggttgtcactgtgccctgtggcacctggccaggtcacctgatagctgtttttgtttttctctttgttaccattcattgagtacctattctgtctcagatgccctgccctccctcacctgctggagctcagaaaactgaagaaactcccacatcacccagacactaaggggcttctgctctctggggtgtcagtgcccctgcaggcccctctgtgacctgcccttagacctggctgctcttctgctctgtcctgtgctggcggcccctcccacacctggagtttacctggcacttgtacccacccccaggccctcctctgctctgcagctaacctgaggggcatgacccctttggagaggttctagaatagcttcatcccagcatgttttatcgaggtgagctgccgggtctgtcaaaattcctggagttgtgctggctgagggcatgattgttttgaaacccctgggcctaattccctggtagggcagaaagaaggcagtgatgagccttgccagccatacttaccgacatcccaggacaggactgtaagggtgtctgtcatcttaatgacatactgtgtgagggttctttgtctgcaggcatagggtgcctttgtggctccccggggcatttaagacacaatggagaaggaaccttttccgtgattgtggcgcattgaacccgtggctatttacctgtgatgttcgttttcatattcctggtagcagaatcttctgtttactgcagcagcttacaaaagtgggatgtgaggttagattaattcatggactcaaaatcggcacatagtattgttgagaaaggagctgggaggcaaacctccctttgtgaatgtcaacttggcatatgttacatggacacagggttggagcttcctgggagccagtgtgaaaaggaaaccacaatgattggcatgtgcctttctggaaggtgggaagaaacaagaatcagcagagaaaatgtgcgacgtgggaaattatggagggtgtagactaaggcatcaggggcatgcaccacgtctccatgagtcgagcagaatgatgattttggagggatgtcagaggcaagctattgcagcatagcctcattgggacctctggcttttagaactataaagggacaattggtgtctttctgcttacattaccgttctatgggctgtggtcttctgggtcatagagagaatgcttcaccattgttcaggtaactactgtccctaaggctgggagaggtggccgggctccttacaggggagtcacagcctgtggtccagctgctctgtaagtctacgtgtatatgtacacgcagtgctcacatgcgcacacaggcacagaatgtagtggtaggtgtgagcatggactagagttgggttgagtcccatccggggtatgacactggtgagctgtgtggccctgaatggagttctttcacttttctgggctccactttcctcttctgtaaaatgaggacgccaccagctcttcttggggtcactgccaggatcgaatgaaataacatgcttagatcctcagtgctagtgtgacacagggaagacacgtgatgtgtggggaagagcctggttggttgtcctgtgaaggtgagttggcagtgcggttcttctggtgcccacagcctttgctgtgtgccattcattgttgatctggttctcctgatggagagaaccagtctgatgagttccagagcgtgtcccctgcttcctgagggtgagggcaccgatgacagacacagtagatgattcctgtgatcccgcatttgcagacttggaggcaccacggtcagaacaagggcgcatgcgagtctgtccttggtagttgcaggtttgcaggatcttttcatgatgctgcggcctaacagtggtccgaatggtggccccacagcttttgattgaagttcaagggcagagtgtccttgtttttttccatcctgtgtttaccttcatacactctgcaagcgattgattcataccagcaaatcttgatgccctcaggtgcagggcagccttcactaggacaccccgaggccatgtatgggacccacttccccgcccggcctcctgggcagcccacagccagcctgagtccagggagggcctggcccccccccggggaagtgccgcctgtttacagaggggccactgtccttgaaggaggccggtgtctccgccttctggtggcggcctctggtgtgggagggttcagggcagtgcctgatccagctccgggcaggtcccgagcccgcaccagctgcctgcactcacgctgtgattgttcttgcttggccttggccactgtggtctgtggccctggaagaggggttgggtaagaatagtggctgagtcatcagggcggtgcttctcttggttcacctcacccgaggccagtgggctagttccctccaaggtgactgcagggctcacatttcagcctgaggctggagctcacactccacctttgcacagctctgtgtgcaagatgcgtgtgtctgtggtctgtggtgtgtgtgaggtgttttgtgtgtgtatgttgtgtttgtgtgttgtgtgatgcagtgtgtgtgttgtacgtgaggtgtgtttttgtgtgtgagttgtctgttgtctgttgtgtgaggtgtgtgtgttgtgtgttgcgtgtgaggtgctttgagtgcgttgcagtgtgtgtagtgttttgtgtgtgttgcatgtgttgtattgtgtgaggtgttacctgtgtgtgtgaggtgtttttttttgtgtgtgttgcggtgtgtgtgttgtgtgtgaagtgttgtgtgtgaggtgttttgtgtgtgaggtgtgtctgtcgtgtgtgttgtgtgtgaggtgtgtgtgttgtgctttgtgtgttgtgtgtgaggtgtgtgtgttgtgctttgtgtgttgtgtgttgtgctgaggtgtgttgtgtgtgtacatgtctgtgctgtgtgtgttgtgtgtattatgtgtgaggtgttttgtgtgtgtgaggtgttttttgtgtgtgttgtggtgtgtgttgtgtgtgaagtgttgtgtgtgaggtgttttgtgtgtgaggtgtgtcttgtgtgtgttgtgaggtgtgtgtgttgtgctgtgtgtgttgtgctgaagtgtgttgtgtgtgtacatgcctgtgttgtgtgtgtgtacatgtctgtgttgtgtgtattgtgtgaggtgttgtgtgtgtgttgcagtgtgtgttgtatgtgtagtgtgtgttgtttgtgttgtgttttgtgtatgtgttgcttattttgtgtatgtgttgtgttgtgtgtgaagtgttttgtgtgtgttgtgaggtgttttgtgtgtgttgtgtgggttatgtgaggtgtgtgtgctgtgtgtgtttatgtgtgtgtgttgtgtgtgaagtgttttgtgtatgtgatgtgtattgtttgtgaggtgttttgtgtgtgttgtgtgtgaggtgttttttgtgtgctgttttgtgtgttgtgtgaggtgttgtgtgtgaggtttttttatgtgtgttgtgtgtgtgtgtgtgtgtgtgtgtgtgttgagacttgctcagtatgttttacttgaactcagaaagccagacagaggaagtgaccagagcaacaagaccaaccaacacaaggacaggacagatgtgactgtcaggaagtcttgcaggtcacgtgctgccatccctgcctctgccccagtgaccgtgatggagtctcatgaagctatttgattctttcagaaagaatgctgaccaaatggatgatgaggagcttcagataaatgaaatcactttaatggtctccattttattttactgaaaaattaagcaaatttccaacaaaacacccacactttccacctgtaaattactgggtgtggggcttagtgagctgagcatccagtgatctgggacagtggatccaggtgacctatgtgggtctgttctgccggccccagcctgcagtggtttctgcatgcatgttgtcacagaaggcttcccacaagtctctgggtatgcatttcttgtcctcacggcccataagtccaggtatttgactggacagtggttatttcctgcttatagattgtttccacccctcagtaaacttcagaaacacagacacgggtctatacaccacagcagagtctcggctgaagatcacctacacgtgtatgtgtgcgtgctcatggtttctggattcaccgctgccccttccagattctgtgtgtctcatcaggagtcttcatgcaaacatatttgaccagagtcacagtgaaattgagttctattaggtcaatggatatacgcaaatgttcttgctccttaatctctctgatctccaggaagcagagagaagagtttcaaggatcctgttagatcagcatccaggtgttccatttggtcagaagagccaaactcaacatctgtggctttggcaaaagtcaggtgagacccaaaaataaaagtacaaaccgatactgcattccccagatcttaccttgacactcagtcatcacagagtggtgtttagttagcctgtgcatacagcattcgggcattggcagggcacggtggaggacgatgggtgtggatgctgagcagtcgggtgggaggagggctgcgtgggcgatcacactcagattgggagggctggatgcgcgtgaggtcgctcagcagaaggtgaggaaggggtggggccagcactgtaagtccgtctgtttctcacccagcgcccctctggagggtgcttcgttgttggggatgaccctcacccccatctcccagctgctgcgtcctgaacaacaacggctcagggtcctgcctcatcattgcccatggcctcagccctgggagggtgtggatgtagtgcaggctggttctctgttgctttggagcaagtgcagaccagcaggagtgtccgggatttactctgtgggagggagtaggacaggctgaagatgtgctgagatgtgggctgggacttcctgttcccatggctcacctgcgccttctggtctagacgcctctagtccctagagagtggcttaagcgaatcaaccataaggcctgtgtgtagggagctgccagggagcaagtttagggccacagtcctggactgctctcagttttctgtgcatttcacccctttgaaagtttctccctatatccctgtgcacgtgcctttctcttgatgggcacacacagtgagtaccagtgaagaagggcaagccaatgggctcctttcccagtgacactgacacctagccttgcaggtaaggaaacgacgtgctatgagaacattcgacctggaacatgcagtggggcctccctccttctcacggatcccagagaaccatctgtaggggaggtacagggggttgagttgtgttcccccgaaattcatgtccacctgaaacccctgaatgtgaccttatttggaatgatgacagagatgaggtcatgctggattagattgggcctgatttccatgactgggttcttgtaagaagaggagaggatgcagacacagggagaaagccaggtgatgacagaggcagaggctggagccacgtgtctgcaagccaaggaacctcaccaattgtggcagcctgagaaggtggaagaggcagggacagatcctccctggggctctcagaaggagcgcagcctgccgccttggtttcagacctccagcccctgggtctgtgagagaacacatgccttgtttgaagccaaccactttgtagtgctttacagcagccttaggaaattaatacaatggggtgcatcccttcacttctttcatattgattagttgttcctcaggcatttctggaaatcctttttggctcacacctctccagcctcatctgggtgaagacatgggccgcgaggagctggtacccagtggacacccgagggggaggtggctcctgggcaagcctggctgaggccccttctccaaactgccgcattctgctcagatggagcagactttgagaatgggcagataaacagcagaagatgttagtggaacgtgtttaaaagaggagcttctggtgatgaactgtcattcgaactgggcgggattgtgaggcttctgtcaccccagggctcttccaggaaaggctggcagggcccgcgggtgccctggagctgcctgcaggagtcaggcactaagtcagtgggagccaaggttggaaaggaagacccccttccattccatcctgaatgactccatgggtgagtgggacccaggacggctgcccttcagagctcagcccagttcccagagacgagacggtgagatggttaccaggatggtccctgccccttggccccggcctctgtttccagctgctccccttagcatctgcacaattgcctagtgaggccatcatgaccctgtgggcacagacttctgggactgatgcctgtggttgtggcacccccaccctcaccccttctccccacaggctgaactttgatccacacttttcctttgatttcaccgtctcctcccacgcctaaaataacatacaggcctttggctatttccaaagggtttctgggaactgcgccccagtgaggaggcttcccagcagccttggccttcccttcaggcagactcctcatccacagtcaggagcccacaggtctcagttcactgacctgctgagaaagaggaaaaaccttcaacacattaaaaaaaaaaaaaaaacaaaacacacccgtcaatgtgagcctcacacaagcaggcgctctccctttgtagctggaatttgaaagtggtgggttggatactgttcctgaagctattgtcccacctctgcaggtggagggaattgtgaacggtcaacagcagggaacatattaaccctggtgtcagcttacatccacccgggagcacaaagccttggctaatgattaaaaacccactccggctaggaggcctgggctgcaggtgtgtggctcacagacactggattcccatcagccctgaccattacctgcgtctgtggttcagggttgctgcatttctctgcgctggggatctcctcctaaagtgacaggtgggccaggtcagggctggacgcaccaaaggcacctttggctgaagtattgtcgtgtggtccctggactcacctgtaagcagtgtttcgaatgaatgaatgctgccaagtctgatgactggacgtctgcagcagacaagaaaaatcaggttgagtgggatttcttttcttttatggcacagattctagagtggtcacatattttacttatttattttaagatttttaaagttgtttttaaagtttaaaaacttcagcttttattttagatatagagtgtacatgtgtatgattgttacccaggtgtgttggacccaggtaaggagcatagtacccaataggtggtttttcaattcacgtccctctcccactctcctcacttgggcagttcccagtgtttactgttcccatgtttatgttcacgtgtgctcagtgtgctcagttcccatgtgagaacatgtggtgttttgttttctgttcctgtgttaatttgtctagggttatggcatccacatccatctatgttgctgcaaaggacatgatttcgttcttgtttatgggtttgtagtattccatggtgtacatgtaccacaatttttttttttttttttttttttttgagacagagtttcattctgttgcccaggctggagtgcagtggaacaatcttggctcactgcaacctctgcctcctgggctcaagcgattctcctgccttagcctcctgagtaacttggattacacgcacctgccattacgcctggctaatttttatatttttatcagggacagtgtttcaccatgttggtcaggctggtctcgaactcctgacctcaggtgatccgcccgccctggcctttcagagtgctgggattacaggcgtgagccaccgtgcccagcctataccacattttctttatccagtccacccttaatggcacttaggataattctatgtctttgctattgtgaatagcacggtgatgaacatatgagtgcatgtgtctttttggtataatgatctatatttctttgggtatgtacccataagtgagttgctgggttgaatggtagttctgttttaagttctttgagaaatctccacactgctttccacagtggctgaactcatttacttttccactagcagtgtacaagcattccttttctctgcagcctagccgacgtctgatgttttttgactttttaataatagccattctgactggtgtgagatattcagcctttgttggatgcatagtttgtgaatattttctcccattctgtaggatgtctgtttactctgttgatagtttcttttgttaagcagaagttctttagtttaattagctcccacttgtcaatttttgtttttgttgaaattatttttgggtacttggccataaattctttgccaaggctgatgtcgataagggtatttcttaggttttcttcaggatttttatagtttgaggtcttacatttaaatctgtaatctaccttgggttagtttttatatacggtgaaaggtaagggtctagttccattcttctgcatatggctagcaagttatcccagcactatttattgaataaggtgtcctttccccattgcttgtttttgttgaccttgttgaagattagatggttgtaagtgtgcagctttatttgtgttttctgttctgttcagttggaatatgtgtctgtttctgtgccagtaccgtactgttttggttacattagccttgtagtatagtttgaagttgaataatgtgatgcctttggctttgttctttttgcttaggattgctttggctattttggctcttttttggttccatatgaattttacaatagttttttttctgattctgtgaagaatgatgtcagtagtttgataggaatagcattgaatctgtaaattgctttgggtagtatggccattttaatgatattgattcttctaattcataagcatgggatgtttttccatttgcttgtgttttctctgatttctttcagcagtagtcacgcattttaaatatggagaggcccttaaacgcagtggccatatgtgattggttcgggaaatagcagtaactactgaaggggaacattaaatactgattttatttatttatttatttatttttgagacagattcttgccctgttgctcaggctggagtgcagtgatgtaatcttggttcactgcaacctctgcctcccgggttcaagtgattctcatgcctcagcctcccgagtagctgcgattatatgcgtgtgccaccacgcctggatgatttttgtatttttactagagacggggtttcatcatgttggccaggctggtctcgaactcctgacctcaggtaagtctgcctgcctcctaaagtgctgggattacaagtgtgagccactgtgcccggcctaatttttgtatttttagtagagatggggtttcactgtgttgtccaggctggtcttgaactcctgatctcaagtgatctgcctgcctcaggctctcaaagtgctgatttttttttttaaatgtctgcagttggagagaagttggcatgtgacaaggagacgttacagattccaggtcagaggaggcattcgtttgtgcattatttatattacctgagtgtattttacctgcaaaagggatactcatgtagaaaaccacacacaacaacatctccaacctacatccacttgggggacagccagcgtgctgtgggagggagctggcttggtccaggagccagggtctaggctcaggcccctcctgttatacatggccttgttttctaaccttctgttttcttatcttcaaatatgggggttgcttggctatgaatctgtggtctcctgtggctcaatagtcctattttagagaagcaggtaccatggcggtttcctcaggtcactgaaggcatcttgagctttttgggcagaaacttcactcatactgtgtgttgctggggacccaagtctgggtgtcagtctgccagcatcaggacaactgttggcttcaaaatctgaaacttcatgggctcctggtcctcatagctgctgtgataattgtctcattctcctggtgcatttataacaggtttctttaaaatgtgcactttcccgagagtatcaggaaacaatttttgttaaaaaattaaaaagaaaaaagtccctgccggaaaccttgtcatatttggagactcaatcgtagagaaagaataaggagaaacatgtttaattggatgagtattttctactttagtgggaagtttttctctacttaactaacacttcgtttcccagcgtgatgaccactagcactccccatcccgtcctctctggccctcaggccctggggtagccccatggcctgtctttccagaaattatggaatttgaagagaacctggggtcatggaagatgagggacttcaccggggcaggctgtgcttgcatccaggttgtaatagctgttagctttgtactttggacacagatgtaattatctaacatatgcaacagactttcaaaagtactacttacaccatcaccaccaccgtcatcaccaccattaccaccgtcatcaccacagcactccctagttacctttgggggatgtagggaaccaactcattctgatttggtaaataaagagaagcaatcgagcatttaacctttgggaactgttctttggagtttccaaataaaggaagagggaaagttgtattgaaagaagaattccagctaataaaccttgaaaatgtgatagggttaacatagtgccctttccaaactcctaataaatgactgtctggctctaggctctggtcctctgtaacctgcactatcacaaaaggggagttagaccatgggtcatagggttgtaagcctccttgcaggaagtacacagctgagtcctcaccctagccaagtcctcaccagaatcaaaccagaatcagacccagcctcagatccatctgcaactgacaggaagtccaggggccaggacatctgtgaagccatactgcagggctcagcgaaatccagggcagagggaattctactgtgtggaaacaaccccagtctttttcaaatacattgcaaaaagaggaggaagaaaaaggaactgggtcgggtgctgtggctcacgcctgtaatcccagcactttgggaggccaaggcaggcggatcatctgaggtcaggagaccagcctggccaacatggtgaaaccccatctctataaaaatacaaaaattagctggtcttggtggtgcacgtctgtaatcccagctacttgggaggctgaggcaggagaatggcttgaacccaggaggcagagattgcagtgagccgagattgtaccactgcactccagcctgggcgacagaggctccgtatcaaagaaaaaaaaaagaaaggaactgaagtgacatattgaataaacatcgtaagactttattcagactgtaacttagactgtaaaaataaatccaaacaaccccaaaacacgtatggcagagaaatttgaacatgaattagatattttaagaaattattcttcacaattctggcagtttgttctatgtattaaaatgttcttgacttttatttttttaaattatttatttatttatttatttatttatttttagacggagtttcgctcttgttgcccaggctggagtgcaatggtgtgatctcggctcacagcaacctccgcctcttgtgttcaagcaattctcctgcctcagcctcctgaatagctgggattacaggcatccaccaccacgcccggctaattttgtatttttagtagagatggggtttctccatgttggtcaggcttgtctcgaactcctgacctcaggtgatcctcccacctcggcctcccaaagtgctgggattacagacgtgagccattgtgcccggcttgacttttaaagatatgtactgagatatttatggatgaagtgatgtgatatctagggttagctttaaatggcacagttgggtagggggtgtcggtgtatggatgcagttgatttggggacaagttggtgactggaaacaaagtggtgggacctggggcttctgatccgcgtgtctctacttcacaggggcatcgtgcagggcgcagatgatgtgtttaggcacagagctcaggctggctggtcactgtttttatcatatgacacaccagtgtttcccaagccagcgtcctttccccctcttgcagttatcttccatgacctaatggcttaagacttttcccacaagtctcctgtgtggcattgagccgttgacatctgggtgatagcccctcagcagtgctacaatgtgtcttatttgatgaaatgtttcgctgaaaacccactgagtttgtcaacacatggcacagagttcacaggctgctttgtaaaatagtaacacttgcttcataaagcctttaaagaaatcattctgaataaagggttgtttcacactagccaggtacatttttactttttttcccctgggaaaatcatacaactcactcaccagggagatcagccttgataggttttgtgcatggaaggaaatagggccaaggcgcaggcatccagtgagcacagattgtgattcaagagagtgaagcactttggaatattaggggagttaaacatggacttggacttgtatgaggtcctgagctccccatcattggtgccatttaagtagtggctggaagttatgttgcagtgttccttcttagggtgattgggagactgagtgcaaatgatggcagaggatgcagtaatgaagcccgcattgcatgtggtgacaaggtcgttagtataaaccacactgatgcacaaatattttaggtcagtggatctcagagtgtcatctaagaccagcagcatcagcataaacctgggaacttagaaatacaaactctttgtgcccactcagacctgttgaatcagaaattctgggatagggtccctaagtctctctcctaatatgccctcctggtggttctgatgcaaactgaagtctgttcagcctgttctaggagatgacttgctggggtggggctgccacccggggccaccttgagcaatcctaggggtgttgagggtgctcggggcgtagggttactgagaactcggcggcctctggggtttgggtgacctgacgtttatgatttccttccacctgagaaactcacattctctgatgcctttcttctttccatcccgggcagatgactattggcttctgtcgtacgtgctccagaaaatattctgatgccagagtcctcaatgtgtttgcctagaaaatgctgtaagcttctcaaggcaaggcattgccaaatcaatagaggtcctcaggtagggaacataaatctggaaaagaagtgcacgtctttagaagaaggcatctgcagcctgaacttgccaccctggagcttccttgtcaggaggaaggattcctctaaggctttgctttctgtagcagcatgaggcatcctagggatgaagaagtagagtcaggtagataaaaattacgggtggactaggctgtgattacggcccttttaataatgttagagtaacaggtgtattaagtgggggcattagaattagaaactggcaagtttctagcaattttaaatctacaaatttgaagattaaattatagttgattttcattacttgtggattccatatttgcaaattagcctcctggatacaatttatttgtaacaccaaaatcaataccaaggacaattttgtggtcatttgaagacatgaacaaaaagactcaaaattcgggttgcccacctgcatgttcccgtctgacactgaacaaagcaaagctcttccttgtttcaactcatactgcagacaggcatcctttccacagtctatttagtgccacatttcccccatttttgtgcttctgttgttgattatgctgtttaaaatgcaagtgtagtgctgatgtgatgtccagtgtccctaagcacaagatgactgtcctgtgcctggtggagaaagcgcatgtgttagacagtccttccttcaggtgtgagttacagcaccaatggctgagagtttcatgttaatgaatccacagtatttattaaattagggtctctctttgtcacccaggccggagtgctgtggcatgatctcggttcactgcaacctctgcctcctgggttcaagtgattctcatgccccagcctcctgagtaactgggattacaggcatgcacaaccactcccgacaatttgtacatttttagtagagatggggtttcaccacattggccaggctggtctcgaactcctgacctcaggtgatccacctgcctaggcctctcaaagtgctgagattacaggtgtgagccactgcacccggccaaggttatgccttgaagcggttggtgaaaatgctgtgactagagctcgcaggaccctaaccctgtatttctcctagagacggaagctcagtgttggtcaaatcagtgtttgcagcaactttatagaacacaactactgccaataacgaaaatcaactgtaattgattaggcattgattagggtccattgtaggacagcctcattgtcaggttttcacttaatgattctttccctgagctttactatctgagagaacagatcccagcccactttctggctgccttctgtgaacctatgataggcaatttgcttacaaaccggagaggcagggagaagagaggcacagcggggaggaatcagggcagagggctaactagtcttggctgtggagttctagggaggtagaaaagtcgatggtccctcgtggtggagtgaaagctaagacagacctggcctgtgtcctagcactccccttgctgcaaatggcctcaggtgggcaagcctggtcctgggtttgaactagatgaagtgacagcctgacaatggggctgtcttactatggaaccctagtcaatacctaatcaattacagtagattctcattattggtggtagtcatgttcgataaagttgctgcaaacactgatttagccaacactgagcttctgtctctaggagaaataaagggttagggtcctgcgagctctagtcacagtgttttcacgaactgatcaacacataacctcggccaggcgcagtggcttatgcctgtttgaaagtggggatgataagggttccttgctcagcaggctgctacaaggatggagagagaatacaagcaaatcatgttgcattatgtcaggaatagagtggatgtggaataacttgctgtgacaatgatcgttactggtattaatacaggggcaacgaggagggtcattgctgcttgcatgtcacttactatgcatttggcttcacatccaggcagaatctgtcatttaaagggatcagaatttataagtgattattgaactgaagtatcagttaacttgcggaatcctgaacctttcatttaggattccattgtgtctgaaaaccggtaaaagtagccacctgtctttgacgtaccatcccaccctgtctttgagttctctccagggtctggggttccctgtcctgtttttacatagtgtacatctacaatgagtcattgaaatttcccatttggggttcctcagagtgtaagaaagcttaaagatacttaggaataattggagcatagaaatcctctggactctgccccagctgccctacagaaatttgatgagttttactgactgcctcacgcaaggctctcaaaaacttcagtgtttgcagcagtaacaaatccttttttgctcacatttcattgatttctgcagtattttattaagctctgcaattacaataactggtacaactggcatttgcagggttgggagcagacgcagtggtcatttggtcagcttttgaattgacagaagaaacacagtgcgggactgcagagcccagcctgctggcttcaggcatgcagtgggcatgcagtgcccggctcctcagtagtaacaatgatgttcctggacaggggtggtgaggaaggccctgggccccttcggtcttcatctagttcctacttctgcactgctagagtcttggctgactgagcccctcagtgggagcggggacagccaattctctagtgctccattgtggagcccagccagctggctcaggccatgcattccatattgtctcatggaacgaacagggagacagcagatccatggttggtgggaagcctgtagaggtggttttggagtgacctcatttatgtggtccttggagggcaagatgcagtttcattctaaccagtaagcagaaaagactcacacatgaatgtggctttgctcagcctggttcagcttccaatgtactcatttcttgacatacaacacttaatgcggggctcactgtcttatgtttacacctgcctgtgtcccctcatctcactgtaagcttcccaaaggcgggaatatgctctttcccgttttttttcaactccagcattgtcagtgagactggacacattctaacagctggaaaataaattttgaagttaattgctcaataaacttattttctcatggcgggatctatagatctgtaatgttaaggtatatgatgcacataaaacctctctggtttagagcacatcctccttcagctttattggaagttactaggtggaggaagagctgaaagtagttggatatcttgtgtcttgatgctcctgctgttcctcctccttcaatattttggcatgcccatcaaattgcccaatcttcctagttacattaaccagcttgacttactggattgttttccccactgcctctcccttttatttaacacattcaggaggaggaggcaacgtttccacgtgtggctaggggccattccggccccacaccttatgccactccttgctttattgctgctgttcacagtcagcctggcttcctgccaggagagggtgaagtgaggggagcgcagggcggcaggtgagcatctccaggccacctgcccatcctgggagctgaaggttgctcctggcagcagcatttcccaaacacccaccaggcatctcagagctttcagatgtcgtcttagtcagcttaggctgccaagacaaagcaccaccgtgcggggcagctgcagcaatgggcggttatcaccctcagtcctggaggctggaaggctgagatgagggtgtctgcagggttggattctcctgagggctttctcattggcttgtaggcggccgttttctccctgtgtcctcacatggctgcccctctatgtgtgtctgtgtcctaatctcctcttcttttttttttttgggacagagtcttgctctgtcgcccgggctggagtgcagtggtgcgatctcggctcactgcaagctccgcctctcaggttcacgccattctcctgcctcagcctcccgagtagctgggactacaggagcccgccaccatgcatggctaattttttgtatttttagtagagacgaggtttcaccgtgttagccaggataatctcctctttttataaagacaccactcatactggattagggccaccctaatggtgtcattttaacttaatcacttctttaaagatcctgtttccaaactgtcaccctctgaggtcctgggcactaggacttcaacatatggatgtttgtgggaatgcatttcatccattaacagatggtaccaggcattttgtcagtctccagtggggaggaggacggtgctacctttgccagatatggtgggtaataaatcataaacttgaagttatggtcttgattatggaacagatgagtcctctcttccactgccctgcccctccttcattaatcaatcagtttataaatatttatgtcctggggacctctgatgcaccagacactgggccctgtgtggggatatggaggcctgccgtggttctcttgtgggggaatttacattctaggacactccagtggcatagtccacttggggcctgagactgacctgggaggggatgaaggtgcttgcagagaggtttggaggtgccgttttctcctctgctgtgttctctgggacactggtttcataactatccagacacttcaagtctctttacctttgacaagatagtttcttttttggaaaggggataaaatatgcttaaatagaaaaagatggaatgggtttcatgttttgtatgtttcctcttctctgggatgatgcatgtggtcctggaagtcacagcactttctagaggaagtcctagtgatgtggaccccaaagcacatggcatctctgggtgtttatcccgaggcagccactaaggatgttaacattttaaactatagaatgtttctcatagcatcattcataagagtgggaaatttgagaccaaaaaacatgctgttaaagagggattatgttccatctggataattgggtactatgccactgttaaaaattgcagtgcagaagaaaatatagtgatatggacataaagcaccatttggcttttaaataagtatgggcggaagaaagtcgcccgtacttatttaggggtccatcctatctggctaaagttggttatcttggggtatgggagggagagagaggctgattctgtctgcttctttttgtatatgtctactttctgaattttctataaccaagtaacttttatcataagaatgaaagtaggtggtacttgttatttaaaaagctggttctcagagctagcctctcaagggcagtgaggccctgctcttcagccacaggggtctacacaggctcctcagatggcctgggacctacatgcctggggtctgactcccgagctgcaagcctgcacctgcgggaagggatggggggactgcttgttcctcatgcagaaggcttcgtctgtggttggcttgtgctcacaggaggtggcttgagcagccccgtttttcacagctcatcccagcgcagactgattttatttcatcttgttttatattacattttattttattatcattttcagatccaatttgtacaggacatctaatctctctgggatagaaatgagggagaaaaaaggttggggcatccaggaggcacagctgttctaaatgtgagccactgactcatgaggcacttccagatggaagcctcagaggttagaggacacatctgtccccatgtttaaaagggaaatggatgccctgtgctcagctagtgaagctgccctttggcagagccccaggtgactgtcccatggcgtgtgtgtgtgggagttgggaggagcccgtgggccctggcctagagcactcatcctgggcagacgtggcctcagctgactaaccagatgaccttgaacgggtcagttagataccaaggacattatttcctcacctgtaagaaattgagtaagatcacccatgtttctgtgtagtgtaaacgtcatgtatgtggcatattgacattattttggcatgagacgtactgtctcaataggttttaggattgacctgagcagatatacttcctttttttggtgcctcagactatgtcctcttcccagagtctcctgataggctcaagcttctgcttgtgagctgctaggagcaagttcagggtgcacctgaggacagtgctgggtccctgtcattgtccctgtttttacagatgaggacactgaggcgacagggctcactgactacccagagtaacctgtctgtagggcagagctaggatttgagtcaggctccctgcctccaagtcctttcccatggtccttcaactgtaatacgctctgcctctgcagaaaggatgagtggtggtagatggatggagggcaccatagtgtgtagtggttggaggggactgacttggagctctatagaaatagggagcattctaggtgcttgagtggcaggaaaccatggtggtgatgggtttttgatagcttgggtttcagaagtggtaacgaagttaatttagtggagaaagtgggaagatgaaagggagagtgattaggaggagtggcctcttggaggctgttgaagctatttggagtgagaagggcctgtctctgagataggttgcctatccatgacgtgtgtggaagtggggaggagctgtaggccctggcctagagcactgatcaggtcaattagatatcaagggcatcatttccacacctataaaaagagaacattttagtgaggaattgagtgagatcactcacacatccccactccatcttcagtggaattacccagctagcttagaatgaaccatggtggcagtatttacgccacaggaatggacagaggatacatcgaggtggttgcctctcccctcccctcccctcccctcccttcccctcccctctattcccctcccctcccctcccctcctcccctcccctcccctcccctcccctttaccagcacacctccagggataatgatatgggaagaattgagcccacactgaatattttaaaagacatttataaagagagattatcattttcttaaaagaaaggggtaaggtagggagaaagttactatgatactgaattgtcctacacaatgggagtccttggaagacagtctcgttaatgtcattcactaatactcataaccttcaaaagggctgagaaacactcaaggaggaagagctgaaagcgtccttaaggaatggggacctgttgttacccagctggttctcactgttggagctccagatgtggagggggttggctgaggtgagcagcaggtgtggggcagcgaatgtctcgtgggctgtgttgtgtgtgtgcttgccgggcctgcacctatacgtgctggtccttgagcgttccctgttgctgtctcagcatcatttacctcctcagcttcaggggacctgggtctgttggccttgtcttccttctcctcacatcctgaatggatgccctcctggcctccgttgattgccccaatagtaataatgtaatatactagtaaaagctggcacgtgttgagcatgtgtggtgttccaggcacagtattaagcactttgcatgcttaccttacttgatcttcctagaactctgcattatgtgccatttccacccccattccccaggtggggaatctgaggcttctagaggacgaatatcacggggttgctggtgaatgtttaatagaggttttccaggtaaaagctcggtcggcagtgtttgctgatttctttggtataaatactccccccattgctgatttcaacctccgacctgatgtctgggaagtgcaccctgggctcctggagcctgctggagccactcctgatgccactaacagatgaggtccaggtcagcagctgtctgctcttgggcctgacatttccacctatgtcgtccactgcccagtgttccccttatattaatcttgctgctgctactaccactaaaccttgttaaaaacaattgagattgtgtcactcccctatgcagaaacttctgacacctttcatcgtcatggattcatcacctggcatttgggctccttgagcccgggcttgagcctctttctcatgcatcctgtgagcatggcgtgtgtcactcctggctgccccacccaccacacgcagtgtgcctccatttctctgcccagactctgtcctctgaaggaatttgctcctcctgccccacctctgccacaggcgcccactttgtatcagatgctttctagccatcctggcctatcccaagagctgccctgatggatctgcaaagtggccgtggtttctagagctggagacgagctcttcttctcccaggtgcccatcgccgccacctctggcactgccttctctctcctttatggggtcttaaatgtgtacttatccagcacctccaggacaggattctcatccattcagttttcagtccatcctggtctttcccctctgtcacacctgcattctccctgcagtgcctgaaatgggctagccctcctgcaaatacttgtttgcatttgtggatatgaaagggaagcagggctgctcagagccctctctgcttgttgtttccagggttatccatatgaatctgattattgtgggataaactccaggttaaggctgctctgtcagtgtcagtgcaattcattagctcttcattctaaagcaaaagccctgctgtgcccttctgggtgtggaggcaggtatggtcctggtctgagttggggtgatcctctcagcattctctgggcagcccctttgcccatcagagttggccaggctggggtgggtgaattaggcccttccctcagccttgcaaacattgagctattgtatggaaccagctggctgcagggccagagacctatctctgtggcccatggtggtcagcatctgtgggtcttgcccccgtcagcacccccgacatcccatgtggacaggaccaggtgtctgtatgctgggggtttggtggggctgtccttgggatgcctgtgctgtgccctgaggggctggtttccaggctctctgcagggggatctgtgtgagtttgggtgggacatctaacaggacagaacgcagctctgcagggcatactccagagtggactcagcatacataacccctcccacctgctgcagggcactttcagactccggagatgactgacattaacacgggctcattaacaatgttgtcaccttctagagaaggcacttccctcccaggccgcccttgctaacttgctcgcctatggatgggagccccctgcctggctctgcctggctggccgctgcctgcagttgaggacactcccattgggggtactttgagagagctggctctctagggctcggcctgttttctgtcaccatgaagtaaggaataaactggcctgtcctcagggtgccacaccctgcccagctgttgcccccccagagcagcccctccccatggcctttcctccattgtaaaatgcgggagttggactggaaacaacacatgcaaccctcctctctcccccagggctgatgatgagtgctgctggcttgggcttggtgccttgaggcatcttcttagtccccacagagatcctgggaggctggtggtgttgtcagctagtttcacagaggtggaaaccaatgctcggaggagttaaagtcctgtttagtgtctccgggtctgatgactgtggccagtaaagggacaggtggtcctattttgaccccctgccgtcactgctgtgtctgcccctgccaaatggtgggcaggtggcaggaagcgcaggctgccttgtggagctgagcctggtctgagcagtgcacccctggctagttataaactggggccccctgtttgtgttcagcctggaaggagacaccacgtggtttccagtggaatgggcgcccccagaacaccctgcccactgatagggttatgctgggggcccaatgaggccctccccacctcccctcccttggtccacttttctatgtgaagaaatgttttcgttatgaaataagtgataaaaataaaagaatgtaagtgcatgtaagatgttacaaaaaagcacacacaaatctccctgtcagttaaagggacgtgactgaccatgtagtcatgagatcagtgagatcagtttaaacagctgcctgggtgagtctaacagctgaggacacgatgtggcccgggctggccacccttcctcttagctctgagtgctaagtgaggaaataaacccgcctcgggcaggtccgggactctatgtcaccaagatctgccgtgtatccggcctccatctcccgttttgtaactcagaaccgtctggtgcctcattcccataactgaggtttcgctgcatacctttccttctctctggcctggccactcttgtctttaaccctgtttttgtgcttgtttattggtttggtttttattttaaaaattttatttagttatgttgaattcattcgatgagtcatctcaaattctatttggaatgaagtggagcaaaaatgaactaaggaaggaagtggtaaaggagagaatggggttgggggagaggaaggaaagagggagggaggaaggccagtgggcatcaggcatctgttacctgggatacagaggtgagtaacctgccctcccagcagctcgaagtaggttttgtttttcctgggggaacttttgagaggcggttctccctagtggctagtccccaggaaggcacagccactcagcttcctggtcagaaggctctcccggagagcgctgttcttgttcctgtccctcaggcccttggcaggctggccctcggcaggctggccctcagccccgggcggacattgtcctgtgagctccatgcctgcgtgctcaccgtggggccgggcacacctgccagctgctcctggctgtggttctggggactcccacactcaccaggctctcccacctggtgggctattccagctgcctcctttatgcccagagctgccgagacattaacacgaagaggggtgtgcttgactaaagcaggggaaggagcgaaacgtaggaggagctgtttctggaagggaaaagcagccctggccggtggtccctgcccaggcccagcacagtaagttcccaactccccacgtgccgcctctcggctgggctggcactgggcactttgtctgtccctggccaccctcctctgtggcctccggtactggctgctttgcagtgaaggggcatttccaagtcatttttcccctttcacttcaatgctgcagatgttcggtgggaccttgtgtcctaagaaccatccgccccatctgccccttcttgggaaacttatttgtgagaagagcaaaggggagcttccgacttctttggaaatgctgacatctctgtgtcctccctgagtgttgcttacctctccctgctgccagtcttcctgagctgcctccttccatatggttccaaaccagcctgagctcctggccagggaggcaggatcctgtgactatttcgttacaaataaatagagatacaatcttagtctgttgtttctcatagttgaacatgaaggtaaaatgacaagatgactttattttagtttcccatcctccatggggtgtactttctctggcagttcttaacgattgctgcttatgtttaaaagcattaagcagaaaatcaagttgggcaatcctgacaattaattggttcctggtattcttgttctggaagggaaaaaaatgtcttattaactgtgtggctttgggaaaatcacttaccctctctgagcattgtttctcctactgttaaatgggcattgtggtcacagctggttttgtgatctaagggggatcctaataacttgtggataaagtgcatttccagggcctcacagaggcctgacacagaaataagatgatggaataagtagctaatatttctttggcacttattactggccaggcactgttctaagccctatgtttatgtttccttatttaatccttccaagaatgctgtttctgtctcccttttccagatgagaaaactgagtcacacagagggcaagtaaattcccaagatcagacggcttactcgagcagtagagctggctgcctacccaggcattagtattacaaagagtgtgtgctgaacccccaagtcgtatgtgctgggtggtggaggaatcaatgaaggatgaacaaataaatgccttgaaatttgccagctgaatgttgttcaggttgttgcctttgaaaaagattttacatttatttcttctccatttgcttggtgaaacaaaaacagaatgtgcagaggtgtctcagcccaacctgtttaattgtcctcacctcacacatggcccggcagctgtgatctgtgtctctcgtcaccgggctgttcatagtcctgcttccttgtggatttatccgtggcttttgtttcttttgatttatttatttattggagatggagtctcgctctgttgcccaggctggagtgcagtggcaccatctcggctcactgcaatctccacctcctgggtttgagcgattttcctgccttagcctctggagtacctgggactacagccacataccaccacgcccggctaattttttgtatttttagtagagacaggatttcgccatgttggccaggttggtctcgaactcctggcctcaagtgatccatttgcctccacctcccaaaatgctgggattacagacgtgagccactgtgcctggccttttgtttctttttacagagctgtttacactgctagttttcagggctggtcaggctgctaggagcagcgcacaggccctggggacacccaggggagctgatattctctttgcaggcttaggccttgctgggattcctaacatgacgtccataaaagggctgctttttcttattttttagacagcgtctcaggctggagtgcaatgacatgatcttggctcactgcaacctccacctcctgggttcaaacaatcctcctgcctcagtcacccaagtagctgggtttacaggcacctgccaccacacctggctaatttttgtatttttagtagagacggggtttcatcacgttggccaggctggtcttgaactcctgaccttgtgatcccctgccttggcctcccaaagtgctgggattacaggtgtgagccaccatgccctgccaagggcttcttttctttcctcttcaccaaaagccagtgaggacaaggagaggcagggaacggggtgccatgtttaacctatcctggcactgccctgcacccatattggcccctgggtaagcaggagtgagggccagtgctagttactgcttctttggccagcctgggctgtagctagaggcctggcagatagtggagacctgctttctgccagtggtcagagcccccctgggaagagggatggtcacctctgctccagggtcttgggtcttagggaggcagagatgctaaggggactgcttcttaaagggtagtcttggggaattatgtgagaaaacacttaaaaaatgtgtattaccgttttcagtacttgagtaggcacagggtactgaggtcagctcagtgggtgagaaaaatccacagtttatagtcatgtgtatccaagtcacactgttagcttttaccgagctgtcaagctgatgcttaaccacattgctattctgtgggcactgtcttcctaaataggccccagttattccatgttatgaccttgggaaggagcagatgtcactgcttttcatcctattcttcttttagataagcctgttaaagtcaatgggtacatttatttttgttaacccaaaactaaagctaactagctgtctgttattgaaatctaataacagcatcctcatgcctcttcagatggccagatgactccacagccactttgggattagtggttcgtttcttcctttcttcattctacagactgctgtgctgggtggctattgtgtgcagagtgcggccccagaggctagagatacctctgggagctagactgccagtgcctctgctggatccgcatgggagggggctgtagagctcagacgagaattcacagttagttgttttcttgcagttgtggtcggcacagtaaagtagaccagggctgggcgtggtggctcacgcctgtaatcccaacactttgggaggccgaggcgggcatatcacctgaggtcaggagttcaagaccagcctggccaacatggtgaaaccccatctctactaaaaatacaaaaattagccgggtgtggtggcgggcgcctgtaatcccaactactggaggctgaggcaggagaatcacttgaacccggcagatggaggttgcagtgagccaagatcaccccactgcactccagcctgggcaacagagtgagaccctgtctcaaacaaacaaacaaaaacaaaacaaaaaggagaccaaagtagaaaggaacatatgactcaggtcgggtagggagatcagattatgctttgctggaagttgccatctgagccaagtgcttgagaaatcacaggagttaaccaggtaaagctgggatacatgaatgaggagcattctaaactgtgtggtatgtgcaaagaacctggggcaggaggaagcacagcaggtaaggtagggacagggagtgagggaggcacatgaggaggcaggggctggctcacccagggctctgaggaccaggctgagcacctgcctttcaccccatggcaatgggacgtcagtgaaggatgctccatttgaaatgccgcactagcattaattgcacgacataggcttggtttgctgcagctgactctactcttcacactgccttccacctgcaggatacgcacccgtgccaggcgcacagtgctgaacgtcgagcagtgacttccctgggcagtagagattctgtacagtttaactggatgtatcggcaacatacagtgcaaggctcagggacaatctgcagtgagcaaggctggcttgttagtctcaggcaggcattggacatttttgtctttattctgtgaacagtctcacaagggagacatcattgtcccgctccacagatggggtcactgaggctcatgagtgccctggcccaagattctgcagctggcaggtggtgtgggactcacacccaggtctgtctgatgccagatttcattactatactgtgaggttttggaaactgttgatttgttcaaacaagcagtcgaaggacataggttaaaaaagaaccaaattctggctgggagcggtggcttacgcctgcaatcccagcattggaagccgaggtgggtggattgcctgaggtcaggagttcgagagcagcctggccaacatggtgaagccctgtctctactaaaaatacaaaaattagccaggtgtgttggtgggtgcttataatcctagctactcgggaggctgaagcaggacaatcgcttgaacccaggaggcagaggttgcagtgagccgagatcgtgccactccattccagcctgggtggcagagtgagactctgtctcaaaaaaaaaaaaaaaaaatcgaattcccaccagagttgggctctcattgattacaagcttgtctcgaaattaaccttcctgtcaggtgggggctcccagatcctcagctgtggagaggaacatcaaaccagctgggatcccaccccacctggggaggatcccatgtctccctgggacgtcgtggacttcaaggaagttttgttgcagagggaatggggcctgtgtctttcactcttccctcctccctgtgctccccctctgcatgccccacatgggtgagtgcagaggaggctgctggctttctggtgagtgtgcttactcctgcccgggtggtggccatggtgttgatgtgacagccaagggagcagctccagggatggctgctctggaaatgtgctttggcagtggccttggggaatctccagtggccctttcagtcccagcagtccacagcctcccctccttctgccagggcccccggcctcctgctgtcttctctgccttctttaggtggatgtgcttggctcttcccttgttctgctcccagatgtgcagaaagactctttgaagctcaggtcttccttctgatcagggctgtcctcctgagcaagaagccgcagttcacagtggaaagcatggttctcatagagatactagagcgagcatcatcacatgttctagagttgtccgctggtcttggcaaatggcgcgtggtggggtggggcgctgtgggatgggatgaggctttagggtagggtctttagggtgaagcctagggtgtgctaggatagcgcactgcaggatggcgccctgcaggagggcacagcgggactgagaactgtagggtcactgcaggaccatgtgccatagggccactgtgaaaagcaggtttgccctagtgtgccatgcgtggattgctaactccaaggtgaggtcgggacatgagcgcacagtcctggaaagaggagggagatgaggcctaggcgagtggaggacctttcctgaggctgcaggtgccaagcggtggacccttaacttggacccagactgcctgatgtggagcctgtgtgctttgccataaggctaggctactttctcccaaaagaggtgtttttgccttcctgccgcttagtctgctctcacccactcctgtgacacactaggaagtgctctgtcctgggcaacagagcaagactccatctcaaaaacaaacaaacaaacaaacaaacaaacaaacaaacatatgtggaaccagaatgaccctccaggcagtgcatctaattttttatctgaggaatgcctctcctcacttttcactcactgactcagggagtccaggactgggatgacctccaagtgtttgatccacagctgtcattttaccggaagagaaagggagtttagtgacctcattgacctcatggtcatgaggcccatggggcccatgacaaaatggcccatggggccagtttgtcacgtggccaggatgagctccaggacctgtagaaggaaaatgcttctaaagagcagtctggccgggcacggaagctcatgcctgtgatcccagcactctgggagaccgaggccagtggattgcttgagcgtcagagcagcctggacaacatggcgagacccccatctctacaaaaaaaaaaacaaaaattagccgtatttggtggtacatgcatgtagtcccagctacttgagaggatgaggtgggaggatgatctgagcccgagaagtcactgagaggctgcagtcagccgtgatcatgccactgcactccagcctgggcgacagtgagactcaaaaaaaaaaggcagcctggaacagggcggtctttgcaggcttaccttttgcaggtttaaccttaaccacagattctacctgggcctcccttttctctttctcttatttgggtgttgaaggctgtgataagagcatgccaacagggacacaggtgagggaggcatgggctgggcagaggctgggtgggaggctttgctgtctgggttttttcaccctggaaaacaagagaacaaaagaagcaacttgtgtttctatctcatggaaactctaatcactaagggcttggatttgattgacattggcgatagggtccacaaggaaaccacagctcgggaaggcttctgaggacgtgagcaggcagctctcttttcaaaacacctagagagtggaaccttgcctctattaaaaatacaaaaaaattagctgggcatggtagcaggcacctgtagtcccagctacttgggaggctgaggcaggagaatggcatgaacctgggaggtggagcttgcagtgagctgagatcgtgccactgcactccagcctgtgcaacagcaagactctatctcaaaacaaaacaaaacaaaagaaaaaaacacctagagagtgagtttgcaacacagatttgcaggactggtgcctacaagtagagagagttttttaaaccttatatgaggttaggatttcgggtttctcaggagccaggtttaatataacctatagcaagttagtttctcagtcatccttcagtcatgaaatgcattatggtgcacacacagggtttagatttgtgcaacccaagtgtaggtgtattgtttactttcaaataaagacttacagtgacattgtatccctgagtctcctcttgacaagcacagtatttcagaaactcttggcggcagttccagttcagtatggggcctggttctcattttagtccaagtcaaagcagctgagggggttctaccccagtgtgtcagggggacctgtcataggcatgtcctctacttggttccagatttaacccctgaatgattcagggggattttagtcacatgagatctcagacgctgacttggaagtgatggaagggccatagtttctctgccctttttggcacggggctagaacagctcccccaagcaagagtcttttatcctcactgatgttcatgtgattcaggggcagcctgtgcaggagagggtgtggaccacctgaaagccaggagatggaaggagaacagagttttggtgtcagaaggtgctactgcagcttaactgtgggattccaacacgtccgcccaccaaatcctcatttcctcatcaccatccctatgttaccaacctgtaacatgtaacataggggtggtgatgtctgcttactggggtttctgctgggctccgtgcaatgctcttcagggttgtgctatggaagctgctgagcaccacatgccttggaggtggccagacctgtgtttgcacatctggaggcatgaggtggacagatgcgggtctggggctggggatttgagtgggtgtcaagctgtctgtgtttttggagggtggccctgagctgtgctgggtttctcgcctcgattttaagtggatgtagacttacatagaaaattgggtatgttgggggacgggctgaattcctccttcctgcccctcttcccaatacagaggttaaggaaggggtgtctctgggcaatgctgggacactttacaggaaccctgcatttccgaacacttcatgtaagcaactttgtgcaattcaacactttctgacttttcaccagctcaggtgctggggcctccctgtggtgatagcacagattacagtttcctccattggccttgaccttagaaattatataactattggtttaaaaggttttttttgtttgtttttttggcagtggttgcaatttgtatggtttcggggtttgaacattggagttactgtatcgaggcctataatgctgaattggattcagagactattggattgagaagatcccgtgggtctgtctgacctgcccttctcactctgcagctgaggaaatgggccctgggttccgtcagggacagcagagtcctcatgccttctgggacccttccctccttccctcctgccgtcagggccccgcctgagggacggtgacactcctaccccatcacgttggtgccggcagtgagcagtcacgtatttgtgtggttgtcatcttggaatgatgtgtcatgtgagagttaaatagttttgccccatgagttatataatgctgtttatatgttaagttgcatgccagtctttcacggtcaaatgataagcgtgacatagggtctgaagcgacagcccacttgtaggaactgggccagtgtactccagcatggcattgcaatgggagtcactgtattttggatgcgtggtctggtgaagatgtgggacacatatagtcagatcctggtgggttcatgtaagacccaggaccatggtcgatcaaactccttgctgttctcccctgagatgttggcttattgaatacttttttgaattaaatgggaccctggttaagctgagtttccccataatgagattggctctattaggattgcatctgagctgcttgaatttgagtgttacatgtacagattgtatgaattaacctaaacgggtttttgatgtatcatttccttaccttttcggagacttcattttagtgcattcagtttactctgggattgtattctaaatactttttttttgttgtttatttgtttgggacagagtcttgctctgttgcccaggctggagtgcagtggcacgatcttggctcactgcaacctcctcctcccaggttcaagtgattcttgtgcctcagcctcccgagtagctaggattacaggtgtgcgccaccacgcaggctaatttttgtatttttagtagagacgtggtttcaccatgttggccagggtggtcttgaactcctggcttcaagtgatctgcccgcctcggcctctcaaagtgctgggattacaggtgtgagccactgtgcccggccgtattctaaatactttttatacacactgacaagttgtcctctgaaatcttgcatctgtttatatttcatcaaaactttaaaaaatgttttcaagatttttatttttgctgctctactaggcaaaagagtagtcttctgttttgtagctgtctagtctgagctgtgaaaggctttgggttagggctttgagaagatcagaggaacatgtttggagcctcctgcagctttgtgggcataggggatgagcagggggtgcagctcagatgtcaggggtgggcggggtctggagaccacgggacttcacttgaccaggtctgcccagcacgggcagtggccatgcggtgccaggctggattccaagccattgacagaattacctcagtgaatccctggacagctccatgagactggccctgtctgttactattctcacttcaaaaggcaggagacaaagaagtggagtggccaaggggctttcccgggaaaagcaatgaggaggtggacccagggctgagctcgccagcaccttggtgtagaactgaagagcacgcccctagatcctgcccctgtcttgggaggctgagacgatgatctctgtggttttggaattggcgctaggctttgcattggtatgatttcaggaaaacatctgtattgttggtctccgaaatatacatagaatttgttttctgttcatttcttgcctaaggagtccaggtgagctgcacctgcctgagtgggatcccaggtgtgatcgggggtgttgatgcctctgatggtggtgtctgtgggcctgctttgatcggggagcaggaggagtgccggaggctctgtgtccccccaactcgggggtctctgggctcctgtgtgcagcattacctggcttggggcagaaagagactttgagggagccctgtagtgggtgtctgggtttccccattcacctctgccatctgacaagatcgcttccctctttgagtcccaatttcctcacttctgaaatattgaagagccttcttactcacacagttgctgggcatttttcctgaaatagtagatctctgtcaccatagtatataacaacccttacacacaaggaagagttatataactataaagtaattataacccgagtcttttctccctgttgaataggctctttaaaaaagagtaggtatgactgagaattcctgaaagtcactcattaattggttctttcaagtaaataatagcagccatgatagtcatagcgctggtgtcatctggcacctcctgtgttggagggcagggcactgtttgcaggccaagcgatgcctaccttgccctgactggagggtggcctcactggctcctgtggaagcccgtcctgatgctggttagtggcactgcgtcctctggtgagctgaatcacacaacatggtgtagacccttctgaggtgataaggtgggcttgtagttacgattgacttgctgtttatgattaaactgtggaacggctgtcattgttccctctcagtggtgtctgtgtcatgtagactggcaggaaaggaaacttcaaaatgacccttgttttgttatttgcaggctccagggagttccacgctgtccagttctctctgccgtgataaacctctgcggtgagtgtctgtgtgggtcatgcattcctgtgtctctggctgtaggtcagctctctacagaggaaacttgggcatggcatcattttcttctgtagaaatcataatttctgctttggttgtaaacattgccaatcaaaggtgatacaggccaggttttctgtccgtttctaaatgctgtgtcagggtcagaagcccaggtggtagaaacacctgtgattgtctttgaataaataattgcactgctgaggcctgattgtgcaagtgtcacttttgggggagactccagggtgtgctggcaagagcccctttagagcagatgaggggggccctgagccagcatcttctggagaggcactcactgtggatcctcatgaccgtaggaagcgctttatttctgttctaacagtgttcaatacatttgaattggaatgaaatccatgtctgataaataaggtagagaaaacaaaatccttgggaattgtttggatgctgatttgaacaaatcaaccttaaaaaataaatgtatgggccgggcacagtggctcacacttgtaatcccagcactttgggaggctgaggtggggagaccacaaggtcaggaaatcgagaccatcctggccaacacagtgaaaccccatctctactaaaaatacaaaattagctgggtgtgatagcgcatgcctgtaatcccagctattcgggaggctgaggcaggagaatccctttaacccaggaggcagagactgcagtaagccgagattgcgccactgcattccagcctggtgacagagcgagactctgtctcgaaaaaataaaaataaataaaaataaaaataaatgtatggtattggatgtttgatgttattatttctttttgaggtgtgataatggcattgtagacattttaatcaaaaagtgcccttatcttttagaaataaattctgcaagatttataaatgaaattacatagtatctgggattgctttaaagcaatcaaagtggtggaggagattgctggagatattgatggacagaggttagctgtgtgttggtaattttgaagttaggtgatgtgggtacatggaggtttgcaaaaccattttatatggttttgaatttttccaaaattaaaagaaagagagaaacacataggagtagtaaaaatgaaaaccccaaagctggtggcagcactttggagggacttaaggacacgtcccgtgcacccatgcctctggctttacctcatgggggcaccgattgggttcaaccccatcccctctccctggaaccttttccacctcctcctggataccaccctcagccataatgttaggagcactcctgggaggggctcaggcctccctggggcccacagggctggtggagaatctgtggtctgtgggaggcccttgtctccagtcacattgggtgcctgactccacactgccagtcctgcccaagtcctcagcctgctggccatgacatgaccatttctgccctcttccctcttccctcctccacagtcttcatctcacacttgggggcctgccctggccacctgggcacctggttgggtggccagccccacattctaccctgcatccacctggcctgtggctagctgggtggggtcccagtggggccccatggagctcttagccttctgataggagtctgctgagttgctactcagtagatgaaaggccgctttgattatgccccagctggtcccctctccacgtgaggtcctgcctccttcttgggcctgcagggtcctccacgaccatagctggccacctcaccagcctcatccttggccgcacctcccccaggatgccgcatacggacacgaggagctgcttgctgatgtttggcttctgctcacaccatctccgcttcctcctggccccctcccggtgcccccttgtgccgaccttgacacctcagagcagggttgaggctcccactccaggagtcccgcctggaaccctgttcctgctcccagtgtaaccacaaagagtccttcccgccttcgtgcttttgcatttgagcccatgcgtcactgctctgagttgctttctctctgtgcgttccctgaccgcagcttgcggtaccccgtcatgccctgctaggaaaattcaatcttgtgcccctccccacactgcccgctgttatgggaacacagcacagaggctgcacacactgtaaattcccgtagctggccgcccaggtgctgatgtgaacacccaggggatgagtgtccgtcgtcttcacctttttcctagaggatgaatgtctgctgcctccttaccctgtttctgatctgcccactgctctctcgcaggcccgtcatcctgagtcccaccatggaggagggccatgggctggacctcacttacatcacggagcgcatcatcgctgtgtccttccctgccggctgctctgaggagtcctacctgcacaacctacaggaggtcacgcgcatgctcaagtccaagcacggggacaactacctggtgagcggtgggcggctctgggagcctttgggcaggctctgcagcaggcactgtgtagggatgggcactcacagaacactggtttacacatgagggagaagctcaagggcctgggctcacacagctgtccgtggcgccttcgtcctctgtctctctgctgccacgcctggggaggagacttatgtgtctctgtaggtagctttcagggacacacgactgctgaccgcagggatggctgttgccttgtcctgcactcatcagtgaggctggctccccagtgccttgggacatgtccccagccagccacccttgcgctcccatgctgcatccctcgtatcaagagacaaacttgtgactctcctcctgagccagaaattaggaagacaaattaggtgggcacccaagaaaccaggggctgccctggagacaaggagacagcttgattttcaaaacacacttgtcgagttgatggtggagccacatctgaggaataatacagaacagcctctcaccatctctcaccctctgattggccccttgttttctgttcccatggttggtagcccaggtggaggctgacttccttctgctgtcaacagtcactaatgggattgaatgacagctccctggcaccctctctctacctgccttgttatctctagtaaggaggcctccttatctgtggtaaagctaatctgccctgcaaacctacaaggtgttcattgtcttccttgctggtctgctccaatgactggggcaccagtggctgggagaggtggacccaagtggcagagtaggatgtggcctccgtctgatgccagagcagccctggcccaggtgctacctgggtcctgacccctccccgatccttgattcactcaggctcctgcctctttctggtcttgaagcccgtcttgtctgtgacctggcagtggacaggaagtggtggccaagccccatttgatggtggtgcctctcaccaggggccctctcctcctcagggcttcctccttcatcactgaggcggtgtgctctgcaggaccatggctccttcctttggaagccactcccaggctggtcagcgcatcctgagtctcctctctggccatccttcccctcttccccagtcccccttccccaaagagaccatgcagagggcctggagccctggccagcacctgtctgtggggccttgtcagggccagagctctccctgcaaaatggctatggcagggatctttttcttgtgcagggttagaaatgaactgtgggtcacaaagcagcgcccccccttgtcataaacagggcttgctgggtgaccaggacaagcccccaccctccactttcctcacatctctgactctgaagtgagagggacgtttagttaatttttaaggctccttgctgctggaacattattattattattattattattattttcattttgaactacttgagtatttagcaaggttccacaaatggctgtgatttttcagtgaacttaggccatggcttttggccgggcatgaactcagccctttccaggcctggggccaccaggccatagaggagggacagccttccccaccatgtaccacctctctattgggtcagtttgtgttgtcaggagcaagaccgtgatatttattttatatatatgtgtatatatatattatatattttatacgtgtgtgtgtgtgtgtgtgtgtgtgtgtgtatcctatatgttgggatattttgtagccatgagaattaaaaaaaaatagtaacacagtaaatcgcctggtttaatactagttgaagaagtagaatatagactttatgtgtaagggttctgtatgccatccttatcttatttattttatttgttttttattctgtgaccacacaagtctgtatttttcaatcttttctgatcctcggtacctggaagggaaacatcatgtaaaaatgcaatgtgttttctgctttcatctctgatgtcaaggatttgtctaaaagctttttttccccctgatttgtgagtgtgaagattttagatatttttttaaaaaattagtattaattaaaattaaataaaaattaaagtattaatttttaaaatattaaaatctattttatgcaaggcaatttttcctctcttttataggtattaaacctttcagaaaagagatatgaccttacgaagcttaacccaaaggtacagagttcatccctttatattctgcattttgtaaaatgtaaacaatgcttattttgtgcaaaaataatttgctactagtctttgtggaatgtgacttgataaggagtattaggaattgttcatatcaattattttaattacttttttttcagtttgaaatagttagagattcgtaggaagttgtgaaaataatacagagatctcctgtacttctcacccagtctttccagtgggagaatcttacaacactaatagtgaaatatctaggtcaggaagttggcattggtatagtccacggacctcactcacatttccctggttttgcgtacatgtgtgtttctcggcatcgtgtgtatagatgataaatactaatatatatgtatagaacaaatctatacacatgatgcttcctcctcccgcctcctgggatctttcatatatactgcatatatatatgcatggaacaaatctataacaaatatatgtatagaataaatctaaactgcatcatgtgtatagatttgttaagccaccacaaacaagagacaaaacatttccatcagcatggggctctcttctgctagtatctctttatggtcatactaatccactcctttcatgataattttcattttttaaaaaatttttaaaattttttcaaattttactttaagttctgggatacaggtgcagaacgtgcaggtttgttacatagatacacatatgccatggtgatttgctgcacctatcaacctgtcatctaggttttaggcccctcatgcattaagtatttgtcctaatgctctcattccccttgcccctcacccttcatgatcattttcaacagcaaagtttgggataattttaagactgagtcaacataagttgtggtacatatatgtatgtatattctatatgttgaaatattttgcagccattagagtaacaaagcagaaacatgataagttgcctattttaatactagttaacaatagtagagtatagaatttatgtataatagtatctcaattatgctaaatgtatacagaaaagagactaagggattcatgaaaacattgcagtggttatctttgagtggtggcaggggtagtgacttttcctacttcctggcaactttctgaaatttccaacagtcttacactatttctacgactttcatcataagatagagctccttgtcctcgtcctactgacaaaaggaaatcaaaggaaaagcaacacccccgtgtggccactgtgggccactgtggacttgtgtgtgcctcaggacgctcagagctgcagttctgcaccgagtcactgtgtctttagcacatggtggtgattttctttgtccaagcaccaaacttaattagagttttgaaggtgcttcctccttaagtgctgcctttccaggagattgtctctgaggtgttgtccgcacggtgtgggagatggctggctgcactctccaaactgggattttaacccgagtggggagattttggcagcagcttgggcctaggactcctgtttgtgatctcactggactgcagccccgtccacacaacctgcaccatcagcaactcaaagacctttctagaattgtcaccccagctgcagaagagcagatgagcccctggaagaagaggcatcacatgggcagtataatgctttattttttcttcccagtgaaggaagttgatcctcatgctcactgagttttaggaaagggtcacccagcatgttctttactcccaaatgaaatgtactgatgatgaaagaagtcattgtgagatggcctcagaaggttttaggaaatggaaaccgaggaagctcccctttcttgttgcagatcatggatgtgggctggccagagctccacgcaccgcccctggataagatgtgtaccatatgcaaggcgcaggagtcctggctgaacagcaacctccagcatgtggtcgtcattcactgcagggtgagtgcgccccctctcacatttgggggtctggctgggcttcagcctttggagttgagatggagaccaatgctgcatctgagcacatttccgctttgagctggtgcgatgtgctccttatgggtttgtctttaggttttcctacttgctcttaaagaaggaaacaaagagttatcacacctccccaagtttggctttagaatttataggattgtggtccctgaatgtgtagctggacatttgaaactgttgaccccaaattgaccacgattatgagagcaaatcgtttcatttttattaaattttatttttcatggaaagccctccttttcaaaagagctatgtatgcccttttcagatggactgtgtcagactttccatgccatcttgagttaaggtaatcagttgatggactagatgatggcatgatgccattgcagtaaacgtgttgtcctttccacgtggagccattgcagtgcagacatggcctgtacatcttcacagagtggccgggactgtctgtctgtcagccccagcagggttggtggatgccggcagcccaggtgcatagctggtgggcactcctcctcctggctgcatcgggctccttccatgcttcctcctcccacctcctgggatctttcctcttaattcccagttttctcaactgctttgtactgctcctcaaatgtgattgttgttgaaaggggttggactgaaagcaaactcactgaggggtaagtgtgtgaagcttaaccctcctgccagaaacttactattagagaaaagctcttattccagtcacaccttgagtcagggaggaatcctttgggaaaggatgtagccagtgggctggggtcactgttcattaatgggcagctccctattttgtgtgtttgacaaagcattcttaggaccatcaaagtatctaggaagtgttgacggttcaagatagaagttttttttttttttttcttccggactcttttacactaaaaaactgcacagaaatccattgtattatggaatttagtttgaaagaagcttccctttgagttatattagactctcagtatatctttcctgcaaaggcactaggtaggctggcttgtggatggtgtttacagctgtaaggcatatgatgaccacttgatgtgcagaaaacttccatcggggcacacagatgttatttgcttctctctagtgttgtctctttcctcacatctaacttgatcatattttccccccaaatggacaggtacacccattaggaccaccaaatcgtccgtgatgacctgatcttttcaagtattattttagattatggatccttcacccaaattgtgttttggtgcaaactaagagagagagagagagagagagagagagatatagacagacggacttttaaataaatataattcttgttaattaaaacaacctatgcttttcaggcttggtgtggtgattttgacacagtgagcctgatattgatggatcatcattgcccaggatcacgtagcaagctgttctaagcagcattcctgagctgtgagcctgggcccagcagcagcacctgtggaaagtgcaggttctagggcacacccagacctgctgcctgctgcattgtcagaagtctcttggagttgctggacttgaaaagtgccatccttggccatttattccattttagttgttgttcacttcaattttttaaatgaaattgaaagaaatgatgagattatttaaaacatatgggtcctagtggggaccacctggagctttctaaaatgcatccttttgctaagcaactttcggctttctggacagctcttgttagtggaattcatgggaacatgttgaaacttctcagaagtgatttgctaatggcttgccctcttctggtgccatgtaaaccatttttgaaacgcttagaaattgtgccctgagagataagccctcttttaatttgaaattgctgatgtcgatgttaacagaagttcatcatcatcactgcgggggtgaaatcgctgacatttggcgaaatccgcctgctttgcagaatgcgcgtttccttccacacatgccaggaatttctagcgtagctgggcctgtctcagcctgggcaggaacagagtgagggtcggtcctcctatgcttcccgttctgccgtgtgatgcagaggcttgtgtttgtgtgggtgtgtgcagtctcctcctcacccctccacaccctggttattgactgaccagaaatggcctgcagttcttttgggagatttcatccacaccataccttttgtttctgagtccatggtgaagaatacccatggaaaattgtgcagttagtgattctgtgatttttgttaacaattccaagtccaaaagaatgcagcttgcactaaaacgtaacagtccatgagcctatcgtgccctcttgtgttttctacatcctgtgagctaagagctgtatttacatgaacattatatgaagatgtcctacttcagttccatacgtagtttgagtggaacatggccacctccatctgttcacgtacatccatggctgcttccacccacaatgcaggggtaggtttgaatggttgaaacaagaccttgcagcctgcaaaaccttaaatacttactatttcattaagaaagacctcatatcagggtactgctggccttgtaaaatgagtttgaaagtgtttgcatttcttcagctttctggcagagtttgcattagtctgttttctgttacttataacagaatatgtgaaactgggtaatttgtaaagaaaaggaatttatttcttatattaatatttataggggctgagatgtccaagctcaaggggctgcgtctggtgagagccttcttgctgttggggattctgcagaggtcctggggctgcatggggcatcacatggcgagggggctgagggtgctagctcaggtctctcttcctcttcttagaaagccaccagttctactcctgtgataactggttaatccattagttaattaatccacagatgtattaacccattcatgaaggcaaggttcctcatgacccaatcatcttttataggcctcaccactcaatactgccacattggagattaaatttcaacatgagttttggagggggctaatatttaaaccatagcgaagttttctctttttttcggtgatggaattcatcagttaagtgatcaggtcctgggcttttctttgtgggagagtttatattactgattcaatctccttacttgttattgttttgttcggattttctgtttcttcatgattcagtcttagtaggttgtatgtgtccaggaatttatgagtttgttccaggttatccaatttattgctatgtacttgttcatagttttttatgtttctttgtgtcttaaatggcatcagttatgatgactgctctttcatttctgattttgagttttctctttttatcttatctaggtaaagatttgtcaattttgttagtcttcagaaaacccaacccttagttttgttgatcttttctattgtttttctagtctctcctttatttgtttctgctctgacctttgttttttccttcctttgctaatttggggtttagtttgttctttgttccttcaggtacaacattaggttttgtgttttgttttgttttttgagacggagtctcactctgtcaccaggctggagtgcagtggcgtgatctcggctcactgcaacctccaactcccaggttcaagtgattctcctgcctcagcctccctagtagctgggattacaggcacgtgccaccacacccagctaatttttgtatttttaatagagatggggtttcaccatgttggccaggaaggtcttgatctcctgacctcgtgatccacccacctcggcctcccaaagcgctgggattacaggcatgagccaccgcgccctgcctgacattaggtttttttatttgagagttttttgtcttttaacataggcatttattgccataaaccttcctcttacaactgcttttgctgcatcccataagttttggtgtgttgtgtttcaatttttgtttctcccaagatatttctaaatctctcttctgactttttttctttgacccagtagttatttaggagtatgttgttttatttccataaacttgtgaattttccaagattcttcctgttattgatttctagtttcataccactatggtcagaaatgatacttgaggccaggcgcggtggctcatgcctgtgatcccagcactttgggaggccaaggcgggcagatcacctgaggtcaggagttcgagaccagcctggccaacatggcaaaactccgtctctactaaaaatacaaaaaaattagctgggtgtggtggcatgcacctgtattcccagctactcgggaggctgaggcacgagaatcgcttgaacccaggcggtggaggttgtagtgagctgagatcatgccactgcactctaacctggatgacagagggagactccattaaaaaaaaaaaagaaaaaatactgaatatgatttcagtctccttaaattcgttaaggtttgttttgtggcctaacatgccatctatgctggagaactttctgtgtgcacttcagaagaatgcatattctgatgcaatgttctgtatatgtctgtaaggtctatttggtctaaagtgcaggttgagtaccctgttttcttactggttttctgtctaggtgatctgtccattgttgaaaatggggtactgaagtcccgtacggttgtggtatttctatctgtcccttcagatcttttaatatttgctttataggccgggtgcagtggctcatgcctgtaatcccagcactttgggaggccgaggcggggggatcacctgacatcgggagtttgagatcagcctgactaacatggagcaagcccgtctctattaaaaatacaaaaaattagccgggcatggtgatgcatgcctgtaattccagctacttgggaggctgaggcaggataatcgcttgaactcgggaggtggaggttgccgtgagccaagatcgttccattgcactccagcctgggcaacaagagcgaaactctgtctcaaaaaaaaaaaagaaaagaaaagaaaagaaaaaaaatacttgctttatatatccataaatagtgccacaaaagtgattgataatggggtgaatgtcaccaccatgtgtgcctgttttggctgaggtgttgtttctttgtaggtgaattgctgtcaaatatagttttatgcaagaggtatactagtagccataccattaataattgcacgtgccaggattcagctgcaaagagtgtatcaagtgcccgcattgagtatctataaggcatgctcttgactttcactgacagagagaaggatgctcctgggtgacattcatgtatgactgggcttatcagaattgtgacttgaatttgatcagtagtttcttctcaagaagttagggagctacatattagaggccctgcctttttggctttatatgattccagatcaggggttggcaaatatttttaaaaacagccagattaggccgggtgcggtggctcacgcctgtagtcccatagtcccagcactttgggaggccgaggctggtggatcacaaggtcaggagatcgagaccatcctggctaacatggtgaaaccccatctctactaaaaatacaaaaaattagctgggtatggtggcgggcgcctgtagtcccagctacttgggaggctgaggcaggagaatggcgtgaacccgggaggcggagcttacagtgagccgagattgtgccactgcactccagcctgggggacagagcgtgagactccgtctccaaaaaaaaaagagccagattgtattttacacttttcagtccccgtggtcttgctgcaaatactcaaacctacccctgcagtgagagtgaaagcagccctggatgtaggtaaacagatgggagtggccatgttctagtcaaactttgtgtttggacactgaaatctgaacttcaacacattttcacatggcatggaatcttatcttttcaaaattttttcttaatagttagaaaatgtaaaactaactcttagctcacaagttgtgggaaagtaggtaatgggcagaagtagctcctgggctgtggtttgcaatctgctgttgtaggttgtaagagtatgttctagaaggtggcactctgtggccctgggtgaaggtggcctgtccaatagtttctgcttctcctgctggtgttgctggtctgtgggctgggctgttggtgtctgtggttatggtttgagtgagtccttttccagaacttctgcctgggacagtggttcctttatgtgtaatgagggtgggctgcggcggtgtatgtggagctcaggtgccggcagtgctgccagtaagctggaatctatgtcccatcatgctgagctgtgtttgcagccctgatcattgtcagcccgtgagcaggcaggcgttcacttctgtctgacctggataattaagtcatgctaattgctgcagctcctggcacagttttttccagcctaattgggtaaaatgacaggcagctgctgtgttggtcggccctcctgggcttctacagctgctccagttagcacccactcttactgtttgcacccagcgtgcgggttccctgttgcagagactccagttgcactgggtactgactttcccagacaggaaggctgtgggtaatgctggccttaccaccaaagcaggctctctattgttttgtccactagtgagtcttttcctgttctaattacatctctgctgtgggatttcagagaaaatcagctgatcttttgtctcctgcagggcgggaaaggacgcataggagtggtcatatcatcctacatgcatttcaccaacgtctcagccaggtaggatgaagatgtcagctcgctgtcttgaggtgctaaaagctgagcctgcatggggctgaaggctgtctgcgcgggagctgttctggataccaagggctcggctgacctgtgtttcccatcccccagtgctgggttggtcagtgcctagaaacccagtttccagttaagcgtttacacttgtgaaagtggcattttccaggttgggtgactgtgtgattgattctaagtacttccatggaggcattaaaaaaataagtgaccccactgtcccttgttctttaatagagaattctctaataaaaaataacagagataaaagtcaccattatgaaaagaacagagtggtctcactaaatcagctcataccttgtatataatgatgatgacagccacctcttttgcaggcactgggcctctgggaagtatactgattattttccttttctccctgaattctcctaactaatccatgaggcagttactatcattcccattgcatggatgagggaggtgaggctcagaggagccaggcagcttgctcatgatctcacagcctaggagtggagagccaggtctgggctggtttccatgagatggaactgtaatcgtggagactttggaggtgccactcgggtcccctaagccagacatgacacaaacacagcagggccacaaggacctcagccctatgcccatccttctggccctgggcagctgtggtgtacacccggacccttcccagagtgcagatcttcactctcgctgaaatgcagtgcagaaaatattatttatggggtctacatttgcatctgccctgtcttctcaatggcctctttgtaaagcctgaactttccattctgaggaaatagaagcctattcatatcagccgataaaccttttcctttctagcaccaaggagtgaaatttgactttctgaatgttttctctggaaaccaactgaggagttggtgcctgccagggaggaaaccaacccccaagtgaaaatcagataccctcttggtgagaataatcatcggtgtgtgtgtgtgccaggaaaatcgagattcctgggcacatccatccctcaatgatgccaaagacatttggttggtgactaaacatagcctggctggttctggacagagaccacctgagcacttctgtttttttttttttttttttgacagagtcttgcttcgttgcccaggttggagtgcagtggtgcaatcttggcttactgccacctctgcttcccgggttcaagcgattctcctgcctcagcctcctgagtagctgggattataggtgtgtgccaagatgcccagctaattttttgtatttttagtagggacagggtttcaccatgttggccaggctggtcttgaactcccaacctcaggtgatcactcacctcggcctgccaaagtgctgggattacaggtgtgagccaccacgcccagccacacctgagcatttctatccccagcaaagtagtactgcctgaaccgaagttccatgcactgtggatagtcccggattttttgggaagggtagatgtcttagggctaaaaacacacctttgacgctcttggtacaaactctgttttctctcaatagtcaatatgtatttcagctgcatgtgtcaggcaatttacctgaatctctctaagcctcagcatccttacctggaaaatgatggtagctctacttcccagaatgttgtgacagttcaacatatgttacacaaaaagcacttagaacagcatcggtactcaggtattggctatcattaacgctgctgtgattattaggagtaatagtattaagtgcctttcaattaaatgggctgataccacatgctttttgtgacttgattttctacattaatatcattttatatgcatcatttcccgacatcatttcagtggcagcatagcactttattcaatggatatgttatgtatttaagcatttgttgattttgcctatccaagttgcttccagttttgtgtacgtgtgtgtttaagacagagtctcactctgttgccggggctggagtgcagtggcgtgatcttggtttgctgtaacctccacctcccaggttcaagtgattctcctgcctcagcctctcaagtagctgggattactggtgcccgccactatgcccagctaattttttgtatttttagtagagacgtggtttcaccatgttggacaggctggtcttgaactcctgacctcgtgatttgcccacctcagcctcctaagtgtgtgttttttttttgtaatttaggttgcttccagttgttttctactgcaaagcttgccatgatgaacacattcttatacatatatttttgatcatttctacaatgttccctcttagattatattccagaagtagagtaatcccagatagcacaagcacacatttgagatctttatcacaaactgcaaacagaagaaaaaagaaacttcaagtcaccagagaagaacattcttgtatcaacaccatagaaataagagttataaagacaaaaccagtactaatattattactactactcatatcactatacaaaataaacattggtcaaaatgtattctcagcatttaataaaacaagtaaatttcagaaaaaggaatgcttaaaagtcactgggaggctatggagctgcactctgctgctcagtatgtgatggactcggtgctaaagtgggcccttctgtgtgtgactgccccaccagcacagccccttgcctagcaaatgcacgtagcaagttgtccattttatagtattctgtgaaagtcaaatcacactcaacttacttttgagtatgtttctttttcctcctgcctgtctctctaccaggatttttatgaagtccgcagtgcttatgtacatcatttttctggaggggcacagacacatttttctaagtaacgggcccactttatcaggtgttgttgttgttgttgttgttgttttgagatggagtctcactctgtcacccaggctggagtgcaatggtgcgatctctgctcactacaacctctgcctcccgggttcaagtgattctcccacctcagcctcccaagtagctgggattataggcacccaccatcatgccgcggtaatttttattttcagtagagctgggatttcaccctgttgaccaggctggtcttgaactcctgacctcaggtgatccgcccgccttggcctcccgaagtgctgggagtacaggcgtgagccaccgcacccagcctatcagggttttaaggaagcatttggcccaaatgagttggaattgttaagacactgcactcatattccaggatttgtgctgaagtcatatcaagaaatcccatgaatgccctgctgtgagatttctggaagtttctgtcagacactacctgtgggcactgtggacctggcattgaaggtcaaatatattgttggaaagcagggttactttcagtcacttcaaaaacaatgctgcagccccgaggcctgagacacctttccaaccccagtgccctacagccttctcaagcccagtcctgggagtgacatactggcggggcacaggctggcccacttgtgtcccgagggtgcctcttgggacttcatgggggtgtctgttgactctcctgccctgggttgctccctgcatccatgtggtcctgaaacttgagtctgcctgcttgtcttgcacagagcccacttaaaatggtcttctttatttaggacgtagggtggccaagggacagttttggacaccagccctaccacctgcctgctgagaagcctcagttggttcttctgcaagctgggtattcagcactcttaagaataatatctttagataaggagctgttatttcagatgagaattctgaccctgcactatggctcccactttgagcacagcatattcctgcgggggaaatgaagtctaacaagggacaggtggattgggtgtgcacaggtgcagcaaagggtgaagccccttgtgggagctggtcgctttgaacagccatgagacacatcccccgtcaagtacccacgtggtgtgggctccactgagttaactctctttctctctctctccccttcagcgccgaccaggcccttgacaggtttgcaatgaagaagttttatgatgacaaagtttcagctttaatgcagccttcccaaaaacggtatgtatagatccccaaagccagagtgaagaggtgaatgaaattttacatataaaaatgtgaaaacagaagaggcatctcctctgtcccgacacctaaatgaatagtattcttgggtcatgccaaagactgtgaaggtggtggggagacttgtccctcccagaggttaaggacttagccatcctgtgtgtctgtggtgagagacagccccctatgctgctggcttgcactgacaggtaaagggaggacttgctccagttggcattttcctctcttgcagtgagtgagttttgatttccattattatgttggaacttggttctattggctagaccaggggtcagtgaactatctctgcaacggactagagagtggatattttaggctttgcaggctacaggatctttatcgcaactgttctaacatgaaagcagccctgggcaatatggaaatcagggaatgtggctgtattgcaataaaactttacttacacaaacacattagcagttgcacttggccaattcttgtagctcatcagttccctgaggccacggagtatttttctgtcatgctgcccatctctcccttctctgctcctgggcgtggcccctggaatgagctcagtaagtgatggggaatagtcatggtggggtgcagaactttctccttttgctgcccaccccagcaggctgaggtcaagaacctgagcagggctggctgagaggcagtgagaaggacccacagctggctccccatccaggtgcacttacttcctccacagatggtgacacttagagccaaccaggtagctccatggcatatttcaaagcccacagcagggaatttgtaggagaattgccaaggtgattgccaaatggtgttccgttttggagacaggtagttgcacacccgaccttgtgtatgcaagttttgatgccttgtatctattttctccagtgcaactgagggctatgtcagcagacatgggggtagacgggcagaaagggatttcaagcatcaccagaggcaccttttccttttgtcttgctatttccaatggcatggctctgtttctcttgaaaccgggtgtgttggaggaacatgggctagggtgtaggactgtggtcagcaacagggcccacatgcaatgcaagttgtgtgcagaaaacctagcattttctaaaatattttagttaaacagtcacttgggttttttttttgtttttttttggaaccattaaatgttatttctttgttgaacagtttccaaaatcgtgacattcatatgacctcctgcatggaaaatgaggtgtaaatagggagtaacccatgcagaatgcttggcacacaggaagtccagctgtcgtcttttcttttttttgttcttatttcttacggcaccagcagcttgtttataacattaaaagaatatggaaaaagggggaagatatctcttcattttcttttttttcttttcttttttctttttttgaaacagagtgttgctctgtcacccaggctgtagtgcagtggtgcaatcttggctcacagcagcctcaacctcctgggctcaagcaatccttccacctcagcctcttgagtagctgagactataggcgcacatcaccatgctcagctaattttaaaatttttgtggagacagtgtctcactgtgttgcccaggctggtcttgaacccctgagcttgaataatccttctgctgtggcttcccaaaatgctgggattgcacgtgtgagccaccatgccctgctcttctcacattcccatgcccagggttttcatgcatccttcccgtcattgcacatttgaagccagaacatttgcattttttaatgcttgctggattcaattttacattccaaggttaatccctctgctcctgagattagggaaatgccccttactccttgctcttttctttttattttgaccagagcctgcatgaaaagatgctcaccaaatggtaatcgagcatgtaaacgaatgaatgcataagataaatctggaggaaagtttgagaccagaagaacgtgtgaggacagcttgtatgggaataggctctgtgatgggaggcttctctgttgtcctgaatggcctggggagtgggatgggtgcgctgcaggctgctttaggactgagctcaagaaatcattttaaagtcaaactcgtaataatcactcttgagaataattaattagcaaggaatttgtgactgggaagctcagaagtctcaacagcaactctgatgggaggtcaatctttgttacactaaaacgccatggagcagttggcccatggagctgacccgtaaaactcacatgtgcccatgtaagttttctgtttttataccttccttgtcttcagcaaatcatgagaagcagcttgttgacaccccagtgtggcctcctgttggtgctcatgaccaccattgtgttattgaggcacccctgaacttccttccctaaacttggaagccttcctctttgagaagtagttaaaaagaaatactgggtgtggcacagtgactctaacctgtaatcccgattctttgggaggctgaggccggacaatcccttgagtccaggagtttgagacctgccttagcaacacaggaagaccccatctctatcagaaaaaaaaaaaaaaaattagctggatgtgatggcacacacctgtagtcccagctactctggaagctgaggtgggaggatcccttgagcccaggagttggaggttacagtgagctgtaattgccccactgcatgccagcctggatgacagagctagaccctgtctcctcctaacgccccaaaaatccgggtatagttttggtttattatcagcatcatggaaataatattaaaattattaacgtttctgacatctcttttcttttctgcctttcctttctttctgagatagttgagacagcagcacatgtttcttggccccatcacggagttaatggggaaagtgacaggtagccagttgtttctttggggagctgatctctcctgagtgttgcctgccaaggtgaccctgggaggccccatgtgggagtcacctaagaccatcagtcatgttgtctatgcacatttgggtgtccctttgaggtaaagggaagacagaccaaacaaatgtcttggcatacagaaatcaggatgtcctagaaattatcctatatagtgttactggtggaaggtatccgagttaccagcagtgaatccataagggtctgcaggaacctcaattcttgcctgctcagaagaaagaatttgactgagggatataaggcagaaaaagagacagagacaagtttcagagccagagtggaagtttattttaaaaggctttagaacaagaaagaaaggaaagtacgcttagaagagacccaagcgggcacatgaaggtcaagtgtggtgtttaaccttggtcctagactttataggctggcccacttcccatgtcttgtgcccctttcccgtgattcttccctcagagggggctgcccgaatgcatagtgccctccttttgcttgggaagtgagcacatgcagtatgtttaggaagttgtacgcatgcctatctgagggtttcttcccttttctggtgatgtaccctgagaaggtcatactctgccattttttctgttaatgcacgtgcccaagaagttgtgtctccctggagcctgcattcaattaacagtgcaataggcgtggaccatcaggaaacggcctcctcctggcaccagctgccagtgtatcactttcagagaggcaatgtgataattgccgaaccattaccccacattctcctagtgcgtgcggaaagagccctctgctgccctgctcatgcctgtctaactgcctgtaaaaatggcattatttgatttttcatatttctgtcatttttgacacagtacctcaggtgcctgaaagaatactttaaagatacaaggagagtagttttccacattctctaaaggatgaggctcctcagatagtctctgtaaccgacaaatgggttcattattcaatgcccagatatagccgatttaccaagacaggggaattgcagtagagaaagagtttaattcatgcagagctggctgaacaggagaccagagttttattactacccaaatcagccccctggaaaatttggaggctagggtttttcaaagatattttggggagaagggggtggctagggaatggggtgctgctgagtggttgggggtgcaatcataggggaaagtgacccttttgcctctgagtccacttctgggtggggccagagaacagttggcaggtcaggtagagctgtcagttgtcagaaatgcaaaagcctgaatagacatctcaaaaggccaatcttaggttctacaatggtgatgttatctctagcagtaattgaggaagttgcaaatcttgtgatccccagagtaatcttttaagtctataccttggcagaattcaagccgctttcatcctaccaatgtggtggtcttgcattagttttacaaaagtggtttagttttgggctattatcatttaaactataaactttactttctcctaaagttagtttggtccaagcccaggaatagccaagggcagctaggaggttaaaggcaagatgggggttggttacattagatctctttcactgtcatacttctctcactgttaaaatttttgcaaaggctattttacttcatgcccctgtggcccctccctgcacatcctccttgctgcccacagcctgcggaaaaagggtgaccattcctcagggagccacacactttgcctgggcctggacatcccctctgagcctccaactctgtgggcaaagccacctacactctggcagcatacctcaggagagcagaggctgtggcagatgtgttgtggtctactctgacccttatgtccatgcaactgactcatctttgcagcaattccaatgtgtaggtctcattattcttcccattacatgagagggaagggaatgctcagcagaacgttaagaaacagcccaggcttggctgacaccaacaggtggcccagctcacctttcctggccggttggtgctgcccctgcagccatggctgactctgtgagtgctgggaatgtagaatgagtaagctgttgggaaagatgtcctgtgacgatggttcctgttgcttggaaaaagtaacatttgaatgctgatttttatgcacccaccatttcagacagatttaagctaacgtctagtgcaactcaaatgtttagggagatttatggagattccaaatggaagtttttgctgttagaagtggctgtgaataatgcaagggacaactgaaaatttcaagctgcttttatgttcgtttgcttacaagtttaaaaacaatcctttagtttttaaaatgtactcactggtttgagaagcagcatggaaaacatcatctccagggagttatttcctaaaaagaaagaaaagatagcaatgggaaaataatggagctgtttttataaagtatctggtttctaatctttccagctctgaaaactgtgttgactaagtaggaacattttattttggataaggctgttgggatggtctttagagggcatctgataccctacaattgattcatttatatctacctttaatgccacagataaatactgtgtatacgaagttaaagttgatcctttccatagtcagctggatgaactaattgtgcaattctgtcctattatgttcatttccccttcttttctttttttactttgagacagggtcttgctctgtcactcaggctggagtgcagtggtgcagtctaggctcactgcaacctctgcctcctggttcaagcaattctcatgcctcagcttcctgtgtagctgggattacaggcgcatgccaccatgcccagctaatttttaaaattaattaattaattttttgtagagacaggatttcagcatgttggctaggctggtctcaaactcctgacctcaggtgatcctcccacctcagcctcccagagtgctgggattataggcgggagccactgcgcctggcctcccttattttcatccatacctgaatgttctgttctttggtactgatggtggttctctaagaagtcactcacaaactcagtgctattacctacgttggctatctgtctgcaatctcatagcattcactacagcttatatttgcagtgaactttgttgtttttataaggcattgctattttttaaaaaatgttttttaaaggcatgcttttatttgggattttgaacaatatgttggtttttttttgttgttgttgttaatcttaccttattaagaaagcatgtgaaggaagaaaaaaaattacatttaccttagcattttatgtctttaatttacctgaaaatatgatgcataaaaagttgttttctataaaggacagatgagaattatattccaagaggttactttttgattggttaagctaccacctgagcagccctttgtagactgacctgggaggtgatgactgttgagaactggttttggggagaagactctggagtcctgggtcccaggcagtgacagcctccttcccttcccctctgaccactactgggcttgtggccctggactttggccttctttgggagctcgtggcaaaacaaagttcttctgctgtcagcttggccctcctcatctgaaggaaatacttctcgtgcttcgtctggtgtcaggggcaacaatttcggccaggccacatcagcagaaatgaagctgtgtgaccacagtatggtacaagacctgggtcagggagaggccgtggtttcccggaggatggctgtttgcccctcataggaccttggcgctaactctgggcttagctacttggaccccttatgctgccatgaacaggagcccctcaggcccagcgctccagagtcttccatgtttgcaggaagtcataaaacaaacatcgacttcacctagatgcctggtccaggtgcacatggggcactgagaacacccccagggaacaggtccgtcttagccgcgtggtcactgcagcacatggccaggcagtgtgggactcagggtgccactgacaaactggacgagctgaggaagctgatttcccagtgaccagggctgccccgtgctggaaggagggcggaactgctccagaggaggtgactcaggcctctcaatccgggcatttgtggttcctcacttttactcaaaaccagggagccaaaggacccatgaaatccacaatgcgtaaaatttgcatgattaaacatatacaattcatgcattcctctgcctacgtacaactgagggtgagaagtcttgttgccagggtagaaagtaccctgcaggagaggcgtgtgggagctgcctggaggtccactgaagtctggtcatcagcctcacagggtccccacgtctccaggctgagcatctgtcctctgcgactcttgtgaggttttgccctgttctgagagagcagaagagaagtttgctgccaggaagatggaaatactgacatgccctgtttctcactacgaattgtaactgaactgaagcaaactcgcttttctaacattttcctagtgggtggactataagtagggctttccttttttgttaatgtttaacagaaatcttctcttgtttagtttgtttgtatacaaatttaactgcttgaataagggactgggtgtgaattgccagcgtaagtgagagacttttgtcttaacacaaggtccatgatggccgtttctggcttagggtaggatggttgtaggtgctggcaacacagtcacctgccacttcctgcctcagtctgccatggcagtagagagatgcacagattgttaaatattgcggagtttttgattgtttgggtttttcttgcaaagagtacagtactttggtggagacagatatggaaacacagattccatgcaaggtgttgaggctacagtggaggttatgtgggtgaagtggccatggtgagggacctcagggcaggggccacgccaggcagggcaccaacaggcaggacaggccagggaagcgtcagagagcttggtaagcctccggctcatcctgtggtcactgctgccacgtcatgcctcatgaggaccccagcagtcagatgctcctagtgtagaagcttccctcttgaccaccaaatgctcatggaagttgtgtgcagtcagtgttggaagcatgaggccgactcctagaactcagaaaggctgatggcccacatggccttcgcctttggagctgggccttgaagagggggacagcaggaaggagagcctcttatcagatgtggcgtggaaggctgcgggataggaggggagtatggactccagccttttcttagggctctcgagtatgagcagaaagcagcaggtgcagtgagtggttctgggcctgggtcatgtgaccctgccataggtgcaatgctagtgacagagcacacgcccaccggtgtgccaggcctctgcttcctgctgctcaccagtggggattgtgatggcctgtggcctgtggcctggctttgcctggcgataggttcagtggacaggcacagaggcctttcaggtgtgggatgctcaagccaagaggccggttgtgccttggtgtctggtgcttggtgcctggtgcgctggtgggaagccctcagacctgtaagcgcagcaccatgctgagaacccctggctgtgagcagtggaccgattctctcccagagccccagactcagccaggatgtgtttctccttgagttcccttctcagcagaggctgaagacacttctgggaagtgtaacccagctgtccgttttgcaggtatgttcagttcctcagtgggctcctgtccggatcggtgaaaatgaatgcctctcccctgttcctgcattttgtcatcctccacggcacccccaacttcgacacaggtggaggtgagtgtcccctatgacgtggcacctgcgattggctggcccagacttggagctggtcctgggcccctcaatttagataagcctcggctttccttccgagagggcccaggatctgctcctctgcctccctggcgattgactgggtcccccttcagtggtcagagccccatgtttatgtggttgggccaagttatttaatcaggggagggactggcggccagcaagggggatcagaaatacccctgtgtatatgcacagtgactagggcagacaagcattgttctgggctgcagccctagtgggtcagctgtgcagttggccttgaggtcacaagccatggaagaagcccagtaagaggcatgaatgtgacccagtctcccctgacgcatctcatgaacccatctcctcctcctcctttaaaatgaccccacaggaaagcacacagcatgtagctgagggtgagggccctgagccctccttcctgtcccacttagatgagcacagcacacgactggggatcacggccctgtctccacatccccagttccccaaaggtgcacagagtatatggccgagggtcagcagggccctatccctcctcccttgtcccatgcaggagcaaatggcacatggctgagggtcagggccctgtcctctccttcccagtcctatgcaggcacacacagcacatggctgggattcaggacccttgcccttcctcgccagtcgcatgcaggtgcttgctcagaggtttctattgtctctgaagtacatctgtgccttcaggtccccctggtcattatggccagagtgaccttgccaagctgctagttggttttgaagcagcttggcttcacttcaggagcctttggcaccctttggataaaggtcaaactgtgttgctctgcaggcttctaggaccgggtccggccttttcctgcagcaaccctgtggctccatgcactgctttcccagacctcaaaggccgcaggtgcagtctcctggtctcctcgtcgctttctgtctttctgattgccaaattcctgttcgttctgtaccggtcatgcctctacagacagttgtgcctttctttcagtgtgccggccctttctgaagctctaccaagccatgcagcctgtgtacacctccgggatctagtgagtgctgctgctgctgctgctgctgttgtgggacctggacggctcagggaactgcagctgaccctcagctgcctgtcccgcaggaagagtgtgggagggttcaggtcagagaatgccaagaagccaaagaagagtccagtggggaaaatcctctcgtggcccgtgctccagcatcacgccttggccctccctcctgccctgcacaagtgtctttgggctgtcacactagttggctccattaaaggacgtgggggctggaattttgaggggagagtgggccatttgctttttggagtatggtggccccttggttttcaaggggtattgattccaggaccccctttgattaccaaatccgaggatgttcaagtgtgttttataaaacggcattgtcttgaactcctgacctcaagtgatctacccgtctcggcctcccaaagtgccaggattacagatgtgagccaccgagcccctggccatcatggtgaaaccccgtctctactaaaaatacaaaaattagccagtcttggggtcgtgcatctgtaaacccagccactcgaggtggaggcaggagaattcacttgaacctgggaggtggaggttgcagtgagccgagatcacaccactgcactccaggctaggtgacagagcgagagtcaaaaaaaaaaaaaaaaaaaaaaaaaggccaggcttggtggctcacacctgtaatcccagcactttgggaggtggaggtgggctgatcacaaggtcaagagattgagaccatcctggccaatatggtgaaatcccgtctctactaaaaatacaaaaattagctgggcatggtggcgtgtgcctgtagtcccagctgcttgggaggctgaggcaggagaattgcttgaacctgagaggcagaggttgcagtgagccgagattgtgccatggcactccagcctggcgacagagcgagactcggtctgaaaaaaaaagaaaacaacaacaacaaaaaaactggcattgtattttcatataacccatgagcattctcctgtatactttaaatcatctctagattacataacaatacctaattcaatgtaaaggctgtgaaaatagttgttacaatgtattgttttttaacttctattattttttatggttgcatttttgttttttatttatttcccacaatattttctgtccccagtcagttgagtccatgaatgtggaacccaagaatagggaaggttaactgtgagcctactggagagagtcctacgataggatctcactactatggtttttctttctcgctcctttccattttgttttccatttttatttatttattttttttgagagagcatctcgctctggcacgatctccactcactgcaacctccacttcctaggttcaagcgattctcctgcttcagcctcccgagtagctgggattacaggcacctgccatcatgcccagctaaatttcatatttttgtagagacggggtttcactatgttagccaggctggtctcaaactcctgacctcaagtgatctgcctgccttggcttcccaaagtgctgggattacaggcgtgagccatgtctagcctcctttgcattttaaacaatacgtagccacacatcccccaaatttgtacacattcctgagttttctttgtctttttgtatgtggacaggcattttatgaaaagtcagtaaaggaaacaaatattctcattactcacaaagagctgttgtcacatttctgggtttgctctgggccctctgtgcactgatgtcactctggaattgcaccctcagtttgtaactgaaactgtggctgtgcacaccctgggccccttcctctaagcctgcatggtcgtctccaagctcgggcctctggagttggaccttagtcacttcaagtcagtcactgaccatgatgatgctatgaggaccctccatggcctgggagctttctttacctttttagattcatttagattctcaggaattagattctgggctgattgggcattctgtgtaatttctgagttttgggttgtagggttgcttttctctacatgtattcttcccacaaaatcatgaagttgcataatgatctaccttcttcttcatcccaaagcaacgttggcccagaaaaccccagcaggatctgcatcgtcatcgagccggcccagcttctgaagggagatgtcatggtgagtgcccgctgtggccgcagatgggtcggtgtccccactctcccagtggtgatgacttgaaatcatgattctgtgttaaaacagtaaccctcacccccaaaaaaagtaccctgtaggaagaaggaaaagtagcttttaccttaacactggggtcccccacgcctgggccgtggaccttatcggtctgtggcctgttaggaaccgggccagcgagcgagcatgaccacctgagcctcccgtcagatcagcggcgccatgagattcttataagagtgcgaaccctattgtgaactgtgtatgcgagcgatctaggttgcacactccttaggagaatgatgatctgaggtggaacagtttcatcctgaaaccatcctccaccagtccatggaaaaatcatcttctgtgaaaccagtccctggtgccaaaaagattggtgaccactgccttaaggcatttagttaactttctgaataaaactattttaattaaagggacggaacaaatcttcattcttgattctctttcattctagagcccctcgagatatacaacctggaaattaatgtcctaactcggccactcacttctgagaacccctgtgttctgactataatttgcattcttcacatgatcacaggcctcccagagtgtgggtgcagaaatagaatatttatgtatcattaatagccaaagtgtgaaatacagctggtgcaattacagcttgattaatgatcaaaacaatgatttctccagataattttgattcttatgtgtgttggttcttggaggagattagccattacatttttgccttttatctttcttgaatacaaacaattcatacatttaaaataattttaggaaaattttttatctgaaataaggtaagcttttaaggcatatgtatgactttcagcatgcatagaatcatagaatgtaaagatttcatggccttggaagacccacttctataaggcagtagggtgactcgagaaatagcttttcattgtattataaataccctatacaaagtttttgaggattttcattaatttccctgtaacccctagattttgaaatcttagcttagtggatggtgaactccctaccttgctggtcctgaattcttacaaaaatcaaatcagcgaggatcgaaggtggagaggattgaaggtggagacagtctaaacccatccacgcctgcggggtccctctggggcctccaggtctgtcctgtttcacatgctcaccacctaattgaggggttcttcaggcctggaaggcaggtctggaacaacagctgggcccagcccttttcaaggcattgagtaagcactttataaacatcttgcctcctgtttcataggcaagaaagctgaggtttggggtgcgtcatacgtttttataggcccgtttcctcagctctctgttctactgtcctaaggaggaggacctgggctggaagtctgtcctcagcagtgctgtgctgcagcgatggtgcagcatccctgtggctggaagtgagagggaggaccaggaggggagagaaacatccgctctggtgttcctcacatcctgtggtccagaaggcagccctgggcttgtttcctaggaggcttcaccctggaggctccttctcccaggacacttcctgggatcgttggacgaagggcctgagtctgtattgagcaccggctatgttcagcactttactcctccacccactctggaactgggtctagtgttccagctttaaagaggaggccgggctgggcgcagtggctcacgcctgtaatcccagcactttgggaggctgaggtgggcggatcacgaggtcaggagatcgagaccatcctggctgacacggtgaaaccccatctctactaaaaatacaaaaaataagctgggcaaggtggcgcgtgcctgtagtcccacctactcaggaggctgaggcaggagaatggcatgaacccaggaggcggagcttgcagtgagccaaaattgcgctactgcactccagcctgggcgacagagcgagactccgtctcagaggtaaaaaaaaaagaataggccaagagaggctgggggcgatgctggtaggatttgcacccgccctcatcttgtttgcgtagtgttctacctgccctgggaggcagcatctcaagggcgggtgctccctgaaccaggtcttcagtgatgagtagttattgccccacggctccgtccctttaagatgactcatgggaggcagctgaacaactcagtcatagagggtgaccctcaggctaagatgtgtcttcccccctaccgcccaccaagagcatgggacggccctctcccctgggctgtttatgggctggtagctgcagggtcttcctgagaccaggcggggccctctcccctgggctgtttatgggctggtagctgcagggtcttcctgagaccaggcgggcgggggcagtctcctgggaagtgcctggctcctctcctctcttcccagctacctcctcctccttccttctcttctcccctctcttctctcccaccctgcctttacaaacttctccctcctcctcttgcccttcttccttttcctcctctctgctccctccctccttcctcctcattattttctgtggccccttcttcctactgtcattcatccagtagtcttttttttgaatgttttgtgcttttggagttgctatgcttgctctaggcccatgagtgaagtttttgccctagaggatcccgttggggacatgggctttctggcaggagggaacctactgataccgtgtagcctacagaggccttgatgagacggggtgggagaggtcacaggaggactcagatggacgtgtcctgtgagttggctccaggttggaaggggtgttattatacaaacagatgaagcatcccaggcttgaggcacccacaaaggctgatgctgttgtaaggatgtctgtcttgcaaggaaagtcgttgtcttggaaggttgaaaccagattttgtagggcttacatatttgcatattttgttttgggaagtgttagacctctgcctagtgcaggtttgtaaggattaaatgtactcagtcacataagtctcccaggacagcgcctggcagaggatgaaactgcatcgatgtgaccctgcggcatcaccaggtcactttcctctatcggaccagactgtggcttagtctttggggcagccactgcctcttccctctggaagagcccccagcaccccacccaccccataggccctctccccatggtgctgcgtcttatcctgtcccaccctgtagtgggcaccgcagcccaagcgtgtggtctgagtagacattacatgcatctctgttgtagcagttggaatgaggctttgagtgggcggtgtgggtgggacttggaaggggtgtggtggaggtgtgggtttggcacttgataaatgaggcaggcccaggaacagggtggggcagggcggagaggggccgtgagtgggtgaaggaggcggtggcctcctttcctcagtgtcccacctgcagcccttgggagtgttcccaatggcctccaggccaccctgggctggcgttctccagcctgccatctcctcctggtcttctacctgttgctggctctaacctgcttggcattcagactctgtgtccctcaggccactggaacccgccagccgcctcttgctgccccagctgatcccgccattctgtccccaagccctgctgatctagcactgtccacccaccctggccctgacctctcaactcaggcttcaccctttggtctcagcttaaacaacagaggtgattctcccacagtcctggaggctgggagcctgagatccaggtgtgggcagggtggtttctcctgaggcctctctccttgacctggaggtggctgtcttctccctgtgtcctcacctgggcttccctctgtgtgtctatgtcctcatctcttcttacaaggacaccagttatcattcattcgggcccagcctaatgacctcattttaatttacctttgtgaagaccccatctccaaacacagccctatgctgaagtgctgagaccttcaacttatggattttggaaggacaccattcagcctgtaacaagtctgtttattaaataaacctctcctagaaagtttagtaagattactagcgcagtcaggtgccattgacggcccagtccctgtggctgtggtttgtcaccagcctttatcctgagcacgttcagcgtgcggcctgcatgagaagatgcggtggacacgtgagtgggcagtgcagggctcctgctcccgggagtctgggtccttcagggagatgagcatgcagatagctagggcaggtggaactgagcatggcagaaggtgcgcggcggcaagagctaaaggttaggtgggagagatgatttccagcgtgtcagagaaggagtggcttcacagcagagctcacatctgtggtcgacctggagagtagaaacccagggtgtcactgccagcactcccatcagagtcgggagtgcatcttttgccaaagcccagaaatctcagtgctgttgactccctctgaaaacgacctaagggaacaacacaggaagaaaaaaatgcggttgcacgtttctcattattggcaaagcatccctagagaggagcgggagccatcccctcctcccgttcatgcttcttctgggtgttctgagggtgtgcagggcaggagcagcaccggattcctcctctccagcctcttccgaccttccagtgacccactctgccatgctcagcacaggatgcccacgccgccttcactttgcccttccttcagtttttccctgtgcctgcgtgacgtgccctgctgcaggttcactgagcaatccttaagttgagaaggctgtagtgggggaagaagttacagggccttttctgtgtaaagttcagatatgcaggtggttttatttcttttggcaacagtcatggcttggagaggatcctaacgagcagaaagcatgtgcatagatttacaccctgaagactgcagatggcttggtgccctcagtctgggtgttttctgaggctgtctgtgtacttttgaaggcggaaagtggcttcccaggcggggtagccatccttaatcctcctccttcaaaaggcctcttgtcctctttgagttttcccctccgtggttctggtgtctgccttgcctgcagggacatctgcctggctttcctcatgagggcctctgcactgggacttactggcaaagatcacagtggtcaagttcacagagaaggaagggccagagtcaagtctaactgcagaaagtgacttgggaaaacagagccccacttgccactccctggactcagttactagcagatggagctgctgcaggcaacagcaaagctgaccttgacccaccgtctgccttcgcctcgacacagccagcccatccctgcttggcccctcccagctgcacacctgacccgtcccatctttgcagtgtgcttttcccaaaaggtcagattcttaagtctgctcctttcaaaagggcagaacctcaagaggtttagtaaatatggcattgtcagacagtgccatggggagggcagccgaggcgttatgtaaccctgttcaggaattcatgcgggcagcgggctcatcaggagtctggcagggctccaggggcctgatccggcttgctccctccctggtctcggctctcaggtccacagtttgtaaacacatgcttcatcttgctgcccctgcttggacaaatccacggccacttgaattttgtgttcatggttgctggctctagaacctcgctccagtgacccgacttgtaaacaaaggtgttgcctgctcaagaagttttcacaaacaaatagtgctgttgctggttgtttcttaccgagggcacttacataaggccagggaaaatgaaagtgttctcctgagactctgccccaggagaggtttctacagatctctgttggacgcatcacagcattattttgtgattgccttttcctctcccttttagactgggctgggtcttaatccatgctgtcatctcagcatagtggacttggttgtgttttcgtttgcagccaatatttacccacctttcaattgctttaggtcatgaattacaatattgcgaacatctgaagtcattttcagctccaagtgaagaaatcatggttagtgttggccctgcctgacttaagtctttgacctatggggcttagctatctaactttttaccctccaaatatgcggttgtaactcattctctgagttcacagattccttgaggcctgcgtagacagttgcctgggccaccagtggagcattgagtgagaatgttactcttttctgttagggatgctttgagggttctgctcttttgcttagtaaatttaggggaagcagagctgaataggagctgcccagcaacggctggcattgggggatgataggaacctgaaggctgacttctgaattggggactggcattcctggggctgataccttaagccttgactctcttggtacatggtgctttttctcttgttgatggagagtttgaaataaaaatacacttatgtggcctaaagttaagcaagtcatcagtgtctttaaacactggattgagggataacttctttgagaattccatgtgtctgccttcgacttggtgtactccaggagcaaatgaggtcaaggcagggctccgttcctggtcaccagcaacttgtccagtccagtcaagggcacaggcatatttttatttttatttttatttttattttttgagactgagtgtctctctgtcacccaggctggagtacagtggtgcaatcttggctcaccgcaagctccacctcctgggttcatgccattctcctgcctcagcctcccgagtagctgggactacaggcgcctgcccccatgaccggctttttgtatttttttagtaaagacggggtttcaccatgttagccaggatggtgtcgatctcctgaccttgtgatccgcctgcctcggcctcccaaagtgctgggattacaggcgtgagccaccgcgcccggccgggcacaggcatatttttataccactattagaaaataaattttggcgatggtttctgaattgcctcatcagactaaaagaaagcaagagtgcttacaggccttcccattgagatcatcattcaccctatatgtttttgagtaccaagtaccctctctctagaagcttatgccctttaaataatatattcatataaatatagcatatcattattggataatgaattatattaatatgtagtgctaatttaatctttataacaacatagccaggtcaatatcataatactcattttgcagtcagagaatttaaagtctaaagaggctgcaactttctcaagatctgagtgctcccagcgatttgtgatgtcaacatcacacccacgtacttttgtggttggctctatgatagcatggtgacaggctgtgcgcagcctttgttgtggtgcttgctatttcttatttcatttttctatgctacaaaattgtgactgcacatctttgagttgttattttaaatgcagatattctaaaatctgaaggcaaaggatcaacatattctagaaacactctggggagacccaggtaaataaagttaaagccggagggatgaagggaaaattatagacttgaatcagtctaatctttacgaaatgtttgcattactattatatcttaaagggaggcatttgggggccctcgtaccaagtaccatgttgattgttctttctgttaagtattacaagcataattctgatctcttgccattgctcctaaaaagatttgttgatgtagataatgcataattattgcacactatggagggctcctggttggtgagtggattttgtctcaagatctgacctgctgtgttgatggtggttgctgggagccccgagttagggaaaatcctgtggttttccgtgtctttcagaagaagctggagtcagttcatgatttggtcaggaggactggggagggtggtgtttacctccattaatcaagaggaaagaggtttaatatgaaacagggattgtgtatgatgaggccgttaggatctcaagccagcaaacaaagttagcattaaaatacacagagaaacccctgaagggagggccacgtgatttcaggcagcagttgttctctgccagtgggatagaccgctctttctttcactgtggagccttaggagtatttgaaagcttgtgctgtgaaaaataggaatcttacaggagaatcatatggggcctggagaggaacctgtttgggacaggccgattcccatctcctgccactctgtacctcctgggcaccgtggcctgccttctcctcccttctggtatgtggagggagctgggattgctgcgggaggagcagtgtgtttgtgtgtagctgctatgaggagcagtggggggacctgggggagcatcctggattcctgaagagggagggcaggacctggcctggaaggaggccctgcgctgggcggggcggtactgacgggaggggcacggtgagctgcggttggggatattccactgtgccccttatgtggcccgtactggagcccacagctccctctgttttcacccaggacactccctgcctgccaggactgagcccacagctgcctcctgaggagtttcctgactcctgtgggcaaatgttggcgcccatggcagcacaggctgcgtgagctatcagctgacatcgtgttgttgtttttatttttttaaatctctggttcccttaaatatttataaaatttgagagcaagactggcttgaattggggcatctcttttccttttcccttccctaaccacttttcactccccatttgcaaggcactagtggaggcagacaggcacatttgaaggcagacagggaaaggtgggtgctatcatctctatcaatgggggtgcatgtgtggatttacccttggccagaaggacctccctctggggatctctacaatatgccccaggttgaagcatttgatgggtggtcagtgtagtgagtgtggggcatggggagctcaaaggaggggcccagatactctcagaacatcctggaaggatccctgcaagggcagcctttgattgagtcttgctgagaagtcagtctcggacagaggtggtagatttgtggccaacgtgccattggctgttggaaagcaaattgaggcaacatttcttcacaatgccagttttctacttgcaaacgccctggttcctgggcccctggaggccaggcctgagtctgagccccatgtttacagcaccgctggccagcgccaggccgtacaagggagacccagtcatgtttgtcaacagggaacatccttccacagtcttaattatatttttttggtttatttacccgtccctttccttgtagatagcacaaaggtaaacatcttctgggtctgcctggagtcacagctccctgcctcctgggctgggtttctgggctttttgttcctctggtggatgttcatctggttagggaagaccctccctgcagaattctcccgcatgctggtccggatcatacctgctgcggtggcttctcatttactgttgtgaggcatgtgatattttaaagccatctttctccaagaaaagtctcttttatgggaacgtggctgtctctggtagtcactaccccacagcctcggggttggggaggtacctgcctgtgcacgatttggtctgagagcagaatccagcctgtccagggccttcggccttctggggatttgggaaagtgccactacctggtggtcctgcccctgatctctgagtgaggggtatccctgtccctgcagctcccccagctgtggcctgagaacccttccaatgatgccagtgctgcgcacggtcacaagaagcaggggggacctagttatacaggcaggtcaggacactcaggctcctgctctgcccaccgttccccacatgccaagcatctgcaaggaggggcttgctctaccctttggctcattggcacaatcatttagggtgcttgagctgcaccctggggacctcatgaaccccagcttgagttcagatcacatcagggtgattctgaacacttgtctaaatgccaacaccctctctgtctccctctctcccttcctccttctttgtatctctgtctctaaattacagcatgcacataatcatttaggatagtacacacagtaatgaccggctgctgctttttggaaaacaaaaagctttaagttgcaacatggagcattgagatcaaagaaaagctatcacaatcagttgttaaagtctagaaaaaagagaccatggaattctatttttcggatgtgttccaaaacagggcacattcacgtggtctgaaagggtttaggtgtggcctctctgaggactagcgatagtggtgttcagagctgcggttccacaggagcagcacagggaacacattgaagcctccagtggagccccgcacccagcagcagcagtgtggtgcctctgcctgcaccccagctgtctgcaggcgcctgtgccccagggctgaagttccactccaaagcgtgaactcccagccagagtccagaggggaggccctgctgtgccggcctccgcggagtgtgttccttgccgggaacgtgtgtcccccgctgcagctactttgttttgttttgtctctctaacccaggtgaaatgctaccacaagaaataccgctcggccacccgtgacgtcattttccgcctgcagtttcacactggggctgtgcagggctacgggctggtgtttgggaaggaggatctggacaatgccagcaaaggtgaggcgcggagctggcggccctgtgcttgtgggcagctgcggttgaacctccttggttgattctttcactatcccctttaccctctttccaaaattcagcctactgacaaaattgttcccaaagtaggagaaaatgatcattgatccctggggggaaaaaattatggataaccaatgaaactgcctatactttctgtatcatggggtgtctttattgcagatttgggagtggtgctgtactggttggaataaaggacaaagtcagtccatacttttccggttaattgtctccacaaatgtgttaaaatacattgtttttttcagatgaccgttttcctgactatgggaaggttgaattagtcttctctgccacgcctgagaagattcaaggtgggtagcttggtggaatactgggtggtccttgctgacactggtgaaaggtgcatgatggctacgctggggctgtagtactagtctcctgcctttgtgcatatttggagatttctgtgattaattttatttaaatgtaggatattggatagtggaacaagaaggcccacttgtgtcagtaagccccagaagtggcgtgacttgctcacaaccactcagccaggagagccttgggcatgactggccattcttgtaggagtaaggtggtattgcattgtggttttaatttgcatttctctgggggttagtgatgtttagcattttttcatgtgtttgttggccatttgtatatcttttgaaaaatgtctgttcatatcatttgcccactttttgatgggattatttgttttttttttttgaggatttgttcgagttccttgaagattttggatattagctctttgtcagatgcatagtttgcaaatattctgtctcactctgtgggttctgtttactctgatgattatttcttttgtggtacagaagatttttagtttaattaggtcccatttacttatttttgttctgttgcatttgcttttggggtcttagtcatggattatttgcctaggcaaatgtccagaagagtttttcctaggttgtcttctagactttttatggtttcaggtcttagatttaaatcttggatccatcttgagttgatttttataatataaggtgagaaatggggatccagtcttattcttctacatgtggctagccagttttcccagcaccatttgttaaatagggtattctttccccagtttatgtttttatatgctttgttgaagatcaatcagttgtagtcagttgtatttctggattctctattctgttccattgatctgtgtgtctacttttataccatgatgttttggtaactatagccttttagtatagtttgaagtccaatagtgcgatgcctccagatttttgttttgttttgtttttaggattgctttggccatttgggcccctttttggttccatatgaattttaggattttttttttccaatttcgtgaagaatgatattagtattttgataggaattgcattgaatctgtagattgctttggacagtatggttgttttcagtatattgattcttccaatccatgagcatgggatgtgtttccacttgtttgtgtcatttctgatttctttcatcagtgttttgtagttctcctcgtatggatctttcacgttttgattaagtatatttctagttttttttttttttttttcagctgtcgtaaaaagaattgagttcttaatttgattgtcagtttggtcattgttggtgtacagcagtgctacagatatgtgtacattgattttgaaacctgatactttactgaattcgtttatcaaatctagaagtcttttggaggagtttttattgttttctaggtatatgatcatatcattggcaaatagcaacagttttaattcctcttttccgatttaggtgccctttatttctttctcttagctgattgctctggcagtactattccagtactatgttgaatagaagtggtgaaggtaggcatccttgtcttgttacacttctcagggggaatgctttcaacctttccccattcagtatgacattggctatgggtttgtcatacatggcttttattattttgaggtaagtcccttctatgcctagtttgttgagtgtttttatcataaagggatgctagattttatcgaatgcctttttcacatctactgaaatgacatatggtttttgtttttaattctgtttgtatggtgtatcacatttattgacttctatatgttaaatcacccctgcttcctgggatgaaatccacttgatcatggtgtattatctgtttaatgtgctgttagattcagttagctagtattttgttgaagatttttgcatctatgttcatcagggatatttgtctgtgattttcttttttgtttgtttgtttgttatattctttcctagttttggtatcagggtgatactggcttcatagaatgagttagttagggacaattcctctttctcagtcttttggaattgttcagtaggattggcaccagttcttctttgaatggatggtagaattcagctgtgaatccatctggccctgggctcttttttattggcattaaaaaaattattgattcattttcactgctttttactagtctgttcagggtttctatttcttcctgatttaatcgaggagggttgtctgtgtccaggaattgaccaatttcctctcagttttgtagtttatatacataaaggtgttcataatagtcttgaatgatctttcgtgctggttgtaatgtttcgtttcatttctaattgaatttatttgaatcttctctcttcttggttaatctagctaatggtctatcagttttgtttatcttttcaaaataccagctttttgtttcattgatcttttgtattttgtttcaatttcatttagttctgcactgatttttgtttttcattttcttctactagctttgtgtttagtttattcttgcttctctagttccttgaggtgtgacatgaggttgtcaatatgtgatctttcagactttttgatgtaggcatttagtgctataaactttcctcttaacacttgctttgctgtatcccagaggttttgataacttgtgtcactattatcattcatttcaaggaatttttaaatttccatcatgatttcatcattaaccccaaagtaaccagcattttaaaaagagaattagaaatatagtaggctgcaagtattatgtgcgaaacaatttttttccctaaaaaatatatttcaaaagaaaccagtccctttatcatcaaggtgaattgtccagatccatcaccaagatccacatgcatgggagttttgtttccctttttaatagctgtggaaataatcatgctttttctatgttcattgtcatagatttaggcaaaaacctttaaatacatggcttgtgtgttaaaaatccccttggtattcctaaaaagacttgaagggaggagtgtggatctgagagcctggagcctggattcaaatctgtggactctgaggctcagagacagcttaccgggcctctgtgtcctcatcagtgaggtggtctgaagactcgttttgcagaagtgtccaagcctggttcacagtggacgaaagatcagtgcttacttatcccttccccctcgtggctttaactatggttctagttgtggaaaatcctccacagtctctgattagtgttgtggctcctggcaggagggtggaggatggagaggcttctctctcctgctcaagtcaggctgctcacctgtccttatggtggagtcgggtggatggaggtgatgggtttcactgggactaatgttgctgcctgtgctctgtgcagggtccgaacacttgtacaacgaccacggtgtgattgtggactacaacacaacagacccactgatacgctgggactcgtacgagaacctcagtgcagatggagaaggtgcgtgtgttcatcttgtgtgcagttatggaggcaaagggcacagggaagacagcccactcaaatatctgaagtattttgcagtctgctaagaagaaaaaatttcccctgttttctcagaggtccagaatcacaccttcgtgtgacacagttgtgagttttgagggtcttcgtgagaataaggcatggtgagtttgggtcagggctttttgtgaagctgtaacgggtggatgagctgtcagtgaagttatatccaggagctccttggcctgaacttgtgtgtatgtataatgccagggaccgttcccccttcttccgtcccttccgttttgcatatggggatgccaagcgctggccacagccaaactagctactgttgtacggccccacatgcaacagacatcttgttttaatttctgtttgcttgttagtctagtgttcccgatttatggctgtatcatttaaatctctgttttcgtgaaaccgtctcacccaaacatgtcctctgttcacctgtgtaatatgcacattgggtcatagctaggagcgtgaaggaggaaaggaaggaaggggcagctgtgtgctggaatctccacaagacacaactggaggctgatttcaaaggaggggaattgaggcttttcctagcatgtcatgctgatcccttgtctttttcaaccaccgattgagaatcagacttgctttgggaaagaaattaaaacactttttgtcagattagttacatccagatgtaaaatagctaaaagcaagtgttgtggaaagaactgcagtagcgcctcatctttgtggatcgctgagcttcccatgactccaggaagggggtgtctgtggttagtgagaaaggacaccaattgtgtgtcccagggcagcacatggctcctctctgttgtcctggggaaaagcttgctccttcataggccttgtgggatggaatttcaactcaaggaattgttgcaacccaaatacacctagaccagaggtggagacccacagatggaatgttgatggtaaggacattaaaacacagatgaaatctggggctagtgggcaagttgtggacggggagagctttgctctggcctgtaaagtaaacagagtgttctttgctggtgtgaattattcagcacaccagtccttccagataaccagcacgttaaaagaaatgtagctgaaaactcttgcaaaatgatacattgtctttcaaaagatcacagtgcacactggaatcttaaagctgtgagaataatttcataagatttatcaaacaacagttatcaaactttttgatcacagagctctttttccagtaacgtctgtttgcatctgcatagctatattctgtccatcacatggtgatgttttccactggaggagagaagggtgaagcggtggctggtgaagtgtgtaaataatcatcgcaaggcaagatggggaaaggggctaatttggagagctggatggggactctgaggacagctgacttagcatcctaaattccaggctgaggcgagtggattttaccagagaggtcccttgctgcatgggagccagtgagcagcgctctgtcctgaggtgatgaatcagtggctgtgccgagtctcatggagaacagggaggcgagttgtggaaaggtcattctcgtgatgctgggaggttccttgcttgccaagggaggggcgagcctggagggttattgaccatgagggaggcaggggttctaaaacacaggtgggtgttctctgtgccaatgccgtaagaggggagcagtgaagtccggtggacagtgtggaggagccccagctcctgtgaggagcatgctctggagggcagctctgtgctcagtccctcattgggtgccccgctcttgtccccaagctggctcccagctaagcctgtgacctgcctgcggggcaggctttatccttcccatgtcacaaccagggaactgaaagctgggcgcctgcagcatgtcactcacaggtggtgaaggacctacgttgattttatgtagaaaacatatagacagaaaatcagttgagtgttcaccatcctttaggggttacatgaaactttacggagaatctgtggaattatgtgtgtgagcgtgtgtgtatagatccatacatgtggaggacttgccgttatcactgggtgaaatagacagaattcagtcttaaagactctcagccaccgcagtgtctcctgaagatgcagagggagatacttctttactttgaggccctctcagcccattcacgctgccttgacagatgaccataacctgggtgtcttaaacaacaagcgtgtatttctcctactttgagaggctgggaagtccaagatcaggcagccagcctggcggattctggtgagggctgtcatctggttgccaactcctgccttcttgtgtctccacgtggtggtgaggagagggagctccttggagcctcctttctgagggcatcaatcccacttataggggttccacccttatgctctgagcaccgccaaaggtcctgcctcctaataccatcactctggggattaggttttgacatatgaatcttaggggacacaaatattcagtccatagcagatactcaatgcgtgtttcttgaatgaatgattagagaagcaatttgaactttaaatatctaaggccctgacattacaaatcacaattcccattggtgtatttttcatgcagcatcttctgagccagtggtgtgagcaggtgggagactgctgtggattgtgtggttggaggtggtggagccatgcaggtgatggtctgggcatgcactcgggactctgtgtcaccgagagttgggtctaggggcgagtagagaaggtctggcattgccatgcaaaagatggagccagttgggagtgggtgcataggagttctggaaagaaactgagaaggacagggcagagtgggaaggacacccgggaaagagtggttcccagacaggagggtgaggagtcggatagggcgccaaggcagccaggtacactttgcagccagattcacagctttgtcattactgcttccaggcttcataaagcagcagagaccccctttatgggcagagtcatgcccagactcctcagggatatagtgggtgacagtgcagcctcctcccagtgcctggttcatcccttgcagcctcgatgatatctgaagcccatgagcacccccagggaggtggagtgacaggggaggactcagagcgagctcaggactggtatccggatgcttagcccagaacccgccacacggaatctgagtcctctcccaaaactggatctcagcaaccttcccttgaaccactgcctgagtattcttgagaattccagctcctgagttacagacaagcacggagcctttcctcaaatctgcatcccctcctcctgaccctccatccccacgtgctgtctggcgtgtctggggtacctgattcaatggaatgagttttatgcttttctttctttcttttacatacatttaagcttgtatcaatattttttgaagatgtaaattatcaaaaagaaggaataattaccgccatcttactgtctagagatgaagcactcgtcattggtgtatttttggcatgatttctaaatatcatgtaatttctcatagtaggatcagcctgtgcattgttttatagcctgagtttttcacttaacccacctccttgagcatctgtgcacatctttaaactttcttcccatgtccttctcactgagcacactggattcccttagaggggcttccaaagtgcgtttgatcttattgctgcactcctgcagggtttccaagttctccctgtgagacacgaggctgccatcaccacctctgccatcaaagttctgcagaatccccaggcttgggtccttttgagaaggtgttccccagaaagagtagtcacctttggatagaaaactcatccttgttgaatttccctcctctcttccactctgcagccctcctcagcccctctttggcatggaggccggtgtgctgcattggtgagctattactccaggcagtcttcgctcttgcctgcggtcagcagtgcctggctcaggtccctggactggacgccgcctggcgggtgaaaggctgagtcccagccgcattcccaccagggctttagtcttcagagctgtccagtgctttgaggagttaaggaaggtttggcagcctctgaaacattctcttttagctgggaaaatgatgtattgcggcactctcttttccacccctgcccctgccttttctatccccccgccgcctggttaaaaaaccccaaaaatgttgacttaagccgcatttatctctagcagtggttgccgtcctggaatggagccctccgcagctgccttcaatctgggcctgttaggggagcgctggctttgatgtgtgagcgcaacattctgcttctatactcagaaaggagccggccttgaatccgttccaatgtgggcaagtgattacaaacgccctgtcttcagcacagagaggagcacatggtcctggtctccccgtgggtctgtggtcctggcaggtgtggctgcgggggacggcagtcgtgtcagtgttccctggggtagttgctgtccctgaggagagggaagaatatctcgcggcacacagtgtggctgcctgccggaagcctcactatggtgttttaatcctcgagagagcctgtgagcccattttagagataaagagagcagatccaaagagaaatcaaaagctagtaactggccagggaccctggtagccttctggcgtacactgtcggcgatggcagctgtggctcagagtgtgtcttgtgctcgagaccgtgcgggacagggctcatacccttgactttcctctttgagactttgagactcagtgagactgggctgagtctcactgggtgccccacctcctcgtcacacaagagggctgtgggtggggggatttcttaccctagcaggatgtacctgctctttcaggatcagacttgctgtgatggtctaagggaatgcccacagcagcatatgtgtccctggatttgtattgtcaccaccaggattgtccccacagtactcttcagggaggctctgcaaagctctggacccccatgttgctgagccctatggagaacatctcattttcctcgctggacatctctggagcgtcggtgtcagtggccacactccccattggggtgctttctacttgctctcataagcctcattccctttcactttcccagtctgtaaagtggcctgttgtaattggatgactctaaagatacctccctccaactctgagatttttgttatcatacacaccatttgtcatattcacgcatctcatattttcttgggaattgccatggctctgatgctggggtgggcgcaggaagaaacacagcagaccctctaattgggaagacacagatatacatcagttgttgccacagggtgcaccgtgtaccataattgggtaccaggaattaggaaagaattgaagagaaacaaccactttgcctgtacaatccaaggagattcacgaagaggacagcccttgcaggtagggaatgcagacagggtatgcctagccctgggcatggggcataggcgagcagcacatattcacggggtggaagtgtgttccgcctggctggtgtgtgcaggaggaagtaagaggtgctgtgtgtggtggatcgtgagatcgggggaatgtcagcttcctttcctgagcctggcttctttgctgggtgacagtgaggatcccaggtgccacatgactggaggatacagaaagataacaaagaggctggaggacgccctctgggaggcagagtctggagaggaaggagagtagagaatgggcttctggactccccagctaagaactgacggaggcctggacttgggtgtggctctggcgatggagagtaggggcctttagatatttaggaggtagatgagtgagactctatgacagatttagaggaagggttgagcagcagggaagcttcaagaatgtctgagggttggagatgaaggcctgctctgtcactcttgtccttggtttcttgccttgacctaggactttttgagtgcagctcaaacttaccaatccaagagtgtgcaggacgagggccgtggcattgccaggcctgggctctgccactttaagtggataccttgatgaacattcccagaatccaggctttggggctcccatggggctgctagagcaggcagacagaggagattcacatttgtctgcagccttcgcaataagacacagtcctgaagtggccataccgcgttctcagagtactgttccgagctccaggaatgggctaccacgaggacatgttgggtcaggaagcgctggctgcagtgtgcagagctggcccggaagtgccagatcaagctgagaccattcaagtattgccactttgaaaatggatttgaaaactttcctccccagacattgttgggttttaagatttggaaattgaagtaaactttgacaactttagtggaggagggggccgatggcacctgacagatccttcagtcttggctctgctttttgctgagtgcttgggtatacacagtgccttgtgtctgcagcctcggtccttgttggcaaggtggagtgctgtcccccagcattgagagctgctccagggcgctttgcatggtattcagccaccctatgacatttgactctgcaccaggcagaagaatatttctttaggtcttgtccccaaaccaggcttttctaagcattgcttgcttagatagctccagtgaaaagcagctgtcatcaggcaactgaagttgtatgagacagaaacgggccagatgggcgggtagtcctgttctgagcctgagatttcctccctctgcatctcttgattgtgaattgaggcagcaagcctccaacccacaaacaccaaaggacccccttgcaggcgtgatcgcagaccaaacagcaaatcttcctcaatgtcacctgagagagtggcctgggggcgccggcttcctcctgtctcaagtgcgagaggcgtaccctctgttaaaaccaggatcaagtcatgtgggtgttactttcaaaaaattgatacactccatcagaagagtgagggtggcattgggggcagtcaaaagagttgttccagtccctgagccgccatctcattaagtgttcgttacttttcgaatccgacaggaatcagaggaattggctcaagttgtatgttgtcctgtacaagtttgcagaaatcagcccacaagagtggccttaatagttaagtagcatcaccccctgggacagagaaagaggtgctgagagttggctggatttgtcctgggtcctcagggtcctcccaacccccagtcggcacacaaaccttgggcctcctctgcttcctgggaggaagggtacccccgatatcccactggacggggtgtcctgtgcatgcagacgggtctacaaggtggatggcttgtttgtatttctgtagttactgtgtcttctccctcttcttcttcttcttcttcttctgcttcttctgcttctgctgcttcttctgcttcttcttcttcttcttcttcttcttcttcttcttcttcttcttctgcttccgcttcctcttcctcttcctcttcttcttcttcttcttcttcttcttcttcttcttcttcttcttcttcttcttcttcttcttcttcttcttcttcttcttccttcttcttcttcttcctctgctgcttcttctgcttctgcttcttctgtttctgcttctccttcttcttctcttctcctcctctccctctccctctccccttcttcttctttcttcttctttttcttttttttctttctttgagaggaaatctcgctctgagacccaggctggagtgcagcggcccaatcttggctcactgcaacctccacctcccgggttcaagcagttgtccctgcctcagcctcccgagtagctgggactacaggtgcctgccaccatgcccagctaatttttgtatttttagtagagatggggttttcactatgttggccaggctagtctcgatctcttcaactcaggagatctgcccacctgggcctcccaaagtgctgggattacaggtgtgagccaccacgcctggcctactatgtcttcttagagtccagaggagctgtgcttcttaatctcttttcactttcctctgctgtttgtgatcagtatctccattgctctttggtgaccctgcccacttaaccaacatgcatgcaatgattcatgcccctgccctacattccttccccaaagctgcagatctttggactctaattcccacctatggggactacaaccttgactgttcttctgttggtggattccctgagacatgaacctggaagagggctccatccccacagtctccctgggaccctgagccacgaagcttctcacacctagcgtgagcagcagtgtgtgtgtgtgtatgtgtgtgtgtagaccctggtgtaatgagggtttggtccttattcttcttacaaggcccttgctgccacccctttctaagtcacatctcagtcaagcccctattcccagatgtgctcttatgtccatctcctggtaggagtagggggcctgaatggcaggcgatcaaacctgctgagtttccatctgtgtcttccgtgcgtagaacctttctctccattgcctggaagaggcagggctgcaacttcattgtgcctgtctataagagcctgcaattgcacttgtgccaagtcggggaaagagagcacctgctgactttaagtatttgatatacagaaccaaaatgtgagagagaacgaggctgggactgaagaaaagcagagtctcttcctcacatgaacatgcttctgtgtgcccggcccacagggtcatcctcaccatcttcctcagcccttggctggaagagtagaacttgtgcgtgctctggctcttctctttcagccttgaaggaatgtctggggaggcgttttagattatgcatgcaagactgtctcatctacttctttctttggaaagtgctacaagatggagctgccagggcctcctaggggagggaaaggttgcggatgacttagtggaaaagggaggtgttcatacaaaaggtgcagctgggacaatctctttgacttgggtcctttgtccttatggggacagggacccttacatggaggtgcaccctcatggcctgcatctctggccccattcggccatctgggctaggagaccaccatccacatgcacgctccctttaagcaaatgattcttctgccttttagagtgacgttcttggtgctggcgttgaccttaggagtaacaacactcttggggtcaacagctttcaaactctatgcctgtggctccaggattccaagttggttcttaaggagcagccccagtctctctccatccactcctgtaagaaccctccacagccccagccccaccttgatctttttctgtttttatattgggtttctgcataaagatttgtttgaagatcaagttctgctattgaaagttgggcactctggccctgtacagttgattctgggactttagatagttaaagttgtgtttaaatgttgacaagcaagctacttgatgttaaacatgcattcagttgcatataaattgtcacttactctctctgtaagtccaaggacagaggggatgcagttgttgtattctgttactgttatctaagatgccatggagggcagggcatgtgaggtagaaggcataggtgtcagagactagtgggtgtgttccttacttaaattttttaacatagcacagattgcagggatattttatgtaaaacatccagctatttcttgaaaaacagggttgatataatggcagcttgtgctgttatgtaagaaaagcgagctttaatggatcttcagacttgctcagtttatcttgccgataggagcaattctgacctactttggggatgaaagctggttttcacagcactcctttccccctgtggacactgtgctggatggggacgcatgccaggctgagcaaagctgagaccgcctcggctcgttgcctcagcacagccatatacctagagcctgcctggctgtctgtcggggagacctggcatggaggtccatggatcggggtaagagacagggtgaccactttgctatgtgagccaggagtgttattagagcatgtcacagagagggagccaaggtcaaggcctgtcgagggtggacacccagtgacagttgctctggagctgggagcccagatttaaatccctagggcccgagagactgatgcgaagtgcagggaaagccattgaccccaggagctgggaaaacaggtttctgtggacaggaggagggcgtccccagcaaatgtcctgtgtgcgctccgcctgcacctgcctgttgtggatgtggggggaccccctccagttgatagggcctaggtggagggtacaactgctcccaggaagttttcttccacatagcaagagccagagatgtgtttagtgtttctttataagtgcatagtgatgatttcttaacaaggaaaatacaccctttgacatagtagtctttcagacttcactatggaaagttgaattaatttaggattcatggtgttgacagtctatgggaaattatactatgaaaattcaatagtatttatttttgtcagtgtgaatgtgagctaatttatgacctgggatatattctcactgaaattaggccaaacggttagagcaatagcaagatttggtgttgattgattgtgggaattctgccaagatctcaacagccgtcctttggtggcagcagtagccatacattgcccctgaactcgtagcagtgagtctgggatgctgctgggcccctgactaggatgaggcagaaggaaaagcggcgggggagccaccgagtgatgggcactatgggtgctttcctgagggtgggaagaggctgcgaggaaaccatctttctcgtagtattgggagttcattctttattcctgtacatgtaatatattgctctcttgttaatcataaatcggaggattccaataggtcacctggggagtgaaggcagagtgtcaccttctgggaagctcatgaaagaaaaccagaggccacgtgtgcttgtcaggcaggctctgtaggatccaggatgcagtctccatctcctccctgcctctctgagcatcggcagtgctggatgctgcagatacagagctgaattggatggcacagctccgtgcagaggccaggacagggctggaatggctaatggttgttgttgtcagagctcacccttgctgagtgctgctcacgagctgcacaaccttccgagcatgcagcttgcattaacatatctaatctttaccacactgaggggtcagagggctagttggtgaagccaagagtgggggcttggtcgccggctgtgaatctccttctgctgatgtgctgagctcagttcaggcagggactggattgacagaggcaggagactgagagcaccatgagtgtgtccaaagcagggtgcctggtgcaggagccaggatgcagagaagggtagagagcagactgggagtgagttcactggctgtggcgtcacttgacctgtacaaggcaggcgaggttgtctgttgggagtggacaacagtctggggagtggaggtgttgagagctgggacagcttggaggagcttcccctggcaacaggtggttgttgggtgagcagtgtggtgtgcccagtgatgtgtggacgccacactgttacggcctctgtgatttcagaggcatgcacatcagcaggggcatggacgtgggccacaggcgagggagacagcaggccttgtgggtctagatgggctaggagaggaagcaccatggatctgtgttgccctcgatgtcttaaatttggtgctggagttaaacatacattggctgtgactccactgtgctgagggaagggctggatacatgcagagaagagcaggagccagggagctgtagcggctgctagagaaaggagagtcctggccaccactcctgaagagctcaaggctttcaaagtttggtggaagttgagggtatgtcatgagaaattctaaagtcaaaccaaagaaagttatctaaagtccaaagagtcaaggccagggcctcaataaaatgttgatggtttcccaggagaagccacagaaatgccggtgatgagagtgtttgaacctggaccaagggaggcatggacgtttgggggatgggctgggaagtgaggggcaatggcagcccgcagggctggagaacgctgtagccaggggtaccagtttccagagagaaatgagttttgggtgaaagtgttctgaagtggagtgcaggaggcacaggctgccccttcccggcctctaggcacacagctgcccctccagagaccccctgggacgggcctgtctgcccatgtgggtggggaggggcctgacattggagcagggatcacacaggctcagtgtggtggacaggtagggatgtcagctcaggaggatgagtccttggaaagaaagttgggagaggagcaaacggtggagacagtggggggagaatgggtggtcacgggctggagggacctgcatttgttgaaagttggtggtgtcatgttttcaaatcagaactttctaccagaagctatctgaatttagatgtcactttcatgtgtctctccttatgaggaggaacttcacaggaggccctgcgtgtcactttctgacctgcagtccaggtaatggcctcctcagaagccacaccctgatctgtctaggtggacagctttcttttggcctggaaccctgcactagagggtgcagcatgtgatcacagtgtcggtttcattccggtgaccagtgcacagaagagagtgtcttctctctccttgaatgttgtgtgccccaggctcccttgcagaaatcccctgtctacctggggtcagagcctgcctctgtccccagacgctttgtataaaacctgagtgcatgtgcgagcctcgggctggttgccgttgctttctaaatatgcccttgttaccatgtggtttctagcctgagaatgttcttactttttatttgttgagatcagattcatagcacataaatttaccattctaatcattttaaagtatacgatgcattgatttttagtacgttcacaaggttgtggaactgtcgccattatctaattccagaacatcttcatcaccccaaaagaagccctgtactcattagcggtcactcccagttcctcctttcctcagcccctggcaaccacgaagctactttccttctctctgtttcccattccggacatctcactcactggagtcgtgcaatgagtggccttctgtgattcgcttctttcactcagcctgtgttccagctgcattcctgttacgctccatcctttcatggctgtggtgtgccactgtgtggacacaccacactctgcctattcatttgttagctggtgtgcatttgggctcgtaacactttttgtctagtatgaataacgttgcctgtgaacattcttgtctgtgttttggccctaggatattcttatacctctaatctttcccactactttttgaaatttccacatcttttctcatccttctaattggtttcccattctggaattttcttctgcctttagggagtcccaaataggagtggcactaaacatactgccaacctcctgtcccgcttgctattttcagagatattcgggaaactcaacaagtcttttcttcattagctgcacagtggtcccttgaacgataattgaactgtgtgagtccacttatatgcagatttttttcagccaacacacagattgaaaatacggtgtatttaggatgagaaatctgtgtatatggagagtccacttttcctatactcaggttcctcgaggtcgactgcaggatttgagtatgtacagatttagtatactcacagggggtggtgggggactggggggtgctggtgtcttggaaccaatcccccgcacatactaagggtggactggccagcctcctgcacagaattacaacccttcagggtgaaaaggcttgggggctttcaaaacactctgagccacagaactgccttctggccaaacatcagcaaagcttcaaaagaccacgttgtttcaagaaaggttaatactaacagcctgcacaggctccatataatcaagacccattagcagggaacctgtagaaaatgagagcgttctgagcctgcctgctcagtggctgccagctacgtaaacaagatctgaagaccagtgggtgcctgttgccatatattcacaaaggcttatggcagcccgtttacaaagctgtcatccacatgaagaaaatttgccctcagccaccgaaaaacaaaacaacaaaaaccccaaccccacccaaatcaagcccaacccagaacaacatgaaaggaaacactccttttgaacatacaactaatcctgctgcctctttccattagaaatggataaaggtaccttggccgttgcttttcttgcacagttttgtgatgcagtggtctgattttaagatttgtatcctgtaggaggctgggaccccctagccatatctagacatacagttagctacagtttggaaagaccccggtgctcaggagagactcggacattcattgcgttgtattcactacttctaatctcttttcgtttgatgtgtattctttaaagcaaagtattttgtgataaattagtcactgcctttattgcagtgatcacatcatttgcagaatggtaacaataatttcggttctcttgataggaaggtgggttagccaataccctttaaagaataccaaatttgatagaactttttgcacaataagtgcattatgtctcatcataaaagagattgtttctcccaagggtgcgctgagttttaccttaacctcctgtaagcgacatatgccaatgtggccatctcgggtgatttaaaagatttgttaccctctgcgtgcacttatagcccaggtatgtcctgtctcccctggatggctgattggtgatttttaaaagggtttccattgtgctgtgggaacctgaaggcatcagaacgggcttttgcttgtttgctgtgtcatattctgttcatttaaagagtaaaagtgtgtggttggtattgtggcccatgttgagccaaagcaaagagtaagccactgtctgaagcccacctacgttgaatgtaatgaggctgagatgaaaaggatctgctacactgaacacagaacgtggaggtctgggctaaccacacaaaatatgctgtgtgcagtgaacattcacgctgtactcttagccacatcccgcacaaaagacagagagacagctcccaggagatggagcatgtgtggcaaagattttccgcctggttactttgaagaaagcaaaaggaggctgaaactgtgctttgtaagctgcatgggttggtgctggctcctggacgtcagttcagaacactcaggagtgaaggcagaaacctggtgagggactcccaggaggagcttctttctccacctttcagcctctggagttcaaatttcactcaacctgagtgcaccaaaccccaccctcttatttacattgccctggcctttttggcggaatcaaagtccctacatagccaaggagatcttttaccttctacactagtgggaggccaggtgcctgggagggaggtggcacgcccccgccctcctctggcatgccactgtcctgctgtgaaagcctgtgtcaaggaaaactgggctcagaggtgcagactgagagagccgctgggctgttttgaaggaaggtaagcagagagcatttgtgtgtgtgtgtgtgtgcgcgcgcgtgcatatgtgtatgtgtgtctgtgcctgtgtggtgagtgtgtgtgtgcatgtgtgtggcttctgtaatgctacaaagacctgaaactgagctgtgtgcctgctgagatttaccaacttgccaagacttccagaggaaaagagctggtactagccaggaggagagggcgttatggagtggaataatcagcagaacggatgctttaaccgggcaagaaggaatgtcgctcaggacttgtccaggaatgcctttattggtttgcaagctggaggagtcttaacttactgacttctttttggggaagagtcagtgatggtctgacatgctgtttgcaagctctctggccgcctctgtggccagccggcgtgggtggcctcagataaggccaacaggacctcctcttttcctctgggcttgggcccctgtgttttcagttaggagtgcccaaaagggaactgagctgcccagtcaggggcctgagataggcgcctgctgaatgctgagcctgcaccggcgtgctggtgtgagaggtctgcccggggagccgccctggcctgccctgctgtcagtgcggctgtgggggcaccttggcggcgtctgtgacacgcctgccacagccccactcggagcacagtgctcctttatcgccacattccagagcctcacccaggagaccgcgggagcgcttggaatctggcccagctcctgagtcgctcctgctctgcagtgggatgccttcccttcccagagaggcagtgtgtggctgggcaggcgtttctgtgtggaaggttctgctctggttcttgcttttgttaattttttttctgctctatatttctctaagaatttacagtctgcctcatttttagaaagcgtgagcaagcagctcagctttacttcagagggagggattttccagcgccctccggcagtctcagcaaggtgtcctggtgctgccgctgcagcctctttcctgctgggcacctcccctcctggcagctcagagggtgatttgggtttgggggcttgggaaggagttaactctcaaggtgagactgatgcaccaagggagcaatgccttagaatggagttattctgcctaaggagagaaagagttgtccctacagagtagagtttattaccgtcttttattttttgtaaaaacaaaaataaaaaaagaggaaaagggcacatttcatcgcgtcttgaaatatatcaaaatcatagagtatctgatttagtagattaaaagcagtgttctcaaagacccaagtgtagtcctcatttcttagctcttgaattttctgtggaatagaaaatgatttaataaaaactccaaaaatcattaattagcaaagagtcagaattctattgtaataaaattaaagcagaccttgtttgagtgagaggttatacatgctctaattataaatgtccacatggaaaaaacgagagtgatttttgcatatgctatgggtaagataatacaacgccccttgagaaggaacctcttggctcagatatcgcttcctgactgggaaggtctttcggtgtctgcagcccctaccaggcctccagggatcaggtacccttgggacactgcccgggctacccgtacctcccctcctcgcaaatgtgagaatgccccttgcttcattgttaaccccattcaaccctgccttgtgctctgggccacagcctagttttcagccctcctggcttggtgatggactcttccatgcgccggagcctgaaatccaggcagtcccttagcacctgtcctcaccagcactgaaacccccactggctgttccacattgtgcagcaccagacccatcaactgaatggtctgctggaaaactcacaagtccagcgccggtgccatggctcatgtgtcagttgacctagcaaatccaggagaaatgttctctcactgctgaggggaggtcatgtgatgcagtgatgggaaccctgggtgtgcatgacacaatctgccagaaaacccttagccctccccccatgaaacttggacatgcttcggtcccttgcaatccccctaaccttgtgggttaagcagaggagaatccataccccttctgggtttggtttgagcctaatgagacaataggtacgaagtgcttggaagacagtggttgcccagttagcttattactgctgcttttgccatcattgctgtcagtcaccgaggaaacaaacaaagtatgggatgggaaaactgttttacagctggtaagatcctgagctgggcagcttggccataaagtcgcactgggtggatggttagcaaagttggtgcctgggacaatttcagtcatatcaaaaaatgacttagggaacttctgaatacgtttttttaaacccatctttcaccatagctttatattagagaacagttcctcagtgtaattctcgagacgggaggtcagtggacctgcgttctgtgtactcactgattagatgttcatggagcactcctctgtccctcagctctgcacccagagggtccacacatgaatcacttgtgagttctgggaattcttcacttgaccagagagggggaaagcacagaaaggagggtttgcccaatgcctgctgtgtgccatgccttttgtgttgaatcccagtggtcctgggagctgatatcagcaaacacccccttctccaggttgcttctctgcagacaaggacagtgaggcacagaaaggcggagtgattcatctgaagtcacacagctatgatcaagccaggactcaagcctggattatgccagaacctctagaaggggagggaaggtgtgcacatgaatcactccaatggaaatgtcaaaagacgctttatgtgacaatgaggcgcaaagggactatgatcgttatcccaaggagagagggtttccattgtctcatggaatttaggaagaggagggaaggcctttgaagagggggaggagggcatgggggagaaggagaaggagggaggggaggagggagaagaagaggaaagggaggaggagaaggaggaggaaagggaggagggggaaaaagaggaagagggaaggaagggaggagatcaagaggagccacctcaggttggggtctagtctgctgtgagtctcatttttgtcttgatctcacaacggttgttttaactgagatgcaatttacatgcagtaaaatttgctctgtttagtatatagtagtctgagtttgacaaacattatgccatgacactcccaccactatcaagacgcaaatatttctattgcccaaaccatccctcacaccctttgcagccccactcttctcctggccccgaccacacccatttgtgtccagacacagtgtctccaccccagaatgtcacctatgtggagtcgtacagtcgagccctttgagtctggcagtgttcactcggcatagtccttgagacccctccaggagactgcctgcagatgagcactcgtttttgaaaccgaagcctctctgtcttcagcattttccctgggctgtggttgtcagagcccaccatgggcacttgcagctgcagacatcattccaataagcctccacttattgggactgtttggatatggtgaattgattcagctggacggccccaagtgagtcatttgagggtgacctagggacaggatggttcctggctgtgtctggagaagctacctgttccctgtggtggtccaggcacaggcaggacctctggcatatccatggctcctgaccccgatggggctgctggtaccatgggtgtgtgggagaactgaagactccatgctaggaacagcacccgatccactaactgtgaggatagaaatgcactagctttaagaaacggaacaaaaactgtgaccatcactgcagcggctgtgacaccacaagggtctgttcctgataatgaataattttaggagttagggaggaaagcacaaagcacttaatagtctctgaagagtgagtgaggtgtatatgagtttgtgtgtgtgtgtgtgtgtgtgtgtgtgtcttgatctagatagttgatctgtgaaatataaaaagtgattgactaggattagaattttatctttttttggagtggagggaggttggtttaaatttcagatattctattcagtaggcttgtaaaaaaaatcgttaatgttagtgcaggctctctcagcctctgatttctcatctgtaaaatggacttcccgtttcctgcttcacaggattgctttgggaattgagtaggatccctggggcctaacagtgtgctgggcgcatgggaggagcttgcacggtggccttgtctttaggaggtcagctgagttgtaagagaggggtgtttccagaattctctctgtttgtcaggtgatgaagatgccaattcctgcagcctcacctggctcacctgagggtggctgcttcagcatcagtggatgcctttcttctcacacactgctccgtctttcccttgcctctgttgatctgtctattcggatgccgtgaaatgtgcccaccaccctttccatctcttgtttctctctctgttccccaagggggcttgtccattctccagcacatcatcaggactgggctgaatattgcttttaagtccccgtttatgactagcaatcatagcaagtgcttagtcaattctaaccaactttcatggagaagaattttctagtttctcctttgaaactaaaaaattgcagggaggatactgttagttcttttgaaatgaaaaagttactttttaagcacacctgtcacaaaaatagaacatgagattcttagcatcaatacctagaaaaaggaaaggttccacgtcgcttcataaatctatcagatttgtccttcctttgcttcaaaccaacttctgttggaagcagggccagtggacagttcagtggattacacatcagtgatgaatatttttggttgctgagtgattgatgatggagggtgctgaagtgtgagatcagctgtccctttggctatctgattgttagcatgccggggagcacagttgggcattgcctaatctgttttcaaccgggatggaagggatgttttcatatatttttttggtcttctccattttttgggtgacttttgaaatactttctgagtgcctcttaaccctcttacctccttgtgggaaagccacgtttcagtagcagggttgggttggaaagagaaggatcccctgcagggaaggtgggtgaggaagtctgttgctgcaagtcctccaaggagacaagaatgtatgctctgtattttcttccttctggtccttttccaggcgataaacctcactggtatgtcatgcagtgaaagtcattcagggctgtatttatgtttgttggatttttaactaagatctggccaccaggaaatcgttgccagacagtggacagcctcccttgggaggggaggtccttgatgctggttggctgggtctggtggcaacgcaagggaaaggggacaccgaatgggatgatttaccctggactgagatgtggaaaggttctcctcctgcatccgcagctgaagagctatggcatccctgcaagttacttcctcccactctaagattaggttctgaatttgcagaatgagggttgattcagacttccccatgctccctttgagatggaagcaaaatgttaaaatatgttatttaatgatataaaaagatggaaggagcagacgagtggcaggaccccaccttttagaactctgtccttaccccaccacctcctcacagcagtgtcagccctaatagcacatcaggtgccagagacagagtggagacttaaagccctgcagcctccctcatctggtgggggctcctcaccctgcctgctcctaggagctcatcagggcaccaggaaccccacccacaacccatgtccaggaaccacaaatgggagtttagttggctatgtcatttctgtggtctttctacatcacttttccaaaccagaaccatattatcagtagcattctctcatcagttaaggagggtattctttaatgatggatcagcgcctttgggggctgcaaacagcagggtgcgggctcctgtttggtttctcattggcgagactggcagtcagccatgcagtgaccctgcttccacacctctgttaggtgtcttttctagtcatgattctctttttattgctcttatcctgcagcttttgcattgagtcttagaaagcatagcaatggcagaaagtgtttagatgaggctctttcctatgtgcccagtgtagaggtagcagtttcataggtgagaagatagacgatacagaggtcagaagacagatatttacccagccctgccacttggagctgtgtgggtttgagcaacgaaacgccagcctcacaggtggcaggaggataaaggagactggaaatggcagatagcatggtgccatttgcttgcagctgctgtttgccagggctctgtctcattaatctttgtgcccctggttccaagcacactgtggccagataatgttcaaatgttccctggatctctggcccatgcttcctgcttcatgggcaaatgggctaacctttaggtcatgacttttgttttctttggaatttagaacccttagattgggtgacttcagttatttttccagttgtgttcattatcagttggagaccagccaggtcagtagtgatggctgccctgctcccgcctctcacggatggctggacctggctgtgctgcctgggaagaggcccagagagtggggacacctgggttgcaggtggccaagcgctgcacggctcttctaccttcagatccttgtgggctgtgtgtgtgtttggttttggttggtgattgttcttcgtttgcttgttttgcctgctaaggcagctgagctttccaaaatagctccccacattttgtcatgtgtgaaaaagctcaaacttttagcctgtcactcaatattcaccgggtgtcagaggctgttcactaatgctagaaatgcaagggagagcaaaataaagcaaactccctgccctcagtgagcctgagttccagtgggtaaaggtgcagttcttctgaatgcaagtatgtactgtggacaaaaactcagtgaggaaagggtggtagggcagcacctgttgaggaggtgagggagctgagatgcagagaaagacaaaagccaaggccacagggcaggtgcatgcctgcagtggactgctaggaacagggcaggcggtaaagagatgagcccagggagcggatgcaaggccctgtccactatgggaagagcctttaatagtaattatgagtactcttacttggagcctatgagctgggtactttatgtccatattctctagttctcataactttaagagaaaaatggatggcatctttgtatctttcattcccttgaaagataggaagcattccattttgtaaacgtaaaaccaggaaactgaacagcctgaatgtcatgaccaggaacacacacagagtaaatggtggaatggggatcccatcttcaaagataaagggaaacggccgtctcctttgtccgactgaagttcaagctcttccttttgcaaaatgatagccctttatgagaaaacaggataggaacggtgtgttccagaggccccttctccttccctccccctgaggctgactctcctgcccccactgaagaccacggaggtgtaggtgcagggggttgtctgtggagctcctgggatggcctacccagagctctgcacctttaggaagatctgtgctcctacagagtgattcagaagcttgaccagtcctatcttggaattcacttgatatgtttcatattcctttcctgtacgtttaacatttattgggcattttctgatgtagaaaactacctatgtatgtagcaggaagtttagcaagagtccagcctggtctttggcactggacacagttggattggactctctctgtcccatggctgtactttcatgtattaataggaaggtggttgaacgccacctgggctgtcaggattcgatgagaccctgctctgagtgctcagaatgggcctgacgtagatggagtgtttagtcaatggtaatggaaaagttgttgtttttaatgcatctattattattttaagatttctactactaataaaataggattattcataccctccccccaggagagggactatcctgtgccttaccatttggtacagggccttctaatcaggtactgttcttagcatacggggcagggagctagctgaaggattccacctcagactgattaataagcactttttgacagcattttaatttagattagaagaattgttttacaactcattattgggcttttttttaagtcattgtgccaatttattttaactcagatttagggagaagagtgtgggaagtcatatagacttagcagcgtgaaatctgtgaccgtaatgggtaggctcatgctctgggctgagtggccctgcagtgtgtgtcctggctgcccgccaggcgtgggagggactgggctgatggccatacaacaccttccatcgtggggaggaggagtagtttctgtcattctcacggagcagaagccgtttatcagcacctccttctcacacgctgaaaacagcaggaaggatttaccaggttctttcatttgttaaattttcctggtaacaggaaatctaaacagaaaccaaattaaattgatgtttactcagggcctataaagacactcacccgtgtgctatgccatttaattctcaggtcaacctttacatagaaccatctacccacaccctcattttatagcggggaagctgaaggtcaaggtgaatgcaccagttggtagaaccctaagggtggactcaggatggagctgggatttgaaccagtgtccatctgatgccagagcttcttcaagggaccactctacttcacagtcacctagtgatggcattaacaaatgcattgcattttccatttttgaaattgtagaggtgatatttgcacatgccttatagtttagtccagtctttccagtctttccctttgtttaatttgcacagagctgggcgaaataggttttttagtctctgcctagtctgaagcctggtcactcactgatccctggtcagagcaatgtgagttcaatgccacctctttgtgggcagggccactgacagagcctccaggtgtgtgccctcctggtgctctctgggcaggtgggcagtgggccagcaggagcacacaggtttcagggccagtgcacctgggttctaggcccacctccacctcctagcagctgcctgaccttgggcaagttatttattctctttgatcctcagttccttatagataaacaaggaataacaacataggtcatactgtgagaattagagaaaatgcacgatgctcctgccctgtcaataaaaggtactcagaaaacagtagctgtcactgagactgttaccttgaattaatcccatggcatatgttctgtcatcactttccctgccttgaagccttggtttattttcagcattttatgtagcatttctactcccagacccttcctcccctaggcttgactttaggatgggagtcagggccactgcagacgggcccatacccctgtgtccactctccccactccccacttctctgcgtgctttcccttgggcactgttgaaacaagaagaaagcctggcgtgggcgcgttttcagcaccacaccccaggaccccttgggactctgtcccaacacgttgtcccagtgttttcaaaaaggccagcagctgctgaccatggtggtgcatcaacctggagcccggggctgtgaggcacatgctcagggcaggtccctccagagggctcctgggccaggctcagtgactgctgttaggtagtggctcacgtctctcaaattccaggtgcccacgcagcgtgggcttcccaccaccagcagctccctggctgtggaatgcttgcaatttcacagtcgaggaagtagaagaaagtgcgggaggcccatggggtgaggcatgtgctgactacaaactcccgcttattttaggaggctcttggtaaggacctgctatgtgtggtcgcggcaattggccagtcagcagattgaggcttgggagtccccgaatgccagagccatggccgtgattaataatagcagctgatgcttcagcccttcctgcccacactttagttcaaagtttcattttcctgacattccatgtatggaaatcagcgcatgcaggtcagcctcaagtgtctgtgatcctgagacattcacccggcacctacgtggcccaaagttgctgtgccaaacaggaagacccaaatcaattcctgcactttctcttttcattgaatttcgtattgacatttgagcagacattcagtttttttcttttcttttttttttgagacggagtcttgctctcttgcccaggctggagtgagtgcagtggcatgatctcggctcactgcaacctctgcctcccaggttcaagtgattctcctgactcagcctcccgagtagctgggactacaggcatgcgccaccacgcccagctaatttttgtatttttaatagagacgggtttcaccaagacattcaatttagtaggagtttgctacccagcacctagctgatgctcaacaaatgttagacaggtctatgaacggaagctcttcttgtctaagatgaacagtccattcttggggatttatgatccaagccgagctcaatgttcacaatcatgatgaaattaaccatgagccctaaaggcaagatgattcaaaaggtgaagaatcccagagttcaaaatgacaatttgttttgcatggaaaggtagaagtgattctagcacctgaagatgtttatttgaatgccttttcattggcatcctccagagtatatatagaactttgtgatgttagaggaatctttgtccttgtttattgtaagtcatattttgaatccatttatttgtttagacagatgcacacgcccattcagagggtgtgaggctcactttcatccctgactgaaagcctctctccggttttctcccccgcagtgctacacacgcagggccctgtcgatggcagcctttacgcgaaggtgaggaagaaaagctcctcggatcctggcatcccaggtggcccccaggcaatcccggccaccaacagcccagaccacagtgaccacaccttgtctgtcagcagtgactccggccactctacagcctctgccaggacggataagacggaagagcgcctggccccaggaaccaggaggggcctgagtgcccaggagaaggctgagttggaccagctgctcagtggctttggcctggaagatcctggaagctccctcaaggaaatgactgatgctcgaagcaagtacagtgggacccgccacgtggtgccagcccaggttcacgtgaatggagacgctgctctgaaggatcgggagacagacattctggatgacgagatgccccaccacgacctgcacagtgtggacagccttgggaccctgtcctcctcggaagggcctcagtcggcccacctgggtcccttcacctgccacaagagcagccagaactcactcctatctgacggttttggcagcaacgttggtgaagatccgcagggcaccctcgttccggacctgggccttggcatggacggcccctatgagcgggagcggacttttgggagtcgagagcccaagcagccccagcccctgctgagaaagccctcagtgtccgcccagatgcaggcctatgggcagagcagctactccacacagacctgggtgcgccagcagcagatggttgtagctcaccagtatagcttcgccccagatggggaggcccggctggtgagccgctgccctgcagacaatcctggcctcgtccaggcccagcccagagtgccactcacccccacccgagggaccagcagtagggtggctgtccagaggggtgtaggcagtgggccacatccccctgacacacagcagccctctcccagcaaagcgttcaaacccaggtttccaggagaccaggttgtgaatggagccggcccagagctgagcacaggcccctccccaggctcgcccaccctggacatcgaccagtccatcgagcagctcaacaggctgatcctggagctggatcccaccttcgagcccatccctacccacatgaacgccctcggtagccaggccaatggctctgtgtctccagacagcgtgggaggtgggctccgggcaagcagcaggctgcctgacacaggagagggccccagcagggccaccgggcggcaaggtgagctgggtctccatgggaggtgctccacgggaggtgctccacgggaggctaatgtgtgatgagaaatcagcctagtaggttagcttttggcgaaatccacaagggagggacatttcccttgcagtttcaactcttgtgaattttggcctaggatccaaatgctgtcatgctggtgtggtcccttggtaggagatttggaggatgggaagaaccaggcagaagacttgctgttaacgtcagtgcaggggcagggacagcatgctctctgctggaaagggccggtcatgcctccattgcagaatgggcttaacagtgaaaccattcttccttcgtgaatgttggtggatttacaaagaaagcatacttacttctgtccctgcggtataggtcagggctttgtggaagaatgccaggtacttcagtggggctgaaggttggggatgaagaagactactgagccctcagacagctttggcacaaggaattgattaagcagtcgtggtataaaatgttctgattacaaatacacctgtcagagttggccgtggtggtgtggggagactggttatggaaggcagtggctgggcagaggcctggggtccacaaggggttctactgtggagagcagctcagtgatgggaggggcttgggggaacaggcccaggggtgaggggactgagagctgtggtgggacccaaagccatgggacccggtgcgggggcctctggggatgccccaaaaccaggccggggtcatgctaactgcagggaggccaggactgcacatgtccttttcccgtgaggctggtggtttggaaaccagcacagtgcctttctgtgcagccttgaggcctgggaggaaccagggctgagagtggtggacaggcagtgacatctgcctgggttacagcagcactatcttcaagctgcatcgatgtaatggggcaagttgcatgttgggaccaggttactatacagtgttctttctgttgggaaagcatgaaggctgaggggaccagagagctggaggtggtcaggtcggccagggaaacactcagcaggcagagaggggcattgggacggagcagggttgtctcaggtaggggactgtgtgggtgagatcatgtggtctggaagctcctgcacagaggtgcacgccaggagaggacggccaggctgtagcggctgtgcctgcgggcactgggaggctacagaaggtggagagacagagctgtgttctgggagccctggcagtgccatgcaaggaccaggacccaaaggataaccttgggccagaaaatgtggcatccgtgtggtgccagggcctcccacattggcacgttggggtgttttgccatctgggggctgctggctccttagagggacttgcctctaaaagtgaagaccagagaggtaaaggacaagggacatggctgtgtgacgccgtgcatgtgattcccaccatgtgctggtaacacggatgagagatgctaccatttatgctggcgtggttcttggtttaggtgtgctggcccatgtcatcgtcctaagcaccccggctgcaggcaccagtctctgccttacagtcgtgttgatggaggtgtcagtagattatgtggcctgcccaggttcacatgtggcctgcccaggttcacatgggacctgcatagtagagcaaaagtcagtgccctgaggtgtggactcagtgtctccatcctctttggagtcacacaggtgaggactgcagtcccgactcaggtctggggtggcctgggcgaaggagcacacaccctgcagatgttggtcctggcttcaggtctgagtgtgctgtgggttgcctgagtgacgcaagtgggtaaagggcagcgtctctgtgaatttctcttcactccatctgtgagaaggaaaccctatcccagtgcctggcccggggaaggtgtgaagaaacgctcgttcacatccacctttcatgtactaggtgtgtgactgagcaaacagctgtcattccagcttgcctgagtaactccctctttgtatgtcatgtgctgggagttggaaggagcctggagagtcccccatgagtagattattggactttacaatacagccgtatagcaaccacaacaccacagcagggtagcagtccctgaacaataggtccaggtcgatgcattaaacaaatatatttgggaaattctgagtttactaaaaaggctctaatgggaaaaaactatctgcagtatcatacctgacttacttcaccaaaccttcttaaaagaagttacttggaaacattaaaatcagaagtcttttctcctggataacaatctcatgtaggtttggaggaggctggaggcatctgagtgtatgtggagaagaggactccacatacttaggttaacatatagtagtctcttggcttaggttaacatatagtagtctcttgaggttaatatgtcttccaattgattgaattcaatccttagtgattccctgttcttgctgcaaagaaacagttataaggcctggaattttcgaaagccacatcatattatccaccctcagtttggctgtttttaaattacttggtaaactcattactttatttttttatttatttttttgagacagagtctcactctgtcgcccaagctggagtgcaatggcgtgatctcagcttactgcaagctccacctcccgggttcgcaccattctcctgcctcaacccagtagctgggactacaggcgcccgccatcacgcccggctaatttttttgtatttttagtagagatggagtttcaccatgttagccaagaaggtctcgatctcctgaccttgtgatccgcccccctcggcttcccaaagtgctgggattacaggcatgagccgttgctcccagccaaactcgttactttgagaacactttttttttttttttgagatggagtcttgctctgtcgcccaggctggagtgcagtggcacaatcttggctcactgcaacctccgcctcctgggttcaaatgattctcttggctcagcctcccgagtagctgggactacaggcgtgcacctccatgcctggttaatttttgtatttttagtagagatggggtttcaccatattggccaaggtggtcttgaactcccgacctcacgatctgcccaccttggcctcccaaagtgctgggattacaggcatgagccaccgcgcccagcccaataacacattttgattttgattttagatactctttaatgcgttttattataaaagttatttaattatcattttgaagtctaaggactttcatatctcaacaacagaccagtaaaattcagtgcatatttgggtattgacaatacaaatttaaagtatttattaatctattcatatttgacaggcatctggggccattggtccatttttttcatagcttcagaactaaaaagatgtcagaagattaggtataagcaaaactggttaccagtctccccagagctttttaaaattgggaagtgaccttcttgtaggaaccctgccacacatgagcaactgtccatgagcagtgatgaatggacactgaagggttagccgcagcattggaaacagggcagagtgagccatgcccttcctgggagctccgcttcctcttccaggacgtgcctcttgtgctaggtaagcaccaagctgggagatggagcaagccttgagacttgcacttcatttagtgtcaaaagcctgcacagtgtagaggtggtctctgaacagcctgcatggcaggcttttggatctcagtccaagactttctgacctgatagaaatcccattaaaagatgcttactgggccgaggcaggcagatcacctgaggtcaggagttcaagaccagcctggccaacatggcaaaaccctgtctctacaaagttacaaaaattggtcaggcatggtggtgcatgcctgtaattccagctactcgggaggctgaggcaggagaatcgcttgaacccaggaggcagagattgcagtgagccagagatcgcaccactgcactccagcctgggtgacagagcaagcactctggcccaaaaaaaaaaaaaaaaaaaaaaattattgcttacttctgtagctctcaggcactgcagctaagcaaggaaggaattgtttcttccctcactagcaggtatagaaaacactggaactcttttgattttaaaatttaaatttcagtattgacatttctcaataggaaatggctactttggcaagcggcagaaaacaaaaattactagatcctagcagggacacgcgtacaagtgtggtagcaaagcagctagttccgagtccctgggacatcgtcagaaggttggggatgctgctggagtgcctgcactttgaaggtgtcctagatccctcaatccatatccgtctcctcagccagccaaaggagaccagggctgttgagctggagccctcctctttcagcttagatccatgtgtgaataggaaggattctggcacgtccaaaaggctcatgacatgcccagaatggtaccatcacctaaccctgcaaggggcatcatttccacatctgtgtgcatgaggttcagccccatagatagtgtggcattgcctgactgactggagactaccttgagtctcgctcacaaggggaaaccatagactggaagttctgagagcactatgtctacatgagccccttcttgctggcctgccttccatctcatccctggacacaaactgctacacaactttcttaattctgactgtggatgaaggtttgtcacagagacctcagcatcctgaagttaccagaatctttcactatttgcagattatgtcctcattatgagaaagaccaccacttgtggtagagagttgggaatagcattgccctgtgctcctccgggggacttctgtgcatcctgcattatttatgagatgaaaattatatgtgaaggctaagtatttcctgagaaagtctttcataccagcaccataataataatagtggtgctgctgctgatggtggtgatgatcacagtgatggtgatggtgatgatgatggtgatggtgatgatggtaatgactgtgatgatattgatggtggtgatggatatggtggtggtgttgattgtaatgatggtgatgttgatggtggtgatgatgttgatgttgatggtgatgacccttatgatggtgatgactgatgatgatgatggtgatgatgacagtgatgatggtgatgatgatgatgatgatgatggtgatgactgtgatattgatggtggtgatggtggatgatgacggtgatggtggtgatgatgttgatggtgatggtgatgaccctgatgatggtgatgactgtgatgatgttggtgatggtgatggtaaatgactctgatgatggtggtgatgttgatggtggtgatgatgttaatggtggtaatggtgatgttgatggtggtgatggtgatggtgatgactgtgatgatgttgatggtggtaatggtgatggtgatgatgacagtgatgatggttatgactgtgatgatggtgatgatgctgatggtggtgatgatgctttggtgatagtgatgatgacggtgatgactgtgatgatagtgatgatgtttatggtggtgttagtgatggtgatgttgatgatgttggtaatagtaagaactgttactctgagtgcctacactgttttaggtaccttcatttcaccaggacacgtaacagagctctcgtctctctgactctgcaccccatggctatgtcctaattccactaaactcacactcttacaccagccagtaaacctgttgagggaagtgctcattattttttttccctggcatgcaggaagagttcgacatatgtttgcaaatacaggggtctgggacaggcggaactgcaaatgatccttttgagacctgaactactctgctgaatgggcactgaggggagatttatcgctggacagtgtagagtagccctgcccacctacaagatcagagagaggccctccagaggtggggtatcacaaagctctggtggctgagacctgggtgctctgtgtgccagtgagcacagttttgtatccttcttgtagaatgggtgagattcagggagttggtttggggacattttactccccacaagtgcctgccagccatgaggccctgctccctcactctggtctgacttctgctgccactggtgttttgtggaagagcccctgggtgctgctgccaggctcattgtccccgccccactctgggtctcagcctggtttcagcctgcacgtggtgggttttttgtatcatacccttttaagtgggagaatatttcaactgatgatatcccagtaacaaaagaaatgactcaacctgtgaaattcatgattccgtgggtggcaaaaagccagttctgtggttttttttcataccttgagggctctttgcttcatgttgtcaaaatattttattcatgttacatcaacctccaccctgtgatgacagcaacctggcaggccctgttctgcttgcagatagtgctgtggcattcccaccaggcatttaatgtccctcccagactcggcatctgctctgttagtgctaacccatggctgataacctgtgcatcctaaagaaagttcagagcaatggaaactgtaagcttttaataattgaccatggagagcccgttgatttaaattgtgtgctaaaccccaaccaaaggaaccaaatgtgaaagctggaagagcgctttaggattcagaaagcagcttatctgcaagctctgattccgtggcagaaggctcacagcctcacaaagtggagacaggcagacagtcccacctcatttcaactccagagttggggaacgtgctgggggtgctcagccagagcctctcagccaggccttgtgaggcagagggatccttaccaggcagatggtctggaggagaggcagaccgggagaaagcatagtgtgccagggaagttcagtgctggggagtgaggctggagatgcagataggccccaccatggagggccaggatgggggccaaggagtgtggctcttccctgagggcagaggcgagccttggggtcttgggctgggcccttgcttgttttttttttttttttttggcatggttactgtcttaccagaagagaaggcactgagaaggtgcactgagcctgggagctctattagggtcccagagacaatggaggatagcatttaggcaggatgggggttccatggggtggcattggcctccaactctgcagaggaagaatctcaggagggagggagggaagtaagcaagtgggccccagcgcctgcgcccgtagcagctggacattggaagaatgaaggggccttgaatttggctattagtgatctgggtatgggggtttcagatccgtgctagggacacaggggatccatggtactttctaaaagtccaggtgtcgttatttccgtactgtgtgttataactgagcagtgcccagttatgggcatcatcctgccagtgccgggccctcagagcatgggggaagacagcagcgtgcgcatctgaggtggaggatggaggagtgaccgcagcaccaggcatagacactcctggagccctccaaggactcaggcgtcagcaagagaccagggctgatggcagcacctctgccttttgggggctgtctctggatggtctcagtcagcccagggtcacctttattctgagatgcttcccttggccaccaccccctccagggagctgagtgaggtcctaggacccaggtcttataaagggacttcctggtactcacatcagagaaccaggatagaggaggtctgggagccaaggagccagggccccgggcgctggacatgcgtccgtgagggactcttgctctttgtttgctaccactggcaaaacaaggctttttctccatctgtgagcttcagtctctggaggtttctgagagagatgggatatttatgtgccttgagaactctgaaaagagactcctgcccaggggtcaggactagacacagctcctctccaccttcagaccccgatgctttagggccgtgggtatgaacaggtcatgtgtatgtgagtgcacatttaataaccgagtcagcccactgcactgcagggagctctgtgggtgtccaattcggaaaacgttttagaatgagaaactccagtctgcttggggaaactgccattgcaattactttctttttattgcataaaaccaactttgaaattttagagttgatgaagctttccatttgccccagatactctcactctgcaaagcagggggccttggtttcccaccctaccaccttggtgggcgctctgaagacactgctgagaggctagggccacagaggagaaggtgctatctgggccttctgggactttgaggtgtggattccagcccaccttctgctcagtccacactgcccgtgatagctacatcaagggaccttcactggttcaggcccaaaatgaagtatcgtttctataacagataccttctagcgccatctttactcttctgagatgaaagtcatagcgaatataacctccttaagcacatactgaaaactaaatttaacaccctaacactcatgtcaaaggaaaaataaaaagaaagtaattcacaataaagtcatatgaattttgagatgaaaatctttggtccggcccacagtagaaaacagaaatcatccctcaggtttaaaaaatactcattaattttttattgtggtgaaatacatgtaacataaaatttagcattttaatcatttttaagtgtactgttcagtggtagtaaggacatttgcattgctgtgcaaccatcatgactatctagtttcagaaatttgtcgtcatcccaaagggaaaccttataccccctgaagtcacttcctgtccacacctccctgccaaacccctggcactcactcatcccctcctgtccctggggatgtgcctactgtggacattttacataaatggcatcacaaagtatgtgctttttgtggctggctcctgtgacgtggtgtgtgatgttttcgagccggacgtgttacagcccatgtgggaacttcagtactgctcctggcagagtaatattccacagctgggatagagcacagtttgtttattcattcctctctcgatggagacttgggttgttcccacctttggcctcggtgaatggtgatgctgtgatcatgggtgtgcctgtgtttgtctgaacacctgctttcagttgtttggggcgttacccaggagaggggttgctaggtcctgtggcacctctgtaacttgctggggaacttccccactgatgcttgaaagtcatttggtatcaccaggtctctggggtgtttcatttgtccccagaagctctgcctaagctgcactgggagtgggctgatctgtgtgaccctaacggcctgagtgctggctcaggggaactgctaatttatggaatcctaggtaggtggtggtagaattctctccctctgtcagggtggagcagttacgacaaatccacagtctcagggacataaagcaacatggtctttttccaatcatgccacatgtccactgcattgtggcttgacatgggcctcatgccaggacctgggatgaggggcgagccctctctgtgcacccaaggctgccgacactcccgagagcactgccggctcccacggcttctgccagaagtcaccggctgcgtcgctccccacagttcatcagcctggtggacctgtggccacacttatgttcagcgcagcccatgtggccctgaaggtggacagcttttgtatccgtactgaggcatgggataataaacgccacagtgattaaaagaggaaatgttggccaggcgcggtggctcatgcctgtaatcccaacactttgagaggccacggtgggtggatcacgaggtcaggagttcaagactagcctggccaatatgatgaaacctcatctctactaaaaaatacaaaaattagccgggcatggtggcacgtgcctgtagtcccagctactcgggaggctgaggcaggagaatcactggaactggggagacagaggtttcagtgagccaagatcataccatttcactccagcctaggcaacagagtgagactccgtcaaaaaaaaaaagatgaagtgttagtggaagaggccagtaaggtcacgtgatggggggtgatccaaaaagaaaaccaatgcatgtgaacaggcaggcattgaagcctgtacagaagccccattgatgaggtatttggggcggggcagtgtgtgaggcaggcgggggtcccccttctgtggtttgcagcttttcacatctgcacgtaaggttacagttgacttacaaaacatggggtattgctggcatttctcatgttggagggcttcgttgtgtggacgtatcatttcccttttaaatatgcctttttagaagaaatgccaccacctagccatggacttcagtgtttcccagtggaaagaattttcaattttgcaatctaaaaaatgggattccccccttccgccttctgttgcagttttgccggcgcctacccgttctcttagaatcagggttagacatgaagacagcacgactgagggagggtgggcctgggaggggaaggctcttccctgggttggtcttgatatgtccgtcagaaccctggctaatgatttcctaacacattacgctgtaaaaaactgcaagttgtgcggctctttaaggctatgccctccacgtggaaggggctggtcaatcagtcctgtttcagttttgggagaagactcctaaaaccatttctgggagcatttcagctgggaggagtgttggggcatccttgtcatgccaccctgcctccttttacacactgtctcgaaaagattagtgtgtgtgtgtgaatgagctgaagtctggaggcctcaagctcaccgtgaagcagtctttgcctgttatttgttttcactcctaggaatgcaagggagcttccagaacctatcaggcacacctgtgtgatgtcgcgctttattcctagaagatcacatcaagataaatcagtagcttatggggactttaccttctagtgcccagatagaaaatgaaagaaggcatgttttaaaataggtaatgttctagcatgtcatgagttttcacctgttcttattttttaagttaattaattaatttatcatttgagataggatctcactctgtcacccaggctgcagtgtagttggtgtgatcacagctcactgcatccttgacctcctgggctcaattgatcctctcgcctcagcctccagagtagttaggacgacaggcatgtgccaccatgcctggatcattttttttttttttttgtatttttctgtagagactgggtttcatcatgttgcccaggctggtctggaactcctgggctcaaaagatccaccctcctcagtctctcaaagtggtgggattacaggcgtgagccactgtgcccggcccctgttttttctatgttttaattaacttatttatcatcgtatttatttaaggtgtttaacatgatattttgtttgttatatctatacatagggagaggatcactacagtcaaaccaatggacatatccaccactttacctagttacttttgtgtaagagcacctaaggtctactgtcttagtcaatattgcatcctgaagatttgctcagggagcggattccgtctcttttagaacagaggttggacactttgtcttgcatgttggagtcacctggggagctttaaaaatgcagacgctaaaaatgtgggtacctgcttctacctccagagggtggcagattaagttggccctggtggggcctggatgtcagacttgctttaaaaatgctccccaaataatgcagtgctaattcagggttgagacctgctgtgattcttgagcttggttgtgtgttggaaacactagggagtttttaaaaatactgacacctaggtctcaccgctggaggttctgacttcacaggtgaggcccgagctttaggattttagtgataaaaggtggacaatggcctttgagaaccactgttgtatatttgcagttctcaacttaggtgcgtgtcccagcctccaggagagctggcccttggctcattgaggctggaacgtgccgcagggtggttctaagatttgtgaccctgctgtggaatttagaggacagccaacagtcacgtattggttatcagaggcagaggcaggcgaccccatgggctgccttccacctgggtgctggctttatttcaccagggcagagtgggctatgtgaccccacagtggagagaatgcagtgacatgaagtgtgtgagtgggcagcatggtgggtgtccgctcctgaacacttgacccatcttccttcccctccctcatcccacttcccagcagagcctcagggcctgggatctgccaggccgtgcgctggcaaagatcagtctccaagagcagtctgaatcacagaatcacagctcagggtcaacataagtactgacttacctatcaggatgtgttattttacactctcaattagtttacataattgggagttcagtgtatttggacaaggtggaaagttgccgaagagctttgtgggtgttttaaacaaaatttaaaaaacattttctggctaagcgatctgagaagccctctcctgcacttcagactgctcaggggtgaattgatggcaacagtgctgacccccaggctgggctgagttcagtcccacatgtgtttagtacagcacccagtgtcttggcctgaatccctgattctccagggctctgacggcgatgcatccccttctcacgaggcccctgggtgcccccagtcaaggactggctttcctgctctttcctcagagcacgtgaggattccctgtcaggaccgtcccccaccctgttgtggtggctttggataaggtacgtcataggatgcacctggggctgaggccccaccatccccagctcctcctgtggggccggaatgactgagcgtcctcctgcctcgcaggctcggtgtccttttgcaccctgtggtgaatcccagatcccgctgggcgtggcggagtctcaggtgaccctgcgcaacttgctggctgggcagccctcagcacgtttccttatctgtccttgacgccggctccacccgtgaataacagtgagactgctaaatgaggaaacatgctggtctttgggagtggcagtgtaggggactttggggcatgtgtcccattttatactcaaggtcacgtggttcccgaggctctgggtgggtagcacccagtgtctggagggaaggaggcttgggcgaagacagctaaatgcctggtgtggggactgcccaaagagatgggcagcgtccagtcatgtgacctttggagaccatgttaccatgtcatgttttggtggacaatgagcgtgtcaccgcgacaagaggggcacaagactgtgtaaagaaaaagccactgcctgtccctccctccacagagaccccagctgcatggagtgggtgaagctgcacatcacctgcagatcaccggggtctgtgttcactgggggtttcaaggggcctgagatttctgcactgagtactcatgacctttgtaaggagaggatgcaggatttttttttttttttcctggctgggaactggcagggaagtaagggcagctcttccccagcacctgggcctcaggctgggagcagggtgggcacaggtgtgagagatcagggtgtgtgtgccatgggtgcaggcagatgcaggtgcccccctgccccaccccagggctttgggagctgccctttgcccgtgaacatccctgtgtgggagcttgggttttgttccctttctccttggtttttctgagaaggggtacgttggggagctgggggtgggagggcggatcgcccagagccctgcaggtgctctccagtgctggcaaattccctcttgtccccttatcagctccttccagaggtgacagccatctgtgtggtggcagctctctcctgctcccatgaggtctcctttttcttctcttttcctggatttgacttcttaactgaacagaaaaatatataggcatggacagttttgtagtagtgtttggagaataggccttaacaatataattattcaattcatgatttcattgttcaaactgcccaatctcattgcattacggccagttctttgtcgtaccttggaatttgtgtgtgtgtgtgtgtgtgtgtgtgtgtgtgtgtgtgtgtgttttgtcctctgtgtttgtttgtttgtttccttttgatgcatataatgtaatattcttggtgaaggccatacctcccctttctgcaggtgtgagtgggagggctgcaggttgcggagtgagacctgaggctacactgctggcccctgcagttttaccagaagctcaaggataggatggttgtagggtgaggccccttgtggtcccaagcaagaccagggcagctgaggagggtggaggaggaggggtgctgggctgtggtaggagggaggctaggggacaggaagagactgcttcaggtgctggtcatttcacattgatgtgaagtgtgtaagaagtaattgatggactcaaacaattaaatgattccctcggggagtgctcaggaattaagcctcagtgaggaaaaagaaatgtaaaagtcatgtgtgtcttcattgagatatgtggctcttcacaggttccagggagcttggtttgcttccatatgtttctatgtgtttttctaatcttctgcaatgatagaacatcatactaaagaaaaccataaatcagtcactttggaagagagatttggggtagagagagagtgttttaccaagtgctagggcctcctttgggtttaattcagaagtcagtgcctcagcgccagggctcctaacctgtggcctgggctcacctgttcacccctcacctcttcaccccttcagagctcaccgacttagcaaagaagtactgaacccgcagggtgtctcagcttggacagactttggagctgaataagacctgatccttgtccccacctgggacagctggctgctactgcctctgtcctcagaaagcaatccaagagctctctgagctggcagtgcagaggtacggagcttgctgtttatgcagaccttctctggagaggtgagcattgatcctggtaggcagcgtaccagagctagcaaatgaaccgcctgaggaaatgtccccaagctgtggcctctcataggtcacccagacatcagagtgtgaagcaaaagtgctttgcttctcccacctctgccccacctgtagccacatgaaaagagtggttctggaagtccctggtgtaactttggtgtagcacatgggctgtgggctctgtgtgcacactcgagacccagcgcaagtcaccactgccatggagtcacctgtggacccaggggctgggctagtcagagcagtagatgggatgaggatctgggggccttgagtggaggggcagctctcagtgagaagagggtgcctttggctgcatctgcccctggaagggagccaggaaccaacccctctacagtggagatgctgatgggtggcctcgtcctggagaaggggccaggatggaaaggacggacctccaggaacagccagcgccctggcttcctgacaggcagctcccaggtggggagaagggcttgtttgacacaggtgtgaggtttgcagatacagggtgatgaggtggggccagtattcagaatgcagaacctgaccctccaccatcacggaccatccgtttgtgagcagcacatgcagctgtggggccgtgttggagcacagggtgggtgtgagtgagcgtgtgagactgtgcgtgagtgtgagtgtgagaatgagtgtgagactgtgtgaggctgtctgtgagtgtacaagactgagactgaatgtgagtgtgacaatgtgtgtatcatgaaaaacactgtgagagactgcacgtgtgtgagtgccagtgagtatagtgtaagtatatgagaaagtgtgagagcatgagtgtgtgtgtctgcttgtgactgttgtgtgaatgtgggtgagagtgttagtgcaagggtgtgtgagtgtaagagtgtgtgagagactaagagtgtgaagtatgcaggtgtgtgtgacgtgggtgtaagagtgtgtgtgcaaatgcatgagtggctgagtctgcatgagtgttatgagaaaatgtgtgtaagagaccacgtgagagtgagtgttcatacatgtgtctgcaagtgtgtgggtgtgaaaaagtgccggagactgggagcacatgagagtttgactgtgtgcatgtgagtatgtgggtgtgttcctgtgagagaggtgcggggtgtgtgggaggggcagctccagtctccagggagcactcctagcgtggtccattcttcacggacaggagcccgttttgtaaccccactctgagcttagttcctgctcgctgttgcacccgtgccctagggccttccttggttctttcttgcacacagcagacataggtgccgtggcctggcttccattgccatctctgccctagacgttgtgcacgggttaaagggaggcagcgcctggtggaacgtcctgggcttggatgtggcaccggagccttgactggattctgttccactactgggcttcctgggcatctaccttggacctagcgtggagtctcacgttcaagttgtcttgcctgaagaagacagctagtgggcctgccttgggtctctgttgaacaattaaaggagcaccgagatcccctctgttgaataattaaagaagggagagagagacccctgctgcaggacgccttgcattgtaacctctgggaagcataagccctgctcgctataaatgagaatgtcacttccacatctcctctgagcatattggtccagaaaactacctcccacattaattttcatatggctatcagacatgggagatttatcagagagaaggaaaagtgtaaggatcaaacacgtgagtttgggagaatacaggaactaatactaatgcaaaattagaacgggatttagggaaattcagtacagcagcacagagtactacaaaataaaagaagctttgttcctctcgaaggtaatctgtgtgttgtttccctaattttaaaaagtaatacatattactggcgaaaaccctgaaagatagaaacatttccgaaaaaatatgaatggtgcctagaattacacaacccagagagaagctcttatgagcattttaggacattttcttagtttttaaaataaaaatgaaaccacactacacatgcatctttgcccactgtcttttgtcacttaatgttggagcgtgtttgtccacttcaagttccataaacttgacttttaatgacaacatgaacagcccattttgagtgtggcccattataacacttactgcctgcaactgtgtgccaagccccagcctttgctgcattatctgtaggatcccctaagccagctttgtgttgttcttatttcattctggagatggctttgaggactcgtcccctgtgagcagagaggcagagtccacccctgccaagtggcccctgggctggcctctgagtgagcatctactgctggtgacaggacatgggttcaacagcagctcccgccagcccggtagcaacgccttgagcaagctgccctctctcttcttctctgaccttccccgtagccaaggactctcagatgggaagaacttgaaaactgtccctccttccttttctctagactgctgtgcactcagaccctttggaaatgcacccccaccaggttctctgctggaccccatgtatttacttagacacttggcagatttcctaagactgggaagaataaaccattgttaaatctgaaattcacacgagagacagaagaatttgtgaagcctttgctggctgccccatcaggacatgtccgggaggaagagtgccccttcctcagcaggatgagggtagccatcttgttcccaggggcccctctgtcaccacaggcagtggaagtgggcagtgcctcccagggctcatggggcccctgtctgccccgtgtaggctttttggggtgggaagggatggaagggaaggaaaggcaccagtgggtaaggaagagtgaccacagaggaatagagttggcagttgtggattttaaagtcagatacatgtggtgacaaatcattgctctctgctgacatgctgtgtggtgtaggatgagtactcagacctgagcctccattctccttgtctgcaaaaaagacgtagcaggccgccttaatggagtgataatgggcttttctctatgagagcacctgcccaggcttagactgtcactgttgctggataaacgttggtctcctgtttttctttcttttgtaactacctcctgggcagatgtgggtgcatcctagcacgtagtggttttgcagtatcttaaaccctgtctcattttgtcctgttttttcctggcgtttcaaacttctcatttccaaggtttgcagtccgagaggaagggatctccacaccccacagaggcctgagccttgctgaccttgtgtgcctgtgtcttttcccttttgggaatggaaagcaggaccctgcagggctgaagccacactttctgtacaggccacatcctggaatccagggcccggtggccctgcttttgcaggtgccttgactcccccattcttcctgcgcttgcagagcctctttctggcctcagacccacagctgctctccgtcgctgagttccctccattgtggaaaccatcttactcctggtggtcccagtggcaggatactgagaagtattgatccatccagagggagaggcatgtagttctgcttaaccagacatggtgccacacagatttgagcacaagcaccggaggtgggacagtaagaacattttttttgagactttttttaaatgaagattgattttttttgagactttttttaaatgaagattgatttttttttgagactctttttgaatgaagaacattgtttttcgttgtaattctttggggagagagagaattgaggaacagtttcaaatccatgtgttcaacaggaacatttctggggccagctcacagaatgcctgtgtttcagagcctcctctggtgtgggaggcccagaacggagcccactgttggctctgtgtcagctcatgcacagattgtattccctagctgctctaaaggagacatgttgaaggaaacttccaagttgaaaggttagaagaagtctaagcgtcctgcattgagacttatgttttagtcctggaaattccttttcggaccctgttacgacctggttgtgccttcgagtgcagctgcaaggctgtgctggctgttgtcagctaaccctaatgggacctcagtttctgaagccagtgagtttccaacctcaggcctgagatcagagtgcgttaacatgcacttcccatcctccttctccagatcaaagagaacacttgaccacactgtccacagttttattattattactatttttagttgagacataataattgtacatatttatggggcacagtgtgatattttgataaatgtatacaatgtacaatgctcaaatcggtgatttgcatagccattttttctgtgttcttcatgcaacactgcatgttggaatgatactgccatgtcatttttgataaaacaccacatattatcttgcatgttgaacagaagtactattccctcccctttgaaaattacctctctagaagtgacctctgaagttctaggcagtgagtggactgtaatgtcagtacagggcagcggagctcctggtgctctccaaagataggtcctccctggtggaatgatttcccttgaggccagctgcatggctcctttttccaggaaggggaccaggctctcagtcacttgtctgtggccatgacacttcctttccgtcactaacacccagggctatcgcctgccaccttgactgcttcaggaacaaactccacgtctgagctgagtaccaggtggtgcgtggggccagcccaactttgtgacctcacacctctgctagccctctttaaactcattcttggaatggctgcaaatgcatgtgtgtgttgaagagcactggagtgagggtggtcccctccctggcctgcagcacttgcgtcctgtggagggtggtgagtgtgaggatgaggaccactgcaccatggggatgaggatgctgtagtgaggggctgctgtgtgagtaggactctcagatatgccatttcatttcatttaatcctcccccttgtgggagggaaaagagagcaagcattatgctcattttacccataaagaaatgggggctgaggatgtcctgcagctggtgagggatacacgtgagaccccaaatcccaggtcctaacgcacacttcttcctccttctttccctggatctgtggagggagctgctgggaaccgaagagaggatggaaggaagaggtggaaggttgcttggaaggacctgtgtttggatctcccttgcttggtcgctgttgtgtggtgctgagcagatgtcccatgggacagggagggtggtgtacagcctggctcagcccaggagcctccttaagcctcacctgaatggcatctagtagctggtagggtcgggcagtggagcccccccatgctgcagacagaaacaagaaaccttacagcggtcctgctgctcctctcaggcaggcatggtgggttgatgtcttgtcgctctctgtggaaccttctctttatcatgccgacctttgcattcctgtgagcttctgaagtctctggatgtaggaggtgtcagtggcatatcatggactcagcacgactgtatgtcactatcatgatgtattttggagggtggccatcaaccaatttggaacaaagtcattctaagaggagccttatgtgggccactcatgtttatgaatcaaactccatctttcagtgaaatgctactctgcactctacacttacagggactatgtatttatagtttaaatctaaactgtaggggacagtgttgttgggtttgcatattcagactatgtcatcaatagaaacattcctcttttaatagccggcagcaggtttttcctaactgccaaatgataagaatccctgggaagaggttttagaaaattagatcccagcccgacccccattttcaccaacacaaaaagaacagaatttggtcaagagtggggaccccagggatctgtgtcaggaataaccgcctgtggtgtttctggcaaggaaagattgggatggtgaatatttattgttgatgcttgaaataataggttttttccctctccagaatttctcattgctaagattcaaattatcatagtcgggccatgctctgcccaaggtcaccgcaggtgtgtggtcctcagggcactctggtcctgacaggacaccaggggtggcatgtgggggcctccttcccagctgggtcatcgtcagtcccacccagcattccatccgggcactgtcctttcccagcactgagagtgagtctgggtgcttggtcctatctccaagtggcctgttctggaaggagcatgctggcctggggaagctgcacatttccaaggctgtggccttgttcatccctgagagtctgagaatgccctgggtttcccatcagctgccttcagcaaccacagcatcttcccagagcagtggtgaccaggatgcagcatacagcacctttgagaagcagcaggcaagatttaaggaaggggcgcctcactccgccttgaggaagcgccctgcagcctgcttgtctcccttttaacaggctcctctgctgaacagcccctgggcgggagactcaggaagctgagcctggggcagtacgacaacgatgctggggggcagctgcccttctccaaatgtgcatggggaaaggctggtgtggactatgccccaaacctgccgccattcccctcaccagcggacgtcaaagaggtatgtgccacagccaggtcccagtttctgggcccattccactccctttcttgtcctggaaccccgagtgaatgggcaatgaccaggccttgtccctgaatacagcccacattatcctccgcacccaccttccgtcctggtttcacaaatatggtcgtggctcctctgtacctggcaagcggtgtggctgggagagcacagtgtgcagtcagctggcctgggtaatgcaccccagagatagctatgctggtgaggccacctcactcagggcactcgagcctctatgttctaatctgtagaatgggcacaaggagcacagcatgtgggtgggttgtgtgggttcgaggtagggctcttataggcctggccttagccattctccatagcccgacagcagcagccagtggcacacacagccttccttcagggtcatcacactcacacagggtcctcagtcctccctccgagacctccctaggaggtgacccacagatgagggccacagatgagagcttcttgctcttccaagaggcctaggtaaggcttctagtcagaatggatgtaaagcaggtcggtgtatccaaaacgattaattattttagacttgggtgggatttcttttcaagttggcaaagttggaagctacagaattcacaagaaaaaaaagctattcatagtcttgactcacaaaggaaaccactgttaatatttagaatatttccacccggccttttttctgtgctatgtatttaaaatactatgtgtttttatgcatctgtgaatatattaataccatgggtaaggactgttttatccagctttttcgcttaatattgagatactcatttacctgtaccattacaaactctgtctacttcacttattagctgtatattgtattagaaggatgggccgtaagataccttccgtttcctttactgttgaaggtgaaagtgttttccagttttccatggctaggagaggcgggctggttttgtgcagtggatccagacctcagcctccttgtcctactgtcagaggaggggtttgctcagtgggccagcctgggggagccacaaccacaactgtttggaggggccttcacttgactccctgttctcacattctactccctgtgccaatttcagacgatgacccctggctatccccaggacctcgatattatcgatggcagaattttaagtagcaaggagtccatgtgttcaactccagcatttcctgtgtctccagagacaccgtatggtaagaatgaagtaacactagctgcatgtgctgctccatgcccaaggagggtgacaacagccccttgctctgctttcttttccagtgaaaacagcgctgcgccatcctccgttcagcccacctgagcccccgctgagcagcccagccagtcagcacaaaggaggacgtggtaagaaatctacccgcgggtcacaggcgcgcggcactcaggcgctgcatcgcggggtcgccatttttacagagaagaactcgtatgcagaaatgtttccatttgtgtcgtatctcagaagccttggatgaggatggatcttgctgggaaagatgtagggatgtggccgtgaaatccactgtgtggtggcaacctggccttgcatcgctgcctggcatcctgtggggaaccctcctgtaatatgcagttgatgggaccatcagtggtgactgtcgggcagcttagcattggtgcttttgaagaaacgagaatgcccaccccacacttcacgttctctgtggggattgtgccgcacgggcgccccagctctgccaccccagctgccttctcacacgtaccttgtggcccctcctgtctgttattagtgggtgcctaatcactgtccctggatctctgcaggaactcaggggctctgtccatggcctgatcgcgtccgtctgtctgcatagctggctcaggcgagagagtgttagtgggcggtgtttagggcgagttactgtgcacttcttctgggtggacttgaggacttgcctgagagtccaggacaaggccgagctcaggcaggtggagagagaatgtaaacctaaagctcgtgcacatttcaaaatcactcttctctgggagtttcgttcattacgctgctgcttttttgccctagtgaaggctgctgttaatggttattaggcacgttacctgagactgagactttcattaacttgtattttcatctaccccttacccaggagtgttgtgatcatgacagctagctccattctctctctttctccatagtaaaccaagcctgtggactatgtaatagaaagacatccttctcctaaaattccctttatggtttcaggaccataaattgctctcttcatatgtagcatatagcagttatactgcctgtatttctcagtaagtgctactgaaatttaaaataagctgcattttaatgtctacattatgtgagcattacatgagaagtgtgtatgttccaatatgcattagcatgatggactcacacataggtagccatgcatctgttctatattttttatcatttcaatagatgcagaaagagggatgtcccttccaccccatgtaacccctcctcctcatggaggtgactgtacttggctcctagcttgaaagtgttcagtgggtttgggctggcatctagccctctggcctggaatcctgtcttctcctgcaacaccaaaaccgggtttgtttgaaataggtagatgacaaacagtggaaggtgggtaataagcctgaggaaataaaatactagaaacagcctgcaaactcattaacagctcctgagggaggcctctaagatcactgtattgagcataagagaatgtggagccccgtctaaactccagaagggtctaggaggctgcaggaagcctgggtgctcagcgtggggtacccagtggcctggctgtcttatgctggcccgattgtcccagcctggagatgagctccatgtcctgtgcgtggatgagcgctgcactatgtgtggatgaggatggctctgcacaccagcatgtgttagattccagtggcttcaacttgtcctgagtactatctgcatgtacatattcacacagaagaagtcagggctttgcctttaaatataaaaaggtgacatgataacaatattaatgtgagccttctagatttttatttcagcagtccccagggagggtcaacttcacattagcccacaaggagcacagagataacacagtgctgacttagtggatgctttcatcagacagtgtggtgagccagtgcccttgccaggaggccccacccactctgcaaagtcaagtggagttgtgagactcctccaagggcacagtaataacagaggtagctcgcccatacagaatgtgtcccctgatctttatgatttccttccatttcacagtcacattctatgggtcactcttactgttacccccattttacaggcaaggaaattgacacgaagaagttgagtagctagtaagtggcaaagtcagagtttcagctccatcagccgactccacagccatgggcagattatacagggctgatgtttcactttgtcttgtctaacctagaagtgacctaatgtcacaactaaaaagcacatggaaagtctcacagtcatggaataaccatgtaatttgtacatttaggtaacccctatgaacctccacctccttatctaaaaatgcagactatagtacctgccattcacagccactgtgcagttttgaagtagtaggctttaggcatctgcagtaatgcttaactgcgtatcatttaggcctagatactgatgtgcatataaatgacagtatttgctttaaaataccattagggagaggcttcacttcccggagggtgaattagacatacttttctctatttctcctgctaagtacaacttaaaaccttggacagtaagtataagacaaatataagaaagctctgaaagatggggagaaataggccagctagccatggacttcagggccaagggacccggtaggccttatttataatatctatgggccaggaaacaatcttcagaggactaaaagtaactgaaccatgcagaacatgttctccaaccacaatggactcactagaaatcagtaacagaagggcaacaggaacaccttcaacacttggaaactgaacagcacacttataaataatctatgggtcaaagaagaggtctcgagggaaatccaaaaacatactgaactgaatgaaaatgaggataaaatatcaaaaattgtgagacatggctttatccactgctttaatacagccgcactgagaggaaattttgggcaagaagaaaattctgaaatgaatagtttatgctcttacctccataacctagaaaaaggagaacaaactagacccaaggcaagcagaaggaaggagataataaaaatctaagcagaaatttaaaaagatacagagaagtaatagagaaaataaatgaaagaagtggttctttgaaaagatcaataaaattgacaaacctctagcaagactaacaaaaaaatggaggacatagattactattgttaggaaggaaacaggcaccatcactaaagaccctgcagacaccaaaagaataatgaaggaatacacaaactactctacatgcatagtttttaaaacttaggttaaatagaccagttccttaatgagcatgaactgtcacaactcacccaataggaaatagactacttgaataccctgtaactataaggaaattgacctagtaatttataatctcccaaaaaagaaatcttcaggtttcactggataattctaccaaacatgtaaagaagaattaacactgattctacgcaataccttccagaaaacagaagaggggggatcatgtcctaattcattttgtgaagctagtattaccctgataccaaaaccaggcaaaaagaacagaaaaagaaaactacagaccaatatccctcgcagattcagatacaaaactccttaacaaaacataaacaaatagaacacagcaatatataaaaagattgacacactgtagccaaatgggacatattctgagatgcaaggctggtttagtatttgaaaattcattcatgtaatacactatactaacaggctaaagaaaaagctcacgactatatcagtcaatccaaaaaaagaataaaaagagtttggcaaaattcacatcattcatgactcaaaacttccagcaaaatagaagacaggtactccttcaaccttacaaaaagcatctaaaaagccccacagctgacagcactctttttcaacatagttctggaagttctacagagacataatacaagaaaaggaaattaagacaacagatgagaggaaagaaataaaactgtccctttttgctggtgacatgatcatctacgtagaaagccccagggaatcttgagtctgctgctgacatgattgtccaaacagaaaatcccagggaagaggcggagcttgcagtgagctgagattgcaccactgcactccagcctgggcgacagtgtgagactctgtctcaaaaaaaaaaaaaagaaaaaaaagaaaatcccagggaacaacaaaacaacaacaaaaagtgaaactgttagaacaaattcagccactttgcaggattctagttcgacacacaaaaactagttctatttcagtacgctagcaatgcacctgtagaagctgaaattaaaaatataagtcacagcccggcggagtagctcacgcctgtaatcccagcactttgggaggcaggggtgggcagatcacgaggtcaagagatcgagaccatcctggccaacatggtgaaactctgtctgtactcaaaatacaaaaattagttgggcgtggcagtgcgtgcctgtaatcccggctattcaggaggctgaggcaggagaatcacttgaacccaggaggtggaggttacagtgagctgtgattgcaccactgcattccagcctggcgacgagctagactccgtctcaaaaaaaaaaaaaaaaaaaaaaaaaaatatatatatatatatatatatatgtatatgcacacacacatatattcgtatgtatatatatacacacatatacacatatgtatacatatatttatgaaaaggacatagaggtggcatatgatcgcatatgtatacatatatatatatatatatatatatgccacttataatagctcaaaaaaattaaatggttagatgtaaacctagcaaaccatgcacaagacttctgtgctgaaaactgcacaatgctgatgaaggaaaccacagaatatttcaataagtggggagacatactgttttcatggatggaaaactcaacctagtagagctgtcacttctttccagattgacagacagttttaccacaattcctatcaaaatctcagcaagatttttttgtagatatagacaacataattctaaaatttatgtggaaaggctaaggaaccagaatagccaaaacaactttgagaaagaattaagtggaaggaatgaggttacctaatttcaagacttattgtatagctacagtcatcaagactgtggtgtggatggaggaacagacacttaggttcatgaaacagagtagagaacccagaaacaggcctacacagatatgcccagctgatttttttgacaaaggtacagaagcaagtcggggaaggtcagcctttcaacaaatgatgcgggggcacctgggcacccacaggcaaaacaatgaacagccaccaaaggctcacactttatacaaaaattaacttaaaatggatgatggacttaaatgtaaaatgtaaaacatagtattttttaaaatgggagaaaatctttgggatcactaggcaaagagttatgaggttaggacaaaagcatgaaccataaaaggaaaagttgacaaattagactttataaaaattaaacatttttgctatggaaagaacctgtgaagaggataaaaaagacaaactgcagagtaggagaaaaggtttgcaaaccacatgtccaaaaaaaggaatatcatctagaatgtatataatctctcaatactcagcagtaaagaacaaacaattcacttagaaaatgagccaaactattattaaaaagtcgaaaaacaacagatgctggcaaagctgcagagaaaaagaacatgtatacactgttggagggaatgtgaattagttaagccactgtggaaagtagtttaaagatttctcaaagaactgaaaacagaactgccatttgacccagcagtcccattaccggatatacacccaaaagaaaaaaaatcattctaccaaaaagacgcatgcacttgtatgtttatcacagcacaattcacaatagcaaagacatggactcaacctaggtgcccatcaacagtgaattggataaagaaaatgtgggacatatacaccatcgaagtactccgcagacgtaaaaaaagaaccaaatcatgtcctttgcaacaacatggatgcagctgtaggccattgtcctaagcaaattcagtatcccctgaatttaaaataaaagttgaaattaaaaagaaaagccactgactaaattaaataaatggatttttattcagtaggaaaaaaaattagaaaatggttcaaagaaaaaaagagacatgtcactgaagaggacgtagaggtggcttatgagcacgtgaaaagatgctcaacatcattagccattagcaaaatataaatttaaatcacacctatcagaatggctaaaataaaaaatagtgacaacatccaatactggtgagcatgtggaaaaactagaccccttatacgttgctggagggattgttaaaatggtacagctgctgtggaaaacaattttggcaatttcttaaaaatgaaaaacctacatctgccatgtgactcagtgattgcattcctgggcatttatcccaaagaaatagacttatgttcacataaaacctgtacaggaactctttttactttaatagccccaaactgtagatgtccttcaacaggccagtggttaaacaaattgtagtacctcaataccatggaacacttctcagcaataaaaataagtgaattattcatacacacaacaacccggatgggtctctagaacattaggttgagtgagaaaagtcaaaacctgaagtctgtatagtgtatgattccatatatgtcacactttttacatggcaaaattgtagacacagagaagagattcatgtctgctaatggttgggaggggcaagagtagaaggggaatggagtagccaaaaaggcaacaggagattggcagaagagtggtggagtaagaggtcgggaaggtggagccaggccaggagccgttctctgtagttcccagaaggtggtggtgtggcatccacatgcaatgtgaggtcattactgaacctcaggatggggaggtgactgctcagatttgcattttcacacatcactgtggctgctgcatgaagaacacggtgggatggacagtgggctggaacagaccaaatggtttcagaagagataggaggaaatcagaacatttgtgtaggattcaggtggtgcaatcagctgaccttaacacagtggaattggagcctgactgctctttctaattgtattgcttttgtcattattgtttaaattaggttctggcttcttgttaattagtatgcagttagtataacactatctccataaaattcctctgcagatcgcattactaaaacataacttgatacctccttagtcagcataagccccatgtgttaagttcttttccagacaaccaccaggataggtgtccaagagaaatagcccagttagttaaaggctgtaaggacagattttattcaggattattgcaacaggagaaagtgctgggctcagccccaaatgcagcaaagacagctggagatttatgaccgaggaatagagcaaaaggatctggtggatggaaagtcattaagaagggacatcaagggtaggggggttcttgctaaactggcctaacacggtttctgctacagacaggccagggacttagacacaaatggcgagggatgaggagcttgatgacgtgtcaagggggattagatatcaagtgtgggggatgaaaagcaggattcttgctggaactgagcttgccacggttggacgtggaaggccaatgttgaggcctagtggagaagagggcttggaggagcctggctaaggtttggtcaaggagagtctgtcacaagatagacccatctgtatccaggctaacgcaatagggtgaccaaatgcagcccgcacgcttctctgtgtttctctccaggtcctttgggcacttagtttataattttttattttctattttttatttttatgggtacatagtataggtgtgtatggagtacatgagatgttttgatacaggcatgcaatgtgtaataatcacatcatggaaaacagggtattatgggcacttagtttagccataaggcttccgtgccaagtggcctgggagccagctggggccagcttctgccacaggcatccttcacccacccttctcacaaacaagcgattcttcaataaacaataaacagaatacacaaaaagcaaaccaaaacatctctagatttattaatagatgggtgaattaaaggagtcttttccaaataatgtgactaacagaagccaagggggatgaatgcccaaagctggggcttgccagaacctgctggtaccgagagctgattgctgaagtgtgaggaattttgtgagccagctgacagcacattggcagcttgggatctgccagggcgggattgtttacaccacaggatttagcaaacgttatgaatcaacccctccatcggccccaagcttccctgacacaccaaacagtagaaattcactgccttttttttttttttttttaactctgcttggtgttagctaactagtcatgaagaatagaggctgaagtgaccaaagagatctttctgcattttgacattcaaatatttggaaagattttccgcattcagcatttggattctagtcccattgccaggctcaagtaagctctgtgataacaacactcagctgttggaaactgctgtccgaagcatctctcagcagatagggaggcctaaaaggacacggcagagtggtgtctggtgggtcctctcctgacatttcttctctctctggtcaaatgctggatgcacacatatagtggctctgagacttcctatctgggtgagctcaggcagttctagggacctctctgagccctagtttcatgtcctgtacaacagtagtcattcctactgcacatggttcttgagaagattggaccagaacatgtagctctggctcctggcccagacctgatcaacactcagcaaatagtggacactgatgctgttaggagaacagagcatccatatgaagggcggttccctgagctggggagaccagtgacaactgtaagtctgggttcagagcatgagtcgggggacggagaaggcccctgggcatctggccctgggtggctgagccctgggaatcctgcttttcccagagatgtgcttgtgcccagtgtgctcatgttttaaatgccagcacctactccaggaaaatgatgggtatttcaatatctgctcacattatgcatatttaaatatgaatttaaatactgtttaattctcctagggatgtgttgtcatttaaaagaggttgtgattagcatgaaggactggggacaggagcaggagatggcagagcagctgtaggcactgatgtaatgcctccagctttatgaggacgggcccaaccaggcttcacccatttggggccctcaagcgggagcgtcagtggcagccctcgccatcgtccgtctgttgaatgtattgccacatggccacattatgccccaggagccatgtgttggaggacagtatccttaggcttctcagaaattccacatgggagcctcaaatggacatgcttttcttgaaaacaaaaatatttgtaaaaatgtaacaatgggagtcgtttaatctcaagtctcccctataagcaaaaatagataaaattatgaaatgtaagatgtaaattattctgtttcttagctgatccttaatcttgatgatattttcaaaacaaatgaataataaagacatgagaaaaggtttcctttaaaaagtcgtggttctcgccaggcgcagtggctcatgcctgtaatcccagcaccttaggaggccaaggcaggcggatcatgaggtcaagagatagagaccatcctggccaacatggtgaaaccctgtctctactaaaaatgcaagaattagctgggcatggtggcgcatgcctgtagttccagctactcgggaggctgaggcaggatttaaatactgtttgaacccaggaggcggaggttgcatgagccgagatcgcaccactgtactgcagcctgacaacagagtgagactctgtcaaaaaaaaaaaaaaaaaaaagagtcgtggttctgatacatctcagcttccaaactatttcataattttttaaaaatataaacacataacataaaagcatctatttgaaggtgaacattgcaccagcattcagtagatttacggagtcatgagaccatcgcccctaggtagttccagagcatccttatcctataacagctttacaagtggtattcagagggggtttggggactttaggcttcagtgaaaaagattagcagttaatgttagtttacttcaagaggatgcctttatatattttgcaacttctattttgtgttcagttcttctggagagtagggtgtaggcattttaggggcctggcttccaagcatgcagcctcttctctgctgtcgattggaggttttgtgaagggctgggaggattgcctccatccaagtgccagtgcatgagactgatcaggagtggtagcatgtgaagtggtcctcattggctcacaagaggggacacaggggtttggttggtgctgtgcggacttcctggatttggtaggtttcaaagggtcatgatgtttgccacagggaggaagaaaagggcagtaccagtggcactggtccttaccctctgtagctctatgatcttgaacagtttgcataacctctggaagcatcatttaaatctaagcaaaataagaatgtgtgtgccatgcatggtattgggggcagtcttaaaaatgaagatttcagcctatgaatatgctagtgtaacaaaaatttgtcttaaaatttagttttttaattcagaatgcactttcttattgaaatagtttcagagccccagggactgatagagagacacagcgtgagaagaggacaagaggaagacagagacagagagattattttgacacaatgctttatttttattgaaaaagctgtcatccttcaaaaattgacagatacaatgcttttaccaatcttcttctttctttcctgtactcgactcccttttctgttgaatttttatgagctctgaatgagaatgtttataatagggacaaaggcatgtactgaatgtgaatatgtgtgacatttatagaggcccttgtttactttggattttctagagcctcaaaagcacatgcattcctatatggatttctccatgggtttatattcaggtacgtaggcatatgtaagtgtgcataggaatagacatgcctggatacatgcctgtgatgtactttgcattccaattagtgccaaagaatgcacactggtgcatggtgaccccaaaaaactggtgtggattagcaaacatcgcagcctcctccaacccctgccccagatgaacaacatgaaaaagaaaagttgactgcttctaaattatatttaaaagtaaacatcagtgctgggttcgtggaggtcagcctaaagtgctggcctgtgaatgtgcctttaggggtcttttgagatgagaacatgaattcatttgagggtgatgaagctaaaaaaaaaaaaggtgttggctttctgtgctgacacctcatccgcggagcaggccagcttggaagtgtccccatgtcagcctgcagacttctctaccatgctgaatgttctcgtttgctcactttgggtttagaggaatctgcttttctaaatttatttatcagctcattccattaccccctcctctcctggtggactgttcttgaccctcagcatgtagaagttattctgaagtgctgctaacaggatttgatgctggccctggggcttggtgacagatgtggctctggtcctgcccgtctgtagctctgtgatcttgaacagtttgcataacctctgaaagcatcttttaaatctaagtaaaataagaatatgtgtgccatgcatggtgttgggggaagtctcttaaaaatgaaaatttcagcctgtgaatacggtagtgtaacaaaaatttgtcttaaaatttcattttttaaattcaaaatgcacttccttattcaagcattttctgagccccattgtctatgagaattgtgctccatcccgggattgaggaagggaggcggtcctggccctggggcagctctcgggctggggtcccttctgaagcagcctgtggctggtgtggaatccggaatccacagctcgggcctgagcctgggcttgtctcctcctcgctgctttgaacaggaaaaggcagttcagcccagcaggatgcctcttagaactgggaatggcttggaagaaaatgcttatgaagccccagcatataaaatgtgcaaggatgtttccctgctggaagcatttacctggtatcccttgcatttttactttcctccgaaggccctcaccttgtaatccacctccccacagttccatcccctctagacagcagcctgcctcacagtggtgtcccaagagcactgggcgtcaagaggtaaaatgcctgggcattttctctgaagcacctgttaccactgtcccttcaggctgtgattcctggccaaaatgcacccattctttttgacacacttgggagggtctgggattgtgagacttgcagaagggtcagatgtcttgagtcactgagagggctgaagaaggaatatgtagtctgcttcttgacatttgttactggcccgggcctgccccatcagagcctttgagggcattaccaaggtgccccccagattagtgtacctcctcaacagataggcattggccaggctgtcctacttaggccaggaaccaccttgttgtctgtttaaattctatcacattttagtgacacacatatgtagacatgttatatggtacatatgtgtgttatgtgtgcaggtatttatggctctgcctagattgaggcatttgccactttctgagcacttcttacaggccatgcacttatatatgcacacatgtagagaaagagcaaatgaacaagtttacaaaaaatcctgaaagccaggcaagtgagaattccatcatttggaatgaaagtaaacttttctgatgcttcagggccaaccaagtgtgcgatgggcgtcagaggtcaggtctccatgtgtcacctggcagagggatggtgtgagcagctcactggaatttgatttttccagaggagcatgagattgggttactgtgaagtcccagtgtcgctgaggttgtggagggtttgtgttttgtgtttgtttttaattccttctccgcaatgcccaagtgagcactccacttgagtctcaagaaccccagagtagagctcgccctggggtgctggccagcacgtaattctcaggaacaaacaagtacattcgaataaagctgaggatctcagtctgcagtgcctggtccctcggaggcattctagtatccctcttagttttgttttattggggcagagcctgttgctgaaaacagaacctgtgggtcaccctgactatccttcccaggccttcgagaactgccttgcatgtagtagagagactcacagtttgcaggagtggcaccgtctttgaggcagctttcacataaagcatctgaagttcctttgctaagtcatgtgcccagtcctcaaaggtacctgcagatcacctgatcgctgggagtagggctggtccagggttcctcttattgtgtgcacacataaggttcgcccgagtccggtgggacagagatgtgggaggtgatgggatgcagcccctgtaggacccgtgaggctggtggacaggcagtgcgggctggtgggagggtgttaagggagaattccatccagctgatcaggtcgtgtctcaggaaggacgtgccccctatggaggctgcgagacctttaaacttgctcatcccttcccgtgtgtcttctctgggcgccccagctcctcccttctccttggtttaatgccccttttctcacctccctctggcaaccaagtctgcttgtgtcttcctccgaaagggaaactcctgttgccccttctctccctctgttcctcctctccctccttgcttcaccttccctccgtccttttgtttctgctgcctcgctctcacctgcatttgaaggatgtgacttcccagtgggacctgggttgggatttggtgtcaccctccctccctcagcctcaggacatttccagagcagagtcttcatcacactcctggcatctaacacagagaaggatctggataaaagtttgttttgttttctgatgggtaagtggaaggagagagacagtctctcagctccagggagctgagtgcatcatgcctgcaaagggcctgagcccgcagagtgggagctgcgtgagaccagcacctgtgtttctgagaggagacctggcattgccggctggtggggtgggctgtcctcttccaggtgtctgatttgcacccctgcttgattttgctaaggtgcagtgggtggtcctggctgtagcagagtcaacatgtggacagtccaggtcctgtcctccccggggatctctgggtgtttgggtggggggagcagactgtccgggaagaatttttaaatgttttttcctcagtggacttgctgccacctggagcccacctttgaaatcactttagtccctggcactgcagctgaggagaaagaagcaagagaggaaagataaacagatctccagaagatgcttaaatctgtagattcacactcaggattgtcccagtcatggctgtgacacgggcacagaagcagcatgccctgcctcctcctccctgctgcccatccctgtgggtttgctccgagtcactgagcccacagttccacggagggaatgggacccacccttgggagtgccatcctggtcacagtcacccttcctgggcctggctgccccatgctggtgccgccccgtgccgccttcctctctgcttggggagtgacaggcacgggaaaggccagtccatccgcttccgctgagcctgctctgtccgtggtcaggcatttccgacagcatcatttgcaggagctgctgctctgcaacacataaacaaccagggaggaaatgcctactcagacctttgggaggaaggtcccagggatcttcctggcccatgtgcggagcggtggccctgagggtcccaggcaagccgtgtccctcttggggtagggcattgacctgcccactcttcacaggttgatgagtgtgccagggtcgtgcaggggctggaccggccaatggctcggctcaggctgggcagcaagctgtgctggaagcacaggcgtgcacaggggctgtaagaaaggaggcagcccaggaggaacggggacctgctcttccagggagagctttctaggggaaggggtgacacaccagcatttgaagagggagtgggattttgccagacacaagagacaagagaagccaggagtgagtgtctgttctgtgcttccccttgtgaaaaccctgagtaatgtaccgtgtctctaaggcccagacacatgacaggcccctatgttctgccatgtggactgggttatagtcagatttcgggtcacgggaacagagcactttgacttgactgagggagatggtgttccaaatgctgaaaaaaatgtggggtcacttgaaaagggctttgtagaatgtataggagtttttcagcagttggcttaggagtttggccttttagatgagagaagcatatgagcaaagaacatggaagaaaggggacacagtgcgtagaggctgccaacagcctacagtaggtgccagccaggcagaacaggctgagggatccagaatcaggctctaggacagggtttgggcaggatgttatagcccattggggcccggaagaaaacctgcagggtttgagcagtgcagtgacagggtgggatttgcattggaaggtcccctgggctgccttgaggagtgaaaggcttccagcctggtggccaggccagatgagaggcagatggccccatccagaggaaagggacatgggtgtaggctcctgccggggtggggggcagaggactgactagggacatccttgttgttagagactgttcaggcttccacttcctctctggctagttgctggaagcctctctctgctgtgagtgtggggtcccaggggaatgggggtttgattttggaggggcaggtttgggggcatggtgggcaggtcctgccgcttgtgccttgggtgatggctggcctgaggctgaaactaagcctggttgggtttcagcagggaggttgcaagaaattaaagttgggggaggaaaaagtgaaaagaaatgaaaaggaagcaaaccgcagcagtgagcaaggcggggccagggccgtctggaggcactgactgggcaggccgcccgcgacagccagcagcagctcaacaatcccgggattctttcccgggcctgagctctctcggccgccctctgaatgggcctctttggaggtggccgccccgccccctgcacgactccctcgggacaggccggaacacagagccctgcctgggtgggtgggggacgccaccgctgggacagggactcgggactctgctcaccacgtagggctgctggggacacagcccaaggagttccctctgtctggcccacatcctcccaggcccttccatggactgaccagggtcctgggtgccaggtaagctgtacattgggactcattgcttcttcctgctcagtccctacacgcctggtgtcttctgtgctcctggcgcctctggcccggatccagttgcccttgctgaaacttgatctcctgggctccagtggaggggggtggggaggggtatgaggtgggatgcagaggtcactgggccaggaatcctgggcaggacttgggaggagggctgattgttccaagagtccccttgtcacttgatgacagttctcaagtcgccaaggctttgggacaaaacgccccagcccttgagcctggagggctagtccttccagaagaaagtcatgctttgtctttgctgagattcactcagggctaacaaaagcctggtttacagatgtgcagcttttctggaacaggactgcttcctagcacagtgcattcctttactgaaactgataaagcgagcctgccccattccagggctgtcaccgcccccaccccagttccagggcccttgagggatcccgggcagcgggcagcaggaccttcagaggaccagaaggctgcacttctgagcacccagcacagttgtttctactaaatgccgaaagcaagcgttaggatcaggcgctgggttctaaaatgagatttactgttgtctcttctgtggttgaagcaagcaaagagagtatttctaaacgagttcatgtcattgaaaaaaacaaaaacaaaaacccatgcattcactgaaagaacctgctcagattatgttaacagagcttctggacctaggggctttgtttcttcactgtcccttccctcccaaatgtctgaactggggctggggctctgtgggaccctgggagagtcagccaggcactgggggtagcacgggcagggctggcgcctgggcccagggtgggcctcctgggcatctgctccctcctctgcgtggctggcctgtgattctgctggccctgcagccgacacagcgtgtgtgtgtgtattccagctggaaggatggggaagattaagagggagcgaggggaaaacccagagctctttattgtgaaacgagcactgcagccgctctgagacaagcccaagtggctcaaggtccagcttctccttcccaggctgaaaatcttgcccagtatcccttccaggattgatggattgctctccagctgatggaagatgctatcttttcaaaagtttcctgtccttttaatgtattttatatacattagtaatttttcatgaattccatatgcgtgtcagtgtattagagattgtctggttaggacggacatagttttctgactttggaggtgagattaaaagaattttggtccacctatttcgagagaggggtgattttctcccttggccaacctgtagccatggtggcccgtggggagcctggtgctgtcttctgctggggcttcctgcactctaagggggaacctcagtgacagggctctaagttgctcccagagtacctgtgccttcctaatccccagggcaaacctgtgcagaaggttccttgtcctcctgtaggggcagagtaattgtattacattctgcgttctgactcagaccctgctggtgggaggcagggatgtcttgtggaaagaacatagttttctgagtccaacagatgagttggcttcctttgaataagcttcttaacctcacttttcagaatctgtttcctcatccataagatgatttgcatgtggaaatgtttgtatgaggattaaatcagataacacctatgtgtgggttagcagagtgcctggtgtatagtaggcactcagagaaagggagctgtaattctgatttccattttactttctttatatgaaaagttgatatgtgtcatataaacaggattttacaacagtcccaagagctgtgtgatttaaaagctgttgacattcagattggcacctgtactgatggcaacatttctccaaaagcacagtgaaagctcccgtggttggagctgggatctgataatccgcatggttctaaaaaggcagtttgcagccaggaccatgcatcaacatagttctaactgctgcgcactttgaccttctctcctctacccttctgtttccacttccctgtctttaaaaaaaataacatccaaggcaatcaagctgcctagttgatgtaggatcaggacaggaagcctggtgggtgtgatgcatggaaggtggtcttactgctgtcagacacaggtctgggatggctcgaagtcctgtggtctgatgagaataccatgcccattttgtttacattaggctcacctgagacaggtggcctctccctcctatcaggagggactgtaaacagaatgagtttacagtaagagtcaagggaccagaaggtccccgtcacacagcacactctgccttcttgctccgtcccattgctcactgtgattttaccaggagataacctaagaacgcaggactaagaaatcactggaatgtcaacttctcgttccaccacgagatagcagagtggcctgtggccttccttgagcagtgttctctgtggacatatgattcttgattagcctcaggtagaatggatagctgggtggagaaggcaggtgggtaccgggtcacccaagtaaattaaagttaaacagggttttacaaacgtggagtggaagatagaggaatgagggctcagctggcaggaggacgagggtcaccagtgggatgcctggctttcttgagtgaccaagtacagatagaaaagcttctagaatgctatggaactcatttactgctctgtggaggtaagaaggaaatgggaccaaagataaggcttgcttctggaagatgtgggtcttgggaacccctctttgtgcatctgttgatgggagtaatggatacacaaaaccacacggtccatcatgcttccaagctgactcctccaagtctggtttcccttgatagttttcccagtggtcccatcacttctgctgcctactagatttatcatcacgagaaaagtcccagtttcctttgtagctcatgctgcacttgactggaggaaatcaagtcaaggatatcttggtgacaattgaagggatacaggaattatacagttatgcgcagactatttaaaaagacactatttttttcttaacagggacatttttcaaagtttttcaaagattttcaaagtttttattaagagacttttaaaaaatatttattcatttatttagatggagtctcactttgttgcccaagccagagtgcagtggcatgatcttggctcactgcaaccttcgcctcccaggttcaagtgattctctggcctcagcctcctgagtagctgggactacagatgtgcaccaccacacacggctaatttttgtctttttagtagagatggggtttcaccatgttggccaggctggtctcaaactcctgacctcaagcggtctgcctgcctccgcctcctaaagtgctgggattacaggcgtgagccaccttgcctagccctgttaagagacatttaaaaagataaaaataaatggagagaaagccatgtttgtggataggaagacaatgtcacaaacatgttggaccctcccaatttcatctgtgtacttaatttaattccagtcagagtgccagcagattattttgtggaacttgataagctgattcaaaatttatataataaagtaaaaattctcagtagccagtatacaactactagaaatgaggacttaccacaaagatagaaaattcggtaaacatgagctggtacaaggacagataaattgaccaacaaacagatgaaagtgcaaaacagaccagcacatgcttggaactttggtgccagacaaaacaggcagccaggtcaggaggggaaagaggagctgcctcataaatagagctgaggtttgccaggtagaaaaggttaatggatcccttttataacacatgccaacatcagttccagatggaccaaggatgtcaatgtcaaataaattcttagtagaaaatccgggtgcatacgtttttccggattttttccttcctgtcttctgctcttctgtttctcttttcctgccttactgtggatttatttatcatttaggggaaactctgtctttatttattgatagtatttttgagtatatccctccctgtagtttttttagtcctcgctcttggtatatacataacttgtcattatttatggctacttgtattattttatcacttggagcgtagcatagaaatcttacttcaatttaagtttcttcaccctccccatttttaaagtacaattgttggaagtatcttatccgtttatggtgagtaccacatgtgatgatgtctgctagttgctccaactataaaaagtgacttaagaaactcatgagaagaatggactgttatatttacccttactttgactcatttgaacattcttctttccttttggaagttccaaatcttatgattttcattctgtttagaaaatttcctttggccattccctactgggacatttgcaaacaacaaaatctcttcattttccttcatctctggatttctttatttttccttcattcctgaatggtatttctgcaggatatagaattcacagttgacagttcttttctttcagtaccggaagcatgtgccacttctttctggcctctttggtttgggtttcttttgaagattcgaagataggtggattctcagaaaagctgtcattttatatgacactaagatagggaaaacagtgccaggtaaaacaggatgcactgtgggtgaaaaggtatgcacagatttcagaaatgtggctccgtgagaaaaagcaactggggactgggcacatgaggcctcgaggagcggtacctccagccctagactggctgcatggtcggcccagggtgtgcagagctgcaggtgggctggagacggggtgcctaccatgcaatgaatcctcagcaggggacccctccctgctggcctcctatgtaggaagccctggtgatgtgacagtgaatgagacacagcctcacctctgacacggttccagcagtgtgctactggccatgtgccagatagagcagggtccgtggccaccgagggcctccgtaagagggaatcagggagcggaggcaggctgctcttgagggctttagagggcttcatgccccgggtagggcttctgtgattctgcggggtctccagtccttccagcttgagcactgcactcgactcatggtaaatattatcagcaacttagaatatttaggcactcccctcagttttatgttcgtcatatacaggctttcacaaaccattttcttttttctttttctaatcataacattccattcctagggtatgtttgttaattttcatttcactgggttgtttttttgattgtgtgtgtgtgtgtgtttgtttgtttgtttgtttgatacggagtctcactctgtcacccaggctggagtgcagtggcgcgatcttggctcactgcaacctccgcctcccgggttcaagcgattctcctgcttcatcctcctgagtagctgggattacaggcatgaactaccacgcccggctaatttttgtatttttagtagagacggggtttcaccatgttggtcaggctggtcttgaattcctgacctcgtgatccgcctgcgtcagtctcccaaagtgctgggattacaggcgtgagccactgcacctggcctttgctttttttttttttttttttttttgcccgttctacttcactctcatgtgctttcccattggtttgtggttttgctgttgcatcagcttccttctataggtcaaggctatgtaatgtacccagaccctggtcctggggctgagggaccagttctgagggatgcttgatgcttttacagttctttagcctttaatctttttgtagaatgccaatgagactcctccttccaggacagctgggagggtcgggaagtcctcagtgaatgttcatcatcaggaaaaccttggtggatgatgggcaggagggaagcttcagcagtgggtccccctccctgaactgctggttagagagaggcttgagtgctgtagacaaggaggtcttttatattgtgttgtgcattctaagtggatggtctttgggggaagaaaacaatgtagagtaaaatcaggacaatttggtctatttgagcgaaggtctttctgaactcccaagtgtttgttccctccttcccctcagagcacaatggttatttcttaaatttatttcctatgagacaggagtaattatgggcagagggacagatgagagcttcaagcattgtccagttctgtcccgggacagccctcttggagagagaaccacctgtggcagagactgtggattgctgtaaattatcttattaattggaacatcacttgttatattggagcaattatagcatgttcaaagctttgctggaaggccctccaaatgccgacacaccctgctggcatttcagtagtgctggtggcctctgtattcgtgagttttggactcagtggaatggagctgggctccatagcaccttcggggtccagaagccagtggcatggtgcatgaccgtggagacgctgcccatgaagaacatagagccagcctgaaggagaatggtaccaccgaaaaccagtgggttgagaatgagacccttgcatcagcaaagtgagtagcctacccattaggcatggtatgaatcggaaaccttagtgaaacaaaaacacaaagagaggagaatcgggaccaagaaggaaggcgggtgaagccgcatcatctccctcctcgggctggctcagggccccatgagatgcaggttttctggcacaattggctcctcctggagtcctgcctcaggctggtcagaattcccatgctccaagagtcagaagggacacattagaaagtctgtgtggtctcctcaaaagccacatgcctcatgtcagttttcatttcttcctcgtcgcgatggatctttcgagtgcttgccaggggccaggccctgctgtaaacacctttcatgccctaacttggcagattccctgagaactctgaagtagggcctatgtcactctcctgccatttatagaggggctgcatctccccaaaccacacacaattcgtgttaggctgaattgtgactccctccaccccctgcacattcctatgttgaatgatgccttaacccgaaccccaggatgtgagtgtttggagaaagggcctttacagtggtgactggtgaaagtgggtcccttagggtgagccctcatccaacatgacttgtgtccctgtagaagggggcgatcaggacacagacacacagagggaagaccatgtgaggacacagggagaagatggccatctgtgcaccgcagagagaagcctcgggagaaaccagccctgccaatgccttgatcttggacttccagctgctagactgggaggggatacatttctgttggttcagtcactgtgtggtattttttatagcagcccaagctgactaatactcccaactcgtggaataccaggattcctcttaactcacagagctgtggacagagtgaaaaggaaaaggaatgaggttcgtgctaatgagctagaggtgggaaacccaagaatcatgtttgagtcctgctccagctgggtggtgcgtgtgtttccctccaggtgcaggtgaggggaagtgctgaagcctcggcctcctcacaggtatagatggacgagagtgcacacctttaagagttgttctgagggtcaagtaagcccactgagcaccgcgcagatagtcactattagtaaaatagtgataatttataaagataacttatgttttctgaacaaagataaaatgcattctgagtctctgtttatatttactgcaatgagagtacatctttttgttaactgagtgaagggtttaagtgaagctgaggtttcgaattcttacctaacacaggattcccagtgttgcattcctcattgctcacaggacgctttagaaatactgggtgaagatggcaacgcctggttagggacctggttagagtctgaccagtgatattctctcaaaagcagcagtcttccagtttctgaaactacatgagaaacccccattagctgcctgtggtccctggcacatgggctggtgggcataagggatgcagatgccccgagtgccacaggggttcttagacaggcaggtcctttaagggtgtctttgattctattcaggtccattgaaatctgccacatagaataaggttttcaagtcatggtaagagacttctgagattacaggggaggtttctccccctgggccttatgtgatttagacttccatggtgcagtcattgatacagtttggatatttgtcccctccatgggggcagatacttcatgaagggcttggtgctgtcctcatggtaacgagtgagttctcactgttagttcacacgagaactgattgtcaaaaagagcctggcacctcccctcctctctctctctctctctgtctctctctctatcactctctcactctctctctctcgccttcctctcaccatgtgatgccagcttcctttcacaagtccagtgggagtggaggtagacaggaatgcactggcatggggtggttaggccagggtgagggtgtgcagagtgcacatcaatggaagcttcctgaggccctcaccaggtgcagatgctttttctacagccttcagaaccgtgagccaaataaacctctttttaaaataaattgcccagcctcggttgttcctatatagcggtgcacatggactcagacagtggttgtaggacaaaatgatgatcctggaccaggactcctcgggacttcagctgttgagccaccaggctaaagtgacctttccttagaagggctgtggcaaagttcagcacatgtcatctgtgtcccatgtgccgtttctaaaggaaagccagattctctgggaattctgcctgaaaacagaaaacatcaagacttcctgtcctgtggacaagtccagttatgagactggaattattctgcggactaaagacttggaaccaagcatcttaggtacagcctcttcattggcatagaccctcgccggtatcatcttgagctgcctgaagctttctctgaccgctgtccactcctgtgtggacgtggtgtatacattatggtaacctccattctccatcatgataatcagcccagggctctcaaagcctcttatgcaggttctctctctgcttgtgaagggcaatacttcctctgtttgtgggtttttgtttttgttttgttttggctcagcataaggaaagcttccctgaggagggtcagatggctcttttcttttctggtgctgctttgcataccctcaccctggcctgactgccctgtgctggtgcattcctgtctgtttgcactcccactggactggaagcagctttgaggcaaggacattgtgtcactgagtctgtttcctgttgcaagtaaccagtcccaactcaaactggctaaaggaacaagagaggagaaaatgtaactgttcgcaaagtcaaagggtgaaagctatcgagtgtccagggacagctgaatggataaacaaaatgtgatctatgcatgcagtggaatattactcagccttaaaaaggaaggacgttctgacacgcactacaacatggaagaacttcagggacattgtgttcagtgaagtaagtcagtcacaagaagacaaattctgtatgattccacttacatgaggtccctagagtcattgaattcatacatacagaaagtgggatggtggggacttgggtggaggataggaaattatttcaatggggaaagagttatagttttgtaagattataaagttctggagatagttggtgtacgaaaaagtgaatgtacttgatgctacagcactgtacacttaaaaatggctaagatggtaaattttgttatgtatgtcttatcacaatttgagaaaaataacgaaactcactgagcagctgtgggtggctgtggcctcagatttggcttcatgaggactccttggccactcagcgggtgggtctctctctctgtctctctcacacatttatttccagtgactccctagaccctgatcttctcagctgtgtgttggctctgtctgcaggcttgatgtggtctctaggcagcctcagtagctccacttcagtgtcatctttctttaaagtctagaaggaaggaagtcatttgttttcttgagaactcaaaccaaagcacatttttttacaactctcatcccttgtaggttgctaagggactatgtgagtccctggaggaactggcctcacttagtgcatcccaagtgtaaaaactgcttgggaaacactcactatgaagaaaaacgctgttttcactgtttcaacattagaattctctacacaacaccaactaaactggtaaatgtgttttctttccagtctgatcaaaaccttgaatataaatgggacatcttcaaagaataagagaaaatagggctccaactgtaatgaactattgcatctacattttctacttccttttgtgttattgcttaaaaggaagactgtggcatggtctcttttgaaggggataattccaattgtgatgagaatgtcataaaagagtcacccggcttttggtggacaggattcccatttcagccctggctggagcaattctggcttcactgggggaataagaaccttgcttcctttaaaaagacagaaacaatttatccttttgagagcatttctcatatttgctgaaatcagttgaccttaagctgtagaacaaatttcatattatttgtattatgttgacatcaggattttaaaaagaaaagattcaacaccaagaaagtatttatttatccatttgtgggtttttcatcatttttgtttgtttgtttgtatctgtaggactttgattctcatcggaaaccatgaaaatgcttttccagtgttggggtggtcactaattaattctcattatatctggctgcctgccattttctctttgctttcaagaaggttggttaaatggcctgattgttcatagacaaataacaaaagaattataggataatgacttttttttttttttttttttgagatggagtctcgctctgttgcccaggctggagtgcagtggcacgatcttggctcactgcaacctccacctcccgggttcaagtgatttctggctaacttttgtattttgaatagagacggtgtttcacaatgttggccaggctggtctcaaactcctgatctcaagtgatctgcctgccttggcctcccaaagtgaagataaggactttaaaaaaaaaaaacaaaaacaaacaaacaaaaaaataaaactaatcactactgaggaaactccaatacaaagtcttgcttttctaaattagaatttaaaaattcctagctaaataaaccctagaaatcatctaatctgatcccaattgaagtgagtctgtaaatgaagatcctgaaggccccaggggttgacaatgtgcccaacaccccatggtttatggcagaagagctcaggctagaacttggagatctgagctgtttctctgcagcagccccaattccccgcctagaaatgtaatggaagaaggatacgagagatttgatgttccatttttttagaactctctcaaataatggaaaaagatacttcctatttaactgcataataatcccgggatgtgactaggagggaggaaagaatggagagagagagagagagagagagagagagagagagagagagagaaatagttagttaggtggatagtctcacttacttctgaaagtttattgtgaatatgactgtgtatttatgggccaaagattgagactgtatttttaggtagttaacaaaactcaagtttcttcacttggataggagactataatattgacctcagctaaatttattttatttttcattaaaggtgatataaaacattcaaaggcgatttgtagttactaattgatgtatgagtgaataatttttatgccttatcaggaacacgggaaattgggaacacaggaaaatgctgattttgtttttaatgtcacatgtcctgattttttgctaagtaagttatggttcctgaggatgaactttgatgtttggatccctcatgaatgtttaatatgtctgacaactccttacacatttaggttgcaggttttggccaggctctaaggcttccgaagagcgagccagtggccctgcctgagccccgtgggtttctcctcttcctgttaacttatatgtcatgtaaatagtggccgttggagaatgagtggtatccagcttcccacagaagcctggatgagagcataaaaatagatcgtttggaaaagggcccgtgaccctctgtcacccttgttctgggtaaaggaaatgaaggaggtggaagccgagaggagaggagcatagacattcctgaagtcccagaacgacgggcacgcgcctcccaagttctagcccggtcccggggggctgccccgcagcagcagccttcccggccacctcacccccgcagggcaccagggacaccagctgcttaggcggaataccagaaagtgagatgagtgttgtttccacacactaacggtattatgcctcctgctctgggtctgagcagcaaagggaaaatgtgagaatattgtgggaattaagggcagaaggaggccgagccagcaggatgctggaactaaaaggagcgtctgttcagggcccaagatcggctgtggctggcagggctgtgctggcgtgcacacggtctaaacagcatccctgtgtggcctctggagcctcccacgttgtggaaacacatcttcataggggaggggtgcatggcctcaggaagacggcttttgccttagtagaagttggcctgcaccggaaaaccctccatgtagttgctttgagggaccattatgctcactgtggtgcccttatgtctccacctctgaagcagagagacaggctgccacaggcgcagggctctggagagagcagcgggcttaatgcctccgcagatgcccctgtccaagacggtgcaaatcccatctgctcctcaccccggtcatccccaccccgggccatctcctgggctcttctaggtacagagctgaggatacaggcacctgatcgccccacaacaaggagctcagcccacgtcctgtcctcatttttaacattgctaaaaatgttcatggtagtttaaccgtgaacatcaaatgtacaagttgagcaacaacaacaattctgcctgttcttatggtgagccacatttctagaaatgaagtgaactcatgcaaaagggtttgcagtaggtagatcatcctcacttgactggtgcatttgactatacgatttttggtgcacctcccccagccctgccggctcctgttctgtgcttgctagatgctcagcagggacagtgcagaggagcacttagaaagggacccaggctcccgctgcctcgctctcctcttccgttaagcatgggcacatctcgaggagctgtgcagacctaagggaagtggagatggtaggtgccaagcacagcgcctgcagggtgtaggttctgtgtaaagtgtagctgctgtcagcatcctccttgctgtctgcagtcccagtcactggaagtgactgcactgacctgaagatgtgacactcacccaacttatctgggaatgccaaggcccatctaataagtggattaattgctgtggcattgagctgtgtggcactctgttagccgacttgcatctctgagcacaggcaaagaccaaggaccttcaggagaaatggcccaggaagcccaagtctccctgtgctgaagtccttgggataaacatggaatctgatgctttgagcagccccttctccaaataaagggttaagtcctgtcacccggtcaggaactggtctgacagagggaactacacagccagagtgccccagagttggtgctaattgaatgataaacaaagccactttcatgggaattgctgggcttgctgttttctgggacaagcactgtgataacaggaacaaagtggattttattttccttcagcctcttctcatttggtgaaattcccaggcgccatgggagtgcattgagggcttctgagtcatggcatggggtcttctagagccttgaggcacggggactctgtaaacagggatgtgaagcaccagggattgcccccgtggctttgtgggaaccactaagagcaatgtcagtcatagaaacaggtactgcatgctgtgctgggtatgtgctcctctcttatatgactctttgaaagctcaaccaaccaaccataaggtgggcatattaaacttgattaataaacttttttttattccaaagttctgtgctgcttcttggcatgagaccctaggaactgatcaaccaactgtccacctactcctctgaaccagacccctgagcagtatttccacgtcatgctctgaacctctccctctaacctctaagcctttgctagttcattcattaattcacaatgtgaatgacatggagctcctacaggtgccagcccagtgctggggacacagcagtgaatggcaggagtggcccctgcccaataagcaaagaacccatgaggtggttttgtcagaatgcatgccacccatccttccaggatggcattcatcaaatgccacttgctccaggaagccttcagatgaagctccctccagatgaagcaagtctccctgtgggtcctcctgcagctcaagagctgcacctcacatgttcctccatgcagtagtaatttgcacatggtctcatctggctgacacaagcaggacacgcaggcactccctgtttcgcttttgtttctctcttccgttctccggctggtgtaggccatgttagtggaaaactggtgcccagcaaagacattttattttttatttttattttttaattttattattattatactttaagttttagggtacatgtgcacaacgtgcaggttacacatgtgtacatgtgccatgttggtgtgctgcacccattaacttgtcatttagcattaggtatatctcttaatgctatccctcccccctccccctgacattttatttttttatttttatttttattttttgagacagagttttgctctctcgcccaggctggagtgcagtggcatgatctcagctcattgcaacctctgcctcccaggttcaagtgattctcttgccttagcctcccgagtagctgggattacaggcacacaccaccacacccagctaatttttgtatttttagaagagacggggtttcaccatgttggctaggatggtcttgaacttctaacctcaggtgatccgcctgcctcgcctcccaaagtgctgggattacaggcatgacccgccgcacccagccccagcaaagacatttttaatggaaaagaaatacggacaaacacaaatggagataagtcatcttagtactgggaatagaagtgagggtgcagagggatggttttaaactccatgcatctttgtttttctatcccagctttaatagaaagaaataataaattcagcaaacacttattttaggacatttcctgtgggccatactgggaggaggggcggtcagtcacacaactgcatctgctctatggatttacaggtcagtcatagcagaaaacgtgcacatgtattcatgacacaaactgagcatttgccaggcctggccttgagatggtcatggtatttacagttgggtgcagcagacacaccattcccaagggtcttaacagtatgttcatacaaacagaacattagtactgggcttttctataatggaaacatgattaaatgttgaaaacattagtgcggaaattggtgtctcgtcctttcccccaaaatggacaaggcactgtgtttcagactttgtatttgatttttcagaagttttactattaagtgcttatgtgtaattttctttttattaatccttcttaggttttttgtttgtttgttttgttttttaacttgtggcttgatttcttgagtcttttaggaaattctcagtatgtatattttccaatattgcctctgcctcattcaatttctccacaacttcttggactccaattataggtatgttagaatttttaagaatcatttctcatgtcttactgtcttttgtgtatttctcagtcttgttcctctttatgcttcagactgcatattttcttcctatttttctcccagttcactcacaatttcttttgctgtgtttagtctgctgataaaatcatgaactgaatgcttaatttcatttattttgttttgagttctagagtttccatttgattattctctctttctctctctctctctatatatatatgtatacacacacacacacacacacacacacacacacacactctttaagttctagggtacatgtgcacaatgtgcaggtttgttacatatgtatacatgtgccatgttggtgtgctgcacccattaactcgtcatttacattaggtatttctcttaatgctatccctccccctgcccccagaatggcaatcattaaaaagtcaggaaacaacaggtgctggagaggatgtggagaaataggaacacttatacactgttggtgggactgtaaactagttcaaccattgtggaagacagtgtggagattcctcaaggatctagaactagaaatactattgacccagtgatcccattactgggtatatacccaaaggactataaatcatgctgctataaagacacatgcacacgtatgcttattgcgaactattcacaacagcaaagacttggaaccaacccaaatttccatcaataatagactggattaagaaaatgtggcacatatacaccatggaatactatgcagccataaaaaagaatgagttcatgtcctttgtagggacatggatgaagctggaaaccatcattttgagcaaactatcacaaggacagaaaaccaaacactgcatgttctcactcataggtgggaattgaacaatcagaacacctggacacagggcagggaacatcatttgattattcttaatggacttcagttctttggtgaaattctttttgcttctgctttcttaaacattctgttcagttatgttagtatctgtggcttttaacatcaatttttgaactagctgtgggcgttttttctgtgtgtggggtggtggcagtcttggttttcatttgtcatgtttcctggcattgatgatcatttttttacaattaaatatttgatactgtatttttagagtatagacaaagtcaggctctgggtgggggaggcatgttctttagagaggatataatttttcttccaggctgcctaatcagatcctgtcatggtcctcttgtttctagtttgtagcccttcaagggtctcaccttgaaaccttgtggtgtttgcaaaggcccctcttcctaggtgcatcttgaactgccgtttttggttacttagcatccactaagagactgccacaatccctgctgatcttttttagattcgtagcagctggctttgtcttgtttactgggcattgggccctgtacctctgccacttaggactcagaaatgccttgaggggaaacatgctcagagtgttgactctgtctctgcagtcctcatttctctgagaccttggcacttccagaactggtgccttggtagctctgaactccaaacttggtctccccagaacagtgtgattaccactgctagtttgtgtatggcccctataccacatgcttccaaacgggtccatgtctgagaaggaaaaatggccatggatctcctgctcccttccctggaggttttggcccagtaagccctggctgccttgggcgatctgaatgggttcaaactattgttgttagtattttgtgtagctttcataattgtccttagtggaagtttaactcctgcactgtaactgaaaattaacatgctctctctttctagtactggctttgagctgatgcagctgatgtggccatctttgatagataagggtttacagattgtaatgtctccaagattgttgataagcatgtttttccacctttcttgaggacctgcagtgaacaatctaacattctggcttcttctacctcactggataaacatctgtttaacctctttctctttagccataacattgaacatttgtgtaaattattcatcctcccttttagcctactaatgaaccctctgtggtgggtagcagtattaatcctatttatcggtgaggtggtaaactgagaaaggtaaaacaaattactttaaattcaaacacaaacctccggcttgttgagctatttttattattccacagttatgttttaaacatactctcatagcatattttttttttgctctttttcattttaaatactcttaagtcttggggatattaatttatagagttttcaataatttataattattgaataattgataagttaactttaatttcagtgaattgttcgtctttaaatatgaaagattagagatgtatgcttcaggtcaggatggagtaacagagacttgatttattatcctgactgaacaaacaaaaaatggacaaactatatgaaataatggcttccaagccaatgggcatcaggcagtgaaagacaacgatccctgaaaagtaagaaacaaacatggtgacagtacagttgtcccagtttaccgcctagacaaagtttccaggtgtaaggcagggagaggaaactcacgcagaatctgggagactctgagttgggcatttggagttgaaactccaggggaccacaatgacttgcaggatggagagaaggctgaacagagagagagctgttggagatctgcagaggatccgccatacgtattcaactgagcgttgggtaggaggacattagggacattgaaggccagggaaagaaccaaatgaaaagattggaaagagaggctaacccagtgctaactcaaagctgggaagagtgcctgttctcatgagcaagagaggaaagtatcaagattcactgggcattgagtgatatacagaagggttttgcccagtagtgggggataacttgcactagatggagcatgactccaggccttcctaacaaatgtgaagagcaagacccaaaaagataaaaatgtttctaagcaacttaactgcatcccagaataaagttcaagaatatttataagaatacaaaaatatccagcatccaaaaacataaaatcacagtgtctggcattcaatcaaaaattaccaggcaatcaaagaagcctgaaaatagcaatatagttaagagagaaagcaaaacaaaactaatgaggacacaaaactaatgttaagattatgaacattaagacaaggacattaagacatttatttttactatgtttaatgtgttcaaaaagttaagtagagtcgtggaacatataaaaagacccaaaccaaacttcactggagagagaaactccagtgtctgaaatgaaaaataacctagatggatttaacatttggctgattttggataaaattacaaaagcaattcaatgaagaatagatagtctcaacaaatggtagtggtaccattgaatatccatatttaaaaaactaaactttgttgatatatatgcctcacaccatgtgtaaaaattaactgaaaatggatcataggcttatgtttatagtttcttccaaaactattacacttttggaagaaaacagaaaaacatgttttgtgactggattaggcagatactattttagatacaacaccaaacacactattcctaaaagaacaaattgataaactggacttaaattacaagattttgttcttcaaaagattcttaagtgaatatatgcacaggcaacagactcagaagaaatatttgcaaatcatatatatgataagggacttgcatctaaaatatataaagaactcttacaactgagtgttaagaaagcaaacaacctagtgaaaaaaaggaaaaggatttgaacaaacattttaccagagaacacataaaaatgcctattaataagcatacaaaaagatgttcaacatcattagtaattaataaagttgcaaattaaaaacacagtgttataccactacgccagcactagaatggctaaaattcgaaatgccaaccataccaagtaggggcaggattgatggtggggatgtgaaatgctgcaagtattctgggaagcagctttgcattttcttaaaaagttacatagacacttaccatatggtccagccattccatccctaggtattcacccaaaagtgtctaaaaatactcattgcagctttatatgtagcagccccatagtggcaacaacccaagtgtccatcaacaggtaaatggacagagaaaatgtgatatgtccatacaatggaaaagtactcaccgttgaaaagcaatgagctatgtatacattctacaatgtggcggaatctcaaaataatttcttaagtgaaagtagaggaaaaaaagagtttatatgaatgattttattcatgtagaattttaggaaatgcacactaaagcaaagtgacataaaccagatgagcaggagaaggggctggaggaaactcttggaatgatgatgtaactgttaattatctcaatcatgatgatggtttcatggacgtttacatatgacaaactgaccgaattatttactttaagcatatccagttttttgtatattagttatacctcaatatataaaggtgtggtttttaaagtttcatgaaaaattaaacatttaaagttcactttttctctaccaaggtctattagataacttaggatagttgttaatttaggcataactccagacattttgtgtgctgattaatatattttaaaattctaggccacgcgtggtggctcacacctgtaatcccagcactttgggaggccaaggcgggcagatcacgagttcaggagatcgtagccatgcttgctaacatgatgaaaccccgtctctactaaaaatacaaaaagaaattagccgggtgtggtggcaggtgcctgcagtcccagctactcgggaggccgaggcaggagaatggcgtgaacgcgggaggtggagcttgcagtgagtcgagatcacgccactgcactccagtctgggcgacagagcgagactccgtctccaaaaaaaaaaaaattctctaaggtttccttaggaaaagaattcgtgctaaataaaaatagtaatttttaattcatattgaaatgacgtgtgaccaaaaaagtgcttcacttcacatatgtggggataccatataatttttagaatgttcattctgtcttggtagagatggagcttgtttacctcattggagtgaagtgcattccatttgtgaattgatagtgcaaattctgtagagatcaattttttttaaaaaaccaggatattacatcctgtatgtggaggtaatttagttgagtggtcagggctttcccttgctttttttggatataattcctcactggtctgaataatccacagaccagtgctcattggcacctggattaatgaaaaccccctaggtatttcatcttcagaaatcacatatgctgttgataattcctttcagagtattcttagtaaatgtcatttttataaagtgtgattctggtattcagttttattattggttttcatttgaagggtaaagaaggtagcctttttttcagtataattaaaataacacatatttcaagcatgtgaggtgatagtcctgtgagttgtagggaaaacagcattatttggaaatctctaaatttcaataccctctccaggaaatgaataatatggagtttttttctacattaatattctcttatcaatcctcattagttttgaaacagaaaacaaactgaccagtatttctaataatattattttactgaccatggtagatttgtccatttcttgaagcctggtttaaaaaaagaaaaaatataaaaggtaagatgttttaaatatccagaaataatgcagctgctgggcaagaaaccaaacagaaattctgtcagaggaatgtgcctgggctcaggcatgggacacaagcaggtttgcgttctggcccacctgcgagggtggcttctgcaccccacggtgtggcctttgaagcagcggggtttgacctggaaagcagcagcatgggtttgcaccctcatagtgctcgatgttgatggcccagttaccagctggggggagggtagggaccaaaggaaggtggaggacacctaggccgcccggctgccgcagggcctgcacttatggtctttattgggagaagtcgcctgctggtttgcagaggaaaggccatgccaattctaaagtgaggtgcagcctagatcatggagtggagagtacattacaggacatcagcctttgtgggggatggggctgggaggaccagcccaggcggcccaatgtgcatctcctcacatgaccagctcgtggtaatgggctggacactgtgggggactgaattaggtcgctttatttttggaaacagtgatgggtgagaataaacccatgcttgtgggtgcagggctggccgcctcctccagcctattacgggtagtgatgtcatgttcagtatggccatggatgacagaaagcctcaaagtcagcactgtttcttgtggaacatgcaaaagcagcagagattatgacttctccagtcctacaaccgaggtctctctgcttcctgtgttcccgctacagaaccacgaagctgccctgagacgctcactcacgctgtggggatgtcagagagccccatcggacccaaatccacgatgctccgggctgatgcgtcctcgacgccctcctttcagcaggcttttgcttcttcctgcaccatttccagcaacggccctgggcagaggagagagaggtaagaagatggatctttaaacttggcacaagttccccttaaagacccagaatgctgagaggcatgtgggaccagcgggggcttgctcttcagagaagctgaagctagaccaggcagggactggcctgaagatggggcggggcaggggaccagggctgtgtgcacgacactgctaccgccggggacaggtgtatgtggtgacatacgagaaaatatagggacatacaggaaatacaggaaaaatcagtcttagagggcttctggtttacagaaagacctgggggtgggagagggtgggtattaacagggaaaaatggcctatttctgcttcacaaagatactacccctgaggacattcatacgtgagaccattccacttgctcagagtaggaataagtttctttatgctttgttgtatgaacacgtagctccctatttaactttttaaattctacctctgttctccttaaaataaaagaggagccctcatttaaggacattacgcatagactctgtacccatgaatgttccattgctagtgaaatacgtgtgtcacgtggtgtggttttagctgtctttccgtactcgtaagtggttggtaatttccagtagtctttgtggtatccgttaatcaactggttcatctagcaagcatggattgaggactgatggtgtatctggcagataaaggagatggggcagagggatcatgctgcgaggaggaggggacccacagtgaaccaacggcctggctgcgggggatgaatgtgggtggcatccctgcctagtgctgtgggacaagacgggagggcatttctactcccgagggcacacgtgtatgtggccacaggtgctggctaagggctaggaaaaggcttcccagtgggtgcacagctgagctgcgtcttaaaggacgaaagggccttgacccggtgaagatgcaggagggaaggcgcaggggccgagggagcagcatctgcgcatgtggaggccttcatggggcggctcccctgggtgccctcatgcgggctgcagcatccaggcatgaaatgggggcttgaaaggcaggcagcgtgagctcagagagggccttagtgtacatattttggaaaatacctcctgtgctgcctggagggcctcagcacccacttccccatccctgtcttcccgtgtgggtgacgcttgctggtcttcaggtgtctctttgtaccttacatgctgtcttggtcggcttgtcttttgaacagctcctcttctgcagaacgccagtgggtggagagcagccccaagcccatggtttccctgctggggagcggccggcccaccggaagtcccctcagcgctgagttctccggtaccaggaaggactccccagtgctgtcctgcttcccgccgtcagagctccaggctcctttccacagccatgagctgtccctagcagagccaccggactccctggcgcctcccagcagccaggccttcctgggcttcggcaccgccccagtgggaagtggccttccgcccgaggaggacctgggggccttgctggccaattctcatggagcgtcaccgacccccagcatcccgctgacagcgacaggggctgccgacaatggcttcctgtcccacaactttctcacggtggcgcctggacacagcagccaccacagtccaggcctgcagggccagggtgtgaccctgcccgggcagccacccctccctgagaagaagcgggcctcggagggggatcgttctttgggctcagtctctccctcctccagtggcttctccagcccgcacagcgggagcaccatcagtatccccttcccaaatgtccttcccgacttttccaaggcttcagaagcggcctcacctctgccaggtaggtgtgtttccagctggttggaagggcccctctgtccattcactggggaagggaagggttcagacctgcagctgagctggcatatctctagtgctgggctgggcacctggagaggaaatccagagccgttggggtacttttccattttcctcgtccaaaaccaagcactggctcaggcttttcattcactcttcttggcttctgtgtttggccaccttggattccttccagttgtagaaagtgcagacatttgcagtggttctactttccatgtcacttgggaacatggctttttgtaaataacaaattccttgtcaaattaaattaattcatccaaaacgtcattatgaaatatttcaagtgtataagaagcagtgtggtctatgggttgaacaacaccaaccttaccctctctttcctcactaccttcctatgtattcttaaaatgtattgcaaaggctcaatccaagcatcctgttgttctgttttgtgttataaaacagtcactgcctcctccaactcagtcatttcaaaggcagggttccctttccttagaacatcgctcgcttgcttgcccttggcatgggatttggacttctgggatcacagcagatgagaggttgcaagaagaaaagtgcccatcatggtcactgtttttaaattttgctttacagatagtccaggtgataaacttgtgatcgtgaaatttgttcaagacacttccaagttctggtacaaggcggatatttcaagagaacaaggtatgtggggaggatgagggcctccttgggcatctgccctagtgcccgcttcgctgccttgtgtgaagatgggccctgcggtgggaacatcgggcagccgtggccttcatatggattgagtttgagcagggcccacacgttattccatgcctcctggggacatgctacaacctttaagtttttataggggaaaactcactactaatgagggagttggtgaggaatgggccccagccatgagcattccagtgtgtagggtgtaatttctggctgcttgcaccagccactggcttgccagtgatgccagcccacaactgctgactgtgaggaggagacacactctcctgcatctccatgaaaccagagaggacagggtgaggaagcaggagagacaccctcctctgagaagtcagggacactgtgtgtttgtgaacacctacataagcacttaataatgagacccggttgtggacttagccgcatgcctcacacacaaaccagacagagcatctctctgcttggtacaatgtcaggctttttttttttttttttctaatttgaaatcattaatactaatttttgagcaatgaatatttgaatattttgagcatcactttttaccagagcatgaatagaagagatgtgggagaggaaggctagcaagctcttctgggcagccctgcttggagacagcccctgggcaatgaggagaattcataaggtgcttccctcggctgtgggatggcttttctccctggatgctgtgtctcagctgagcgtaccttcctctggatacctcattttggcagtgcatagagtttgttgcttctgggatatacctcagaagagatggtgtgtgactggcaaggcagggcagggccatgcctccagtgcctggaagacggagtcaggattcctaggaaccaaagtgaatcccggtggccacctggtggaggctggagtgaaagagggaatgggttggtttaaagcggtgagaaatgacaagctgcccgcagtcagcaggagacccacttggctcctctgtgcctctttacctcaacttcagaagaaaatcaagctctctccttatgaagatgcctcaggaatgcctagaaatgaatagttgagtggcagaaaaatagctctgtccagctctccactgaaattctgctattcagttatgtagatgacagaaatggtaagaatgtgcatctcttatgatctcaaagaagcgattgtcattttaagtggaagagagagaaaaaaaagcctgtggcctggaaagaccttcatttccctgaattggcctttgtgaaacactgctcaccatggctgagggcctctctgcggccggatgctgtgtgcctgttgccaccaccctggccctgcttgtgtctcaagaatcccgatgactgtggcccccagtgcctcggcacctcctccagctggccaaactgagaggtgcctatccagcacctaagagattctgcacagacccttccactctattggtgccgtcttctagggcagggcgatgtgtggggctggatgcccccttctctcattgtgcaatgtcattgtagcaggggggatctgaaacagacagatttgggttggagtgcactgctggcttcctcggcagggtagcaaggttcgagcctgccgcgggggtttgctgagagcagtgccatgtggaaggtacctgcccttgctggcgcctggtagatgcaggataagtggatgtggatgtgcagtatgtgtaggggctgctgttggcatgtgcttgatcttcagcacacattgtagaaggtttgctgggaggaccccatctcaggatggccaacatgtgcatcgagtgttggtttttccagctgagctctaaaaggataactttcattttctacatattttacatagaagagacctgtgcagacgaaccttctactgcccgtgtcagagtctccaaacagcggaaggctgcccttgggtgtcatttatttggattttaactgtcagatgtgcctttttctagaaaagctacaatgacatttcagggtgatgcaggaggaaaaaaaacacccagataacctctttgggagtgcaatttgtcacatacttaattccttgaggtttcttaaagctaacataaaaatacctcaggaggaaaagaggaccttaaagtaaaatcaaaattaagtactactgtcccagttgtacttctggggtgttgcttctccagatgcttctccagatgcagggcgcgacagtgtgagaaggtgcgaggagactcacttgcctcccctcccctcatccctgtctccaggtgaggaatgcgatgccagtgccagggtggagcacgcagctgctgtgtgcagtgtgtggacgctcgtttttccaacttcagcacaccaggctcctcagcctacttctgtttggaaaaacagcgggtctaaaattctcctcttactcccattgcctgtgcaggagagcacagcccccttgcacccctgcagcctggcagctggggcttccctcctggcatggggagaactggtcggagcaaagcccgtgttccctccactgccatccacaggtgcccaaagtctcagtcccgtgaggcttctacactttatttaccacagagaagtagaaccatgacttacaaaaagaaaagctctgaggtatatcacagttgaaacaaaatgtaagtgatcttttgtcctacttagagaaaacaaaaaagtaggcccggcgcagtgactcactcctataatcccagcaacttagggaagctgaggtgggaggatcacttgagcccaggagtttaaggccagcctgggcaacatagtgagacccagtgtctaccaaaaatttttaaaaattagctgggtgtggtggtgtacacttgtagtcccagctactcaggaagctgaggtgggaggatcacttgggcccagcaggttgaggctgcagtgagctatgattgtgtcactgtacttcagtctgggcaacagagtgagagagcctatctcaaaaaaataaaaattaaaaactgaaaaaatgtcattcacgttcagcccccaagtttatagactacgctgtgagaaaacgtgcaccagaattcagggtttattcccagggcctgtgccctgccccaggaggccccccacccagccctgggtcccttgcatgggcggctgcaggcctggctggagctaccagcagtctcgggcatgcacggtgagcctgcctgtgttttcctgcccatccttcccactgcgtgctgtttagaagctcctgcttcatccccaggggcatgttgagctcctccccgtgccctcatcctgtgcacagggccacggtgcagacattgaaaaatgtgtaaaagaaaccattcgtttcatcctatggccagacagatgccttggctgtgggtccggtcaggcctgggggcatgtgaggggcctctgtgggagtgcgccgtggaggtatttactgaggcatgccgggggcatcccagcacttactggttcatgttctgcgccctgatcgcttccaggcagagcctttggcattccagaaaggcagcatttccatggctgtaattatgtataactttatactctaaatccccagttttcccttttttaaaataaagagtaaatgtctagaaaagaaattctgagatgtagtctagttatcagggaacactctggcttgtctgggcggtatcgagttgaggttactattaccctaacccactccctcttcttggaaatgccagattttggccatgaaggagagagattttttgaagcaatgattatgattagttgaatgcctaccagcctcaccagggaagctgggtgacccactgtgcgaggccctgggttggcgggcacatggggaatgtgtcctcagccccatccaggctgggcccatttggccacatcagccatggagccacgggatagggggccacctgcaggccaggtttttgttacttccttggtgaatcttggaatttgtattaaattttcagtaacattttgggtatgccctttctatcatcagaaaatgtaattagaaacttctttcctggccaggcgcagtggctcacgcctgtaatcccagcactttgggaggctgaggcgggtggatcacaaggtcaggagatcaagaccatcctggctaacatggtgaaaccccatctctactaaaaatacaaaaaattagccagacgtggtggcaggtgcctgtagtcccagctactccggaggctgaggcaggagaatcgcttgaacccagaagtggaggttgcagtgagccgagaccatgccactgcactctagcctgggcaacagagcgagactccatctcaaaaaaaaaaaaaaaaaaaacttctttccttttatgctgttgaaagagttcatgttctcatgttctaaaatctttaagaaaaatgccacagggggcagtgtccaagcagaggcagggtgttctgcgacagcctccctcccactgcctgtttctcccctttgtgtatatttggatctggtcttgtttcttactcagcgtgagccttggtttcctgggctgtcaggtggggaccatcatttggacatcacaggtgttgtgggattaacagaaatcctgtgttcttccatgggcagcccacaggacagtgcccggcacctcagtctagctaaagagagggatgttcctgtcctttctgcctcctcaacaggcaggcccacccatgaaacatacacgacaccacagagacctccctgaaggtccctcaactgcatggacatgtagttcttccagccaagcagagggatcccggccaggtccccactgatccagtttgcaaaaagagtaaggggagaggacctacccaaggttatgagtgggcatagacctttgtccacccggcagaccttcttgtctttctcctccctttctccagccatcgccatgttgaaggacaaggagccgggctcattcattgttcgagacagccattccttccgaggggcctatggcctggccatgaaggtggccacgcccccaccttcagtcctgcagctgaacaagaaaggtaaggttactgctccctattgatctgttcagctcatccacagagaaactctgttggtttatttttaggctaataaaataaaagatgactttaacaatactcacaaattttattcttagtatttattttttcaggtatattttacaaagttttcaccttatttaagaaagaacattaatttgttaattttattttctattgttttgaataggtaatccatttcattgttcaaaaattagaaccatgggataaggcatccactaagcccgttttgcttccatttcggctctacccccctcaccaccctgtcacctcccttgggcaaccatctggagtagattcgtgtgtgtcttttcactggttacctgtccaaatgcaggcaaacacattttttatatgaaaactagcatactgttgagtactattcttgtatctatacccagtagggcatttttagatggattaaaagtgatactagaataagcctagactcatgagatgatctctaatgcaggtaaaggactatgcctgcctgaatcctttttgcattaaaaatcatggcaaaaaccataatgacttttgcaccaacctgtaatagaaggatttctattcctttgggtataatacccagtaatgggattgctgggtcctatggtattactgcctctaggtctttgaggaatcgccacgctgtcttccacaatggctgaactattttacactctcaccaacagtgcaaaagcattcctttttctctacaacctcaccagcatccaccaatcatatttctaagattgcttgtagctgttgttctctttggaagttctggctttctatcttatgaaaatcctacagccaattgatccattctattgttggtggacacttgattttcagttttcttttttttttctccccctgccctttttgccccattatactcatctttgtgtgctaccatgctgcagactagactaaggaaagggaagctattctttcactctgtctgtctccccaaatggaaattgtggactgaggggacattgcaggtcgttggttcccagtaaggacagcttgattcactaggagtggggaaatcagaagcagctcggattttaaactccctgtgtttatagaaaagtgagacacccacctggttcactcatgctctgtgcctaatacctgagagaatttttccaaattcttggatgaaacctctgcttcatgcttcctggagaaaatcgccttggagttacaccctgtggaatgtatgatttggctgccaggaggtccagcctcaggcagggctgtagcgtttccgggaaacatagatgggttcattttggcacaggtaatggtgtgagagtggaaggggtggggagtgaggctgggaaagacccggggctcagtcaaagctcagccccgaagcctgtggctactgattgtcctgaagtgaagtagagagaaggcgttgtgtaggggagaaaggacagataattcttgaaaagtaggatcttctagcatccagaattccagcataagaagcccaacacgatgctatttctgagtggagataagggcttttgtagctggagagctgaattagacctgattgttgaggactgaaactgaataatgatgatggcaggaaagagggtcgcaggaccaagagcatctggcgagtctgcagagatgagagattattgggagaggaggaatgatggatggttttggttggctccttcgtttccgtgtaaagttttaaagcaaggacaaataacatttctgcatgcattatctttttggaatctagatgagagtatataactgtttttacctctgtgcgtgcatcctgcctctctgacagactttggactcaatcttaagatgaaaggaacaaaataggggatattagaatagcagacttgaggaaaccgagtgttgttggtggcctctgggtgaaatcttatctgactgctgtgtcttcatcttgtccctggatttgacattcagatttcacaatccaaggatagatttgagcaaagagtttaccaggtcataaagagccacaaccattcaccataccacctccagtaaactggagatgggacagctagggacgttctggatgctgttctccagagagccctggccagaaggacttcccactgagccatttctcacaagtggaatccagacccacgcttggtgtccccttcagtttggaagccaggcgtcattttcttcccacaactgaatgtcaatatgttcttatcccactttaattcaacacagccttttatggaatctgatcatttccttttctgcaagctttactgcccttgtgaaatgctgacacagtgatatttgtcatgtttataaacatcttttggaagcctactgtgggcaaggcactggggaccaagcccaactccagtggatcttgctgccaggaggtttccaacaccagaaatattagaagtttaggcagacatgccccaatggagggtgatgaaggaagcactggatcccagaaatacagcacactgtgaaggtctgttggactcattagcatagggcagtgacttcttgttcttttggttgtgctgtttgtacttttccactctcagatagttttgccattcagtggctttttatgatgtgttttctctttggactcatgggctggcctaaagcagatgcactgtttactgttaatagcaatgtggtagagtgctgctcccgtgcagctgagtgcttgctttctggaaggttttaaagatccaggctcctggttaaatcccacccagaagactgacctccttccagctcttttcagtgattcattataggtatcattttgtgtctgagcctttctcacctctcctctttgggagaggattcagctggagattcttagctaagaaagatcctctttcttagctgcaagctcattcccttcgttggggattcttgcacaatgtttgagggcctctcccaagggacctctccagcccccacactgtcattgcaagggttcccgccctgtatctggcctagcctgtgctcatccagctgtcctgcagcccggctaccattcctaggacgaagatggttcttggcagcctcttttgcagtgactggactcgtattcagagaagagccttttcaactgtagctcctggcttttatgttctctctattgaattctcccatgctcccattttcaaaaaattcttctttctttaaatttcttgccacagctggagatttggccaatgaactcgtccggcactttttgatcgagtgtaccccgaagggagtgcggttgaaagggtgctcgaatgaaccatatttcggtgagttgcttgagaggttgctgtcaatgttctgaactcatgaggcctggattccctctgctcaccaacctgagatttgggactatcactcttatggtggtttactcatatttcagtccccagttctgaaatcctgctgatctgcattattatctttaagataaactagatttgaagttgttcttaaaagctctgtcaaaaccaaacaaatgaaaagcaccatatcagacgtaggaattacagacgtcaataagattctatcctagttggcaggcaggtaagtcctgagaaggttggagctccagcatgaccctatcccacagcacaaggaacaacatagagctcccaacagagcaccctcccttccctgcaaattgggagccttccctacctcacgagcttgttggaaagatgacttgagcaatccacacaaagcacagtgcagccttaggcatcattgttattagagctttgttaagaagcattgtgcaggggtaatatatatggttaaagttggagttggcttgatgtcaaccctcctgattcaagatccaacaaactgtatgctttagtctttatataatttggtaatgatgtgtctatgataagaatgataaacagttccatttacttacctctcaactatcttgtggaactttatacttctttgaagttttacacaaagctgcacactaatctaacataccagttgctaaaaagataagggctcagcctttgcatccgtttcattccagctgataaattggctgagcacacaacatctacagcagttgttgactcttgtttgctgtctgtccactttgcagggagcctgacggccttggtgtgccagcattccatcacgcccttggccttgccgtgcaagctgcttatcccagagagaggtaaggggtcctcagtgctagtcaggctctgtgtagattgtctgcagtcaaggccaccggttttagagatccatgaagatccactgagaaaaataataagactggaagttttttcgtattctcttggttgaacccaagaaaaggccaatgagttcatccaaattaaggagagaagaggagattctacttcactgacagctcccagatagctttacatcatggattttgatgaaagatttctatagagcaaagattctgtagtttaaaaatataaaaccctcagacaaagaaggcttcagggtcattgacatttaatttttacgtttctacggaatgggcaaaatgttgatgttgttgaacttagatgatggatgcactgttctttttacttttatgtttgttaaacaatatccataatgaaattaaataacacccacagcatgtcagggcgatgtgaccgtatgtcccactttcctaagcagtcacaacttcacataaaaatggtctaacttaatatataggtaaatgtgatttacttttcaaagtgtcattgttcatatgactaattcggtgattagaaaaatattttgttaggccttgtcatctctacttttattcagaatgtgatcatggtttctatgggccaaattattgtcccaaagagaaactcttgactctgcaaaaccattgcatgtcaccatctgggaattctgtcatcaaattgtctaactttgtcatgaggattcttggtcaggagcaggactcatttctgtattttcttgccccttcctacagatccattggaggaaatagcagaaagttctccccagacggcagccaattcagcagctgagctgttgaagcagggggcaggtcagtaaatgcagctccatttctacatctggtgactggggagaaaaaggactcactgacacaacttccttttgcacttcagtattcaggtttcctttcttttctgtgagccttgaaggaggtttccttttatagaagcttgcacagagctgggtggggtgcagttgttgggacatcagcaaggccttcatgggccggtctaactcaagcaagactaaattcagtggaataaatgtcaagccctggatttagtttgggggaaaatatagtaagacaggatgtgggtgatctgtctcggcaactgtaaatgtaaaaatgttccagagacatgactcaacaagtcacttgacatgagtcaatgatttgacccacactgccagcaaccccagtgagacatacaacacccaagaaccagctcgccagacagagcaggtcacttaaaaaaaattattcatagagtttcttttttagagcagtgacagattcacagcaaaatggagaagaaggtacagagatacaccatatacacgcatagcctccccgctgtcaacatcccccagcaaagtgatgcacatgttatggttgatgaacctgcattaacacagcctcgtcacctgagtccctagtttagggacttgatatttaggttcaccttgatgtcatgcattctacaggtttggacaaatgcataatgacaggtaatcaccgttacagtatcatagtgaatagttttattgccctaaaaatcctctgtgccttttctgttcgttctccctcccccaccaaccccaagcaaccactcatatttttattgtctccatattttcaacttttccagtattgtcatatagttgaaaccatacagttcatagccttttgaggttggctcctttcacttagtcatatgcatttaagtttcctccatgtgtttttatggcttgatagctcatttttttttagcagcaaatatttccttgtctgggtgtatcagtttagtaacccattcacctactaaaggacattgtgggtgctttcaggttttggcagtaatgaataatgctgctctaaacacccatgtgcaggtttttgagtggatataagttttcaactcctgtgcgtagataccaaggagcgcattcctggattgtatggtaagagtgtgtttggttttataaggtacaggcaaactgtcttccaatgtggctgtcccattttgcattcccactagcaatgaatgtgagttcttgttgccccacatcctctccagaatttggtgttgccagtgttctggaatgtggcctttctaatagtagcgtagtggtatctcattgtttctgatgacttatgatgtgtagcaccttttcatatgcttatttaccatctgtatatcttctttggtgaggtgtccataaaggcctttggcttgtttgtttaattgggttttgttttcttattgttaaattttgggaattcttggtgtattttagacactagtcctttacctgataggccttttgaaaatattttcttccatttcatggcttgccttttcattcttctacagagcagaagtttttaattttaataaaatccagcttattgatttcctgttttatggattgtgactttggtattgtatcttaaaagtcaccaccaaacccaaggccagctagattttatagtttcaaattttacctttaagtctgtgatccgttttaagttaatttttgtgaaggaagtaaggtctgtgtcttgattcattttttatttttttgcctgcagatgtacagttgcttctgtaccaccagttgaaaaatctgtcttttcacagttgtattccctttgctcttttgtctaagatcagttaactatattcatgtgggtctactttcgagttctttaattgacctatttgttctttcaccaatatcacattttcttgattgctttagctttatagtaatcctggaagtcaaataatgtcagtcctccaactttgctcttctctttcaatattgtgtttgctatttttgatcttttgcctttctgtattaactgtagaatcactttgttaatatccacaaaataagttgctgggatttttattgagattgcattgaatctatagatgaaattaggaagaactgacaccttggcaaaagttgagtcctgctgtccatgaatatggaatatctctccatttatttagttttttgtatctttcatcaaagtttaatagtgttcctcatatagatcttgtctatagtttgttagatttatatgtaagtagtttttgggaggtgctactgtaaatggtattgtgtatttaatttcaaattttacttgtttattgctggtctgtaggaaagcagttgaccatttgtacattaaccttgtatccagcatctttctgtaatcgcttactagttccaggccaggttacttttgcagcattagatgcagtcgtagtggccccagtttaagaaggttgtaaacaaaccacacaccatagggctcttgtggttctgtggccatgagggagggacacagctagagaggacagtggggactgctgactttcaaaccttgactttcaaaactgttttaagtttttcatgcaaggtaggtgtttattgtcagaaatgatggggagggaatttctgagtctggtagaaaattggactagaaatacctccattctgtacctcatatctgcagagtagtttacaggtgtaactccacaatgaaggtgtatgaaatgtataggcattttcttatttcctctacaatttgtattattcttctatgtagcttttccctgtaaaattatacatcactgtgtctgttaccaagctaaagtaaaattactctgttttgaatggaattttgtagtgtttaagttattttagactctccttataggataagttatctgtggccaaaacaaaggtgaaaatagcttgccccaaattgcaagtgtgctaaaactcgaagctccaaaatgaaaaatgtagctgtggtcatgggtttccggccatgttctgctactcaggattttgatctctggcaaatcacttagccatgcggacctgaggtttgtatctggtcagtggggataataatatttccacacatagcagttgaaaagattaaatgaataggacattgaaaatgccttgggagcatttttctggcccaagaggaatggcctttcctgggaagccggcctcaccctttcccttgtgagggacctgggctggtcctgggccacagcccctaaatctgttttagggggtccctggagcccatcatggttcttagctttcttctgttaaagtaacagtggaccctgtctgtgggtcccagtgaagtgcccagaaggatgcaggaatttactgtagacctatctgatgagcagctcactcactctcaactgaggagacagggctacaaaaccagctccactctgatggatttatttgtttcagttgcaccttttaaaaatgtatttgaaattttgaaaacctttaattagtggttttaaaatcacaacttatgcatcggcagtgttcaagaaagcgcagaagaacggtgatagcaacaggcacagagcacttgtcctgcccagcttattgtctcctccccttcacccacagggcgtgtgggtgtagtgtcctgtcatcccatgtcatagacagaggacccaagttggcagctctggctcctgaatggtagatctaggcctggcattcagctcccacgtccagctgtgcccatattgtctcagggacacagccctgcccattcagccctatatggtagcaccagggcacacgcaatttcacttttctccttaagcttcttagttatcctgcattcacccagtaagtgtggaattaataaatgaattgaatgaatttagttgatcataacagtgcatcctaatagcacttgtttttagatattaaaactttctcttctatcttgacttatcatttttaagtgcacttccatcttttaaaattacgtatgaaatgtatcaataactccaaatgttttttaagggtgggtcttcttagagtcaagacttcattcagaacttggagtttgtatctgatcatctgagttgggcatttatatatgaagcttaaattatgactgccttgagcttctttcctttaaaaatctcatttctgaaacacattgagagctgcgaatgtctgctgtccattacattaaccgcgattccaagccacggaaccaggacagcagatctgtcaccagaggagtgaggctgtcacagtgaccacccctcagctagtgtcgtcttcacctggaggattggctgcaggtgtttagaatcagtgcagaacaaccattgtagcaagacggtggaattattgcaatctctgatgacctccagcaatttagtgagttttctttcctaaactgaacttcatctgttgtcctaattcacttagagtcctagactcctggatgtgcaatgttctttgagatgatcatgtccaatttccccgttataaagattcaggaagctgaaactcagaaatattagcagacaactcacaaagatgggaataaacttgtaatgctctccagtttaatccctttttttaaatattaaggccattatgcctttgttccaatctctaaaacaatttctatttgtgttttaagcctcggttcttaattgtttcttgttgaagcagaggaatataatataatcctgaaaagaaagacttacttcttttcagtagccttctaatagatttcccagaaatgttgcagttgcattttttagcatatggtaggtatacttttttttttttatagagtcttatatgttctttaagttttaaaaatggaaaataaaagaaaaggaaaaatgaactactcatagatcggttgcccctatgcagcccctgaatattgggaggaagagtggacagcaggtaaagtgttctccagcccaaagaccactcctgatgtcaagcagatccaatcctatgctgcctttttccttgtacttggggtcatgctgcctgtacgattcttttctcttctcttagcataataagtttacccatggtttttacaaacataatgcaggtctcatttttttcatggctacacaatagtccatcatataattcacctccttatggatgttcatttaccatgtttctaatttttaataccacagacaatgcttagaggaccatctttctgcattatttattttttctgaaatctggattgttgccttaggacaaattcccacatgtgggcctcagacttttgttctgtgttatcaagtccctttcccagagtagcctagcaattgacagaactccatgccatgggtctggtgggtgccttcctggtaactcttactgggcactgaatcttcacctctggccaagagcacctgtcaagtggcattggatggtcttgggtcaggtgcagttggacaatcataggcaggcgcaggcatgcctgttctctgctggagagaggctttggggcacttggtgtcagttggttgatgtgtgctccgtagaacagcctccctagtggcagcattttcttctctgctttaaggaatgatgacatagttcctgcatttggggagagagattccccaaacagcagattgctaccaaactctagccagcaagactgctcctcatcagaaagccatctgtgactccttcaagagagcatgggtctgggttgtggcagctgtggttctgtgtgaactgattgagattgtgccaattttgtggaattttcctagtagttaggtcaaaattttcccttttttctctctttcataactgcatgatcagcatgacagtaatgctaataaaatcaaaggcggactgtccctctcgtgaagtctgttttgaattctccaggctccctcgcagctcctatctgatgcacacatgcttttcattttcccgttctaatcatagcagacgtggtttttattctgctttccctgctgattgctgatgacgtctttccatgctgccatgtgattttcctggttaccgcttgctggttgcttggtattacaccgagggagctaatttcacccctctctcatttctaatgtgtttctggtttttcccactgtaatgaatatgtggcacaaatgtctttccctgaaggttagctatcctatgtggttacagaatatttcctttctcaatctcctcagaagcgggaccactaggttacttctaggcatttcatatccacctgataaatatcgccaagtatactagtcggctctcatgatgctaatacagccatatctgagactgggtaatttataaagaagaagaggtttaatggactcacagtttcacatggctggggaggcctcatgatcatggtagaaggcaaaggaagagcaaaggcacatcttacatggtggcaggcaagagagtatgtgcaggggaactaccctttataaaatcatcagatctcgtgagacttactcactattacgagaacagcatgggaaaaacccacccccatgattcaattacctcccaccaggttgctcccaccacacatgggaattatgggagctacaattcaagatgagatttgggtggggacagagccaaaccatatcaccaagtgatcatcaaaaatagtgggctcaattcctcagagtgtcttcagctataaacaatatggcctttgcggtggatagaaaggatggtccagcaactcacaagtcaccctgcactgtgacacccagggacatcctagcccatctgtgggcttgtgtgtcaatgcaccctgtggcacacctgtcagaccacctgccagcacaccttccagtgcacctgccaacacatctgccagaacgtctaccaacatacctgccaaaccacctgccaacacatctgtctgtgcacctgccaacacacctgccaataggcatggcccttgctggttctgaaaagtcagacttaaaggcaaagagaaaatggagctgcttcccagggctgcctaccccaggaggacacggccgagggagacaacactacccagcgcgtaccgtgcatccgagtgctgagatgtgttgctgtagactgtgggaaaacactctttttctgttaagtgaaactttagaggcctttaaccacggaattaagacacccacatgctcacatagagggacatgtatacagtagacaaggggcaagtgagtgagggcagttctgttcctcaggaggaagcctactcagcctttgggcaggagaggccctggtttacttcagtgaatgagcttcaggctaaggctggatgtcttggaacacctcaatttcacccatgccccaaagtcacacgtgcacttatgcttgaactgcagggtcacaggctagaagggaaagaagggttgttatggagcccagttgtttttcttctcccaagaggagatggtcagggacaagacccacagctctcccttggcagcatggggagccaggacacaggtgaggccgggccacttttggctttttccagcctgttctctgagctcactgcaagccattccttctcttggcaaccaggatttgaggacacatgcttccctcatggttgtttctcaagggcctctgggctccttacctataacagtagttgggtttcatattaatgtgactgttgtccatacccaccctgagaccagagaaggtgccttgggctccacctgggacacgagggtttaatactgctgcagggcgaatagaaagctccctctggctggtgggaaggcaaagccacaccaggcgggtctgctttgctctagtaactcgcttattctctgccttgacatgggagtaagtgcatccttggagcactcactgttcatgttttcagaattaggggcaaaggccatctgccttacatgcacccagcataggccacatgcgcaagttgttcataaacccagtctgcacatcagcaactgcctgtgtgttaacaggacacacctgtcccaatagttgcaactaacatgtgtctcccttggtgtcttccagcctgcaacgtgtggtacttgaactctgtggagatggagtccctcaccggccaccaggcgatccagaaggccctgagcatcaccctggtccaggagcctccacctgtgtccacagttgtgcacttcaaggtgtcagcccagggcatcaccctgacagacaatcagaggaagtgagtgcctagagggaggcaggagccgtccagcaggggcggggctgtcacgttcctcttgttcttccctagtgtgagtagtcatccaggtaaatcattagccgtctttgaggtcatgagtcacccagggtctgtctaggcatttttctgtcattaaatacgtcctgggaaccacataggaactcttagcatttgtttgcaaggctatttttcttagaaatcagtaaaataaaataaaaaaagacgtttggcgttttaaaattacacacatacacacataattgcaaatgcaaaaaatcttttaactcagttccttaaaaacactctgatactatgatcagagtccaatgatcttggaacctattgttttaacagagggtcatttcctttcaggtgagcgtatgaccttgatatgtactatttccgttggccaatttcaaatgacttacgcctgagctgttactgagccagttatgctggagcagatgttctccatgtggatctttactgaatgcccagcataagcatggaacagagcagccacagggctgttcctgtctccctccctccagaatgccatccctgagtgcagcctgtggcctaggaacagagcattccagatgcaattattttgtattgtgtggttgaggaggcacgttggcatcaaccgtggcagcagcatgatggcaggagccatcacagcagacaggccggcaggggacactcagaccagcctggctgctttcccaggatgctccccgagcagggcccccatgcctctctgtggtgcccatgtccctagaagcaagacattttcttcatctgcccaaaccacctgggaggttgaaggcaggatcttcccctctgtagcttcaggaataagtgagtttaggcaggtttagctcatcacccttcatctgctgaaaaaaatgagcacaaagcagaacgtgggttttgctggtcagacccgttcagtgcccctgacactgaccagtagatgaccctgggcaaggtcccaatgcttgatgctctcgtatttcaatcctgcaccaaaatacctatttcaaggtttagtgtctcaaatgaaaagggcactcagcaagtgccctgtgtggcacacgcagggacagggtcagggttgtggctcaaccccaccatgttctcagggtcaggggcatggctcagccccactgtgttctcagggtcagggtcacaggcaaggctcagtttcacggtggactcagggtcagggacatagctcagctgtatggtggactcatggtcaggttcagggggcatagctttgctgtttggtggactcagggtcagagtcagggttgtgccttggctttatggtagactcagggtcggggcatggctcatctgcatggtagactcagggtcaggggcatggctcagctgcatggctcacccagggtcccagttgggtatggctcagctgcatggtggactcagggtcagtgtcaggcatagctcagttacatggtggacacagggtcaggggcatggctcggctacatggctcactcagggttcccgttgggtgtggctcagctgcacggtggactcagagtcagtgtcaggggcatagcggagctacatggtggacttagggtttgggatatggatcatctacctggtgggctcagggtcaggctcagggcatggccaggctgcttggtggactcaggcttacagtcaggagtatggctagactgcctagtggactcagggtcagggtcagggtcagggtcaggggcatggctaggctgcatggtggactcagggtctggaggcatagcttggcgacatggtagactcagggtcagggttgggctccttaaggaccctcacaatgttgactgttccttcctccccgctgcccttggaagatatgttatttcttcacaggatctgttctatgtgcccttgtcagagttgtcttttttctgtgtctctttagtttccctgtattctttatattccctggagatgggtcatgtccacatcagttcagatctttcatactgtaagagatagcgtttgagttcagactggctaattctagacaaaagggggatcttctcaccaacaatcagccttaaaaggcacctgtttgagaggggctgcaggtggctgcagggtcaccttgaattgaagcacacccaggctctgcctctgccctagcctatctcctggcctctctcttcatctccagatgagctttaccctgtgccggtgcagagtcattcccagaaggagaggggtgaccccaaagccagctagactggcccagcctggacacagcagagtgttgagttgggcatcctctggggaccatgtggactgggtggatagcactcttggaaggaagggctgggcaggtgagccggaggagaatgccccaggtggtcatgtcagtgactaagggctgtcaggtgagcctggaaggaggtctctatgggggtcgtatcagtgaccatgtggagtccttccttaaggaatattccttgcacagcactttattgttcactcagtgctctcagacctgtgactgcatctgacttgggcatctgtcctgtggaaggggtgggctggtaacatgatccacttttcacaggtgaggaaaccaaggctcggagcctggaggctgttagtggtttccccacgatcctgcagccagcagtgtctggcagggccagaggtgcttccttgtgtccatctcacaccctaccagcttttccagtttgttagggcttttttttttttgagatggaatctcactctgtcgcccaagctggagtgcagtggagcgatctcagcccactgcaacctctgcctcccaggttcaagcaattctcctgtttccacctcccaagtagctggaattacaggcacatgtcaccacacccgactaatttttgtgtttttagtagagacggggtttcacatgttggtcaggctggtcttgaactcctgacctcaggtgatcaacccgcctcagcctcccaaagtgctgggattacaggcgtgagccactgcacccggcttgttagggcttcttgacccgattcccgccttccacacggctgacagtttcagcctgtgtggtgcttccgtctactggtaacaactgttctgcccagcttcatgacatctgttgactttgaatgagcacgcactttcttctctccaagtgatgagtaaaagtatgaaatgttttctgctggaagaatcttcatgtatgggagagcccgcccagtgcatcccccatcacccaaaagccctagtaacaggagccatcctctctcccccatgtcccaacaggctcttcttccggaggcattaccccgtgaacagtgtgattttctgtgccttggacccacaagacaggaagtaagaaatttgcatttttattgagcaaggagtgtacttaattctatcctttagtttaaaaaaattaacctctgtttttctctttaatttgcaaggtggatcaaagatggcccttcctcaaagtaagttgctgagatttctttacattctctccttgtctacagttgtactccaaagttgaattctcttccagatttgcacagggggtgccttataagaaaatgactacaccatgccaatttcttttaaaaaagaaaaaagtaaaagtgttctcattatggacaaggatctggatgctgttaacttttctgccggctgttggctggatgtgcaatatttacatgtgtcatataacactgtggcatagatacagggagatggatggcacagcctttttggccatttgggaatgcatgggctcagcagtgctgaggtctgcacagctagaaggaattgctccctttgtgcaggtgtgtggatgaagcgggtgttccaaatttaccaaatgcaacggaggagggccttcatcacaccgttgctccacagccagtccaggcagctgttagagtttttttttttttttgagacagagttttgctctttttgcccaggctggagtgcagtggcgcgatcttggctcactgcaacctctgcctcccgggttcaagcaattctcctgcctcagcctcccaaatagctgggattacaggcgtccgccaccaggcccagctaattttttgtatttagtagagacggggtttcaccatgttggtcaggctggtctcgaactcctgacctcaggtgatccacctgcctcagcctcccaaagtgccgggattaaaggtgtgagccaccgcgcccggcttagagttccccttttataagcacacctttccctggctccctgagtaccgtggccttgcttggcctgggctcattcctggcccagtgttcctgtcagggccagctgagggacctcatcctaacctcccacttggaggcacaatgggctgtatccccccagcctggtttcctcggcataacccggatttaatgaccacagtgcctgatcacaggcatccttccctggaatcctgttttcaaatggcttgtctgtccaggaagttgctcagtgcatgcgttagcagaagcggggagaaggagaagagaccctggtactgacgagctgggcttccccggtggggactgtgttctgggcacactcccactctggctggtagcagaaacacgggctttcatgtgcttggaatttgtgactgtattggggttacctgagtgtcattgactggtcccttcatgatgcggaaactgctaaatttaaacaaaaaaaatccttcatttttctaagaaagagaagaaagtcctttgcccaggacctggatagggatatggtcattattgtgtgaagtgcaggactcataaaagcctattaagataatggctctaattcttctaagaaaaataattcgatgggctgttctttttaaacagctccctgaagtctatgtagtttgtaatgcaggcttccaaggcctgagaggagcgcctagtgtatttccccttcggtcccagtgggtgggagtgtcaaagtccagacaggacttgcattctggcatcatctcaggagcccctgagtcccttgccactcgccttgcagactgtggtccagtatgtcaggactggggctcaggaatctgcagggacaggtgcccaggagattctggccctggcgtggggaagcatctatagaggaagttgagcctcagctttgattcaggtcctaacctggggctgtggacagggcactcacctctcagcctcagggtcctcactgcagagctagagtcagacatcccatctgtaggtctgtgaaggctggaggtaaagtgcatgaacaggtggccagcagggtgctgggcacgtggttgatttttgataggtgccacttaaaattcctcctgacagtgccgctggcagctggaggaagtagaagcttggtactttgtgggacactgaccactctgactggactttcctttggcagagtctttggatttgtggcccggaagcagggcagtgccacggataatgtgtgccacctgtttgcagagcatgaccctgagcagcctgccagtgccattgtcaacttcgtatcaaaggtcatgattggttccccaaagaaggtctgagaactcccctccctccctggacccaccgatgcctctcgaagccctggagacagccgttgggtgagggtggggcccccactttttaccaaactagtaaacctgacattccaggcccatgaggggaaagaggatcttccagctctgcaaaaacaagaacaaacaacatcaccgtgaattggcctttcctgaaagtgacttatctgacacatctctgtagccacatgctttttgggtagaagaagctgggcatgggtgcaccccaccccctagggtccccatgggaaagggacatgcaaggaaacagcacagaacacgaggtggtccccatgtccctggcacactagcattccgggggatgaggaatccccagcccttgaggcagaggtgccgagtgactgccatgcttcgcccgtccgcatgggcgcttctgtccagctgcacccgaggccgggggtttccctcacctcggtcttcccaagatggagatgctaacgaaactgagaagggggcgtatgtttgacgaaggtttgtgcaagtcaggcccttctggaacacagcagggcctacaacgaggggcctttgcgatgggctgtgaggatgggggtggtgggaagaattggccacgttagagaccccatgccaccccaccatggtgagtgctctgtgcctcctgctcacctgtggtgagctgggcgagctgggcgagctgggcgagctgggctggggagagcctgtgaggaccgagaggagaaatgagaagaaggaacaaaaatattatttctatgtaatttatattttacttatgccaaattatttatgataatttgccattgctatactgtaccagtgtcaaatgctgcagcctgccaagctgtgattttgtgaggcttgtccctatgtaggatgcaccgcaggcccctggccactgaaagagtgtgcagtggactgtgggtctcccatatgcggtgccgcccaaaggtggctttgcctcaagcaacctaccctgatgttttactcattggaatgtttttccccgattgtggatgacttcttttctgatggagagagtccaggagggatggaaaacgcctggatttaagctcagcatcccccacatgggcttttcgatcatcttcaggcctgaagctgcacgacctgaagttcgcctgcatttatcagccctctttgtgctgctccttgccaccttggggttcctgctggggaccatgtgtggttgtggcatgtgtgagcagaagggaggatgaggaaaaagagaagaaaccccggtactgacaagctgtttttgagtgccactgtttgccatcatctaagccactgaatcaagtgtatttcaggcttatttcaacattccaatgccctggttttcctgcttgaatctgttcgtggtcaaaggtttgggggaatttgtgaccctggaacatccccagagtgaaagatggagctgggccacatcagaataaggccttggccccatcctctcacagcctaggtgctctgcaggcatgctgactgtcctgattgcgatccagcccgaaattccctcctctgctttcaaaagtcaaatcccccattcttaggccacactggtgtcacaagctcctgtcagggagctggggtttgggaatgtgctttgtgaactctgctttaaagtgaggggccgaggaaaacttagaaacaggcagagttggaagcagccaaatcacagtgggtgttgtgtgtgtgtgcgtgtgtgcatgcgtgcgtgtatgcgtgtgtgaaagcaggtggaccattccactttttagctcctattgatgcaccaaaccaagtgcctcatttctgtgccaaatgtttgccttggtcgttgtggacctccttctctaacttgcggtggcatgactgtcaggaggtgctggcattttcagcagatcctcatgtgttgaccctgatgtctttagcagaggcctctagcatctcggtttttcatccactgcaggaatgtggccacagggagcagaggtttgtactttccccaagaggtcctcatcctgagacggtctctacccatgtttaacccaaagagtgcaggccaggttccttatccttctgatgaaggatgagagagctcatttagaagtcagagcaaactagggtctcagtattgagaaacgcagcctgccagggaatcacagagacatcggggtgcccgcgatggccctcatgaagccatgcctcgacggcattcaggaagccctgcaaacgtgctttttgaactcattggccaggtgtgatttttacacaaggtaaacgtggtcaagggcatcggggaatttgctccaagcagatagctccctctgaggaaccaaaggaagcaagtttccacgatttctgaagagctggtataggaagtttctttcttccttttgtgttacatgtgcattaaacagaacaagctgtgtgtcatcacagattgtactgtgggctcagaaaccgtgagagagcccccaccgtggacaccggctctagggccacaggaaaaggaacgtttccaggcattttgtctccagggctcccgctggacaggcacgtactgccctggggagtaaatgcggagagttcacgaactgtgcccaacgcatgttatagccagggtcctactaactactcagtaaaagaacgtattgttgtattcctccagtgttaagctatagccatgttaaaagtcactgtgcatttattctcagcatcaaataccttgtaacgtcttctctgccttgttagtgcatatttttacttttctgatactgtaaagaatatatccagtatgtaaatgaatgttctataaatcttttgtatagtcattttctctgctccttaaatatcatctctattcagagtataataaaattatgaacttggtaagcctccgtgagacggtatttgtgtaccctgaagtatgtttgtgtgtgtttgcacatgtgtgtatgcgtgtgcatgtgtgcacttttgtgtatgtgtctctgcaaatgtgtgcatgtgcttgcacagatgtatctttgtccacatgtgtctgtgcgtctgcgtgtgtgctcgttcatgaatgtgtgtctgtgtgtttacaaatcagtggattcagttataaaatcacaaatgttttgctgtcaggaatatattaagatttctgcccagagacctttgaaatgttatattcaaagatctttgaagattaaccacaatgcagtgttgataatgggtcctgacatgttttcgatgttgctatgaatacccctacacacacactggctgcagaaacacacccctgaagtgggccagctcctgaaggacctcccagtgtctattgaagtgggcactaaaagtgaatattgagactggtggattcacttacacatcaacagatgctggagacagccagtgtcacctgcctcttctgttcccccagccaaggctcctccctccccaccttaagggagtttgcccttttctacggactctgccctcttgggcctgtcccctccctcctgagtcaggtgatgggacacaggaccccatctaacctcactccctcagatccaaaccagaaaagaagcaatgctttgggctcatttggttatggacagataaagatggcagttagctgccaccctgtgcacagttttctgcctgcgtggtcagcccccagagactgtagctttccactctgaggagacacagagatatttcaccccagctatgttgggagagtgaacttgaaatggtcccggtactactgctttggagcagaagagagggcaggtggtggcagattaaatcttgtccaacaggaagctcccattgagtctttgaagccagtcattgcccagacctttgaccaatgtcacaaggtggaaaggtggacagggcattgatttcactgcggcttagggagtgtgcttcccaagaacaccatacttgtcacaattactgggctccgtacagtgtgcacatgtgcctaggtccccgaccagagccagccctggggactgttggagagacccagtggccatgagacctcagctggacaggcccctgccacttgctgcaggaggatgttatgggtcccccattcatctctcagcaatctgttacctaatgagtacctgggccttacctactggggtcgtccttctattaatgtggtgggcaccttggtccgtccacttggggggtcattgatctattgtgtaatgaacactttggatctgcccactggaggacagtaggtctgtagctcagttgggcttctgtgtctcatcctgtccccagggaggtaggttgcctgcctgatggctttggggatcacacttcacagaccaggggcagttgggctggtctcagaggatgaattggagttttccaggtagacttggggcctggactgggaagggacattttatgatgcagggattggtgagatctggacacatttggacagaagggctgttgaactggcaaacaagataagtgggaaaaacacaagtcgcccttaaattcctgaaaaatcagttcacagtgtgaagcctggcctgaggcaacagaacaaataggtcaccaagagcctatcaccaagccagatgaccaggaagaggaaacagcaaaagggactccactgcaatgattgatctggccgagggagcctctctgtcccatctcagagagtccagggttggggggctggagaaaacagcaggatcccccttagccccacctgggaagcacactccatctcccacaggcaggggacccaccagaacacacaccaggccaggaaggtttcatagctgtgtgctggcagcttccctctcccactgagagacaccccttctgtccctcaggtaacgtcagcagggaccccagaggtacctgataaaccaagcagactaacataacgctgaaaggctctgacgattaaactgtcagtgggaccacaggccacaaatcaggccaggccctgctccctaagcagaatcagggcaattacctgctaaaattaaatatttaaataagacccagaattccctaataggtaaaatgggatacaatagaaaattcctttcataccaagtaccaagaaatgtgcagcatgaatgagaaagacaatgaatgccaacgtcaagatgaaccaactgctggagttatctggcaaggatctgaaaacagccatcataaaaatgcttcaagaggcaaatctgttgaagaaatgaaaaaatagaaagccacagtaaagaaatagaagtgatgaagaagaaccaaatggaaattacagggctaaaaggtataataacagaagtgaaggaatcttactagatggattcagtagtagactagtggaaatggcaggatagaatcagtgactgtggcgacaatgtaattcactcaatctgaataacacagagaaaataaactaaaaaaaagaaaaagaacacccacaagaacctgtaggacactaacaaaagatccaacatttgtatcactggtgtgcccaaaggagaagagagaggctatagaatatttgaagattaatggataaaaattccccaaatatagcaaaaagacatgtatacatcaagaagccaagtgaactccaaacaggatcaacaaccacaaccaaaatccatgccaagaaatattgtaattaaacttctgaaaactaaagacaacctgtaggcagccacagagaaatgatggattctgaataggaataggagcacaccaattggaatgacagtggatttttcctatgaaaccataaaggccagaaggaagctatgcaacattttccaaggacagaaagaaaataaaaatcaaccatgcattctatattcagtgaaactctcctttagaaatgaagaggaaataaagatattgtcagatgaaggaaacgaaaagaattagttgctagcaagcctacatttaaagattgacaaaagaagttcaaacacaaaggaaatggtaagagaaagcaccttggagcatccagagggaagaaagaagaatgaaaagagcagagcatgagtcatacaacaaaccctccttctcatcacaagtcatcaatcacatctgatgattggaaaagatattacaccaccgtctgatactcaagacaatgaaaggaaaaagtgagaaatatgaaagaacgtatatggaggtgagacttcaacacaagtagtaaaaggttgataaaaatagtgatgttatgaatatttttgtaataaccagagcaaccactacaaaaactatgcacaaagatacatgcaatagcaattaaaaaatcaagatggaatcttaaaagatgggtcctagcccacaggaagacaagaagatagaaacagaaaaacaaagatgaagcaaaacaaaacaataacatggtagactttagtcttaacgtactaattaccttaaatgtaaatggagcaactatatcaatcaaaagacagagattggcaaagtggggagaaaatggcccaattacatgctgctaacaagaaacttcaaattcggtgacataggtagattgaaaataagaggatataaaaacatagtacataaacatttttaaaaggaggaatcattatattaatgtaataaaatcagtttatttgctctacagttttatttgctctacagttaacaaagtcaactgtagagaaaatgaaattactagagccaatgagtgacattatacgatgataaaaggatcaatccgccagaaatgcataagggtctcaaatgcgtactcatcaaacaacagagccttaatacagaaaatcctcacttaaaataattgataggctcttggaaattgactttcagtgaaatggcctacagcagattctggaaatgatgtttctttcttcatagttccgttttaatgttgatgagaaaaaaagtgttgccttatatgccattttgtgttaagccacagttccaagaacctatggacagcattaagtgaggacttactgtacgtaaagtaaaaactgataaagtcgaaagcagaaatagacaaatccacaattatagttggagaatttaacattctccactcactaactggtagaactatgccatggttttagtatttgtgttcttccatggaatctacatgttgaaacctaatcctaacgtgaaggtactaaaaggtgaggcctttggtaggtgactaagtcataggggtggagcatcatgaatgggattagtgcccttattatagaggcccaagggagcttgtttgcctcctccacagtgtgaggacacagctagaaggtgccatgtgtgaggaatggaccctcaccagacaccaaatatgctagcaccttaatcttggactccccaacctccagaactgaagtttgtttttataagctacccagtttatgatatttttattatagcagcccaaatgcactaagacagaaatttgtaccaaggactagggatattgtataataaatatctaaaaatgtggaagtggctttggaattgggtaatgtgtagaggctggaggggttttaaggtacatgctaaaaaaagcctacattgctgttaatggtaaacaggattcagctgggagcacagaaggaaaggagagccatagagaaagtctcactcttcttagataatacctaagtggtcatgagcatgatgttagtagaaatatggacggtaagggccattctgatgaggtttcagatggaaatgaggaacacgtattggaaactgaaggaaacaagtggcaaagaacttggctgaattgtgtccatgccctaatgttttgaggaaggtagaacttgtgagtgatgtgagtgatgaagctgggatatttagctgaggaaatatctaagcaagatgttgaaggagtagcgtggcttctcttgactacttatagtaaaatgtgagaagagaaaatgatttaaaggcaaaatttataatgaaaagagaagcagagcttaaagatttggaacattcttagtctggcagtatggcattaatacaaaatgagatcgcatgttcagtagtgaacgtcaagggtgtgaccaaatgaccatttgattaggagattagtatgggtcagtagaaaccaggctaccccccagatgacatataggtagctaaccttggtggcatcagcatgacaccatttccacaggtgcacagagtacatgagctatggatgtgcagctgcctccacctagatttcaaaagatgaccagagaatctaggggcccaggcagataactgccacagaggtagagccactgcagagagcctcggctagggcaatgcctagtggagccataggagcaggggctctagtgatgttagacaggtgcagccgccggctgcaactctagcctgggagagcctcaggcatgcggctgcaacccataagagctgccatgtaagctgtgtccagcaaagccatgtgggcaaggctgcttgaggtcttggcagtccaacgcctggcccagtgtgtccagaaggtggacatcaagtcaaacaggattattctcaagccttaagattaagtgctgtttaccctgttgggtcttgaacttacttaggacatgttattcctttctttcctatctcttcccttcagaatgggaaggtctatcctatgcctgttccatcattgcattttggaagcacataacttgtttgtttcacagttcacaggtggacagcaatgtgcctcaggataaaatataccttggagtctcacccttatctgatttggataatatttatagatgagactctggactttagactttgtagttgatgctggaacaagttaagacttttggagaaattgaaatgaaatgaatgtattttgcatgtgaggaggatattaatttgggggggccagagttggaatgccatggttggaatgtttgtgtctctttaaagtttatgtgttgaaacctaatactcaatgcgatggcattgaaagatagggcctttgggaggtaattgggtcatgagggcagagactttatgactgggattagtggccttataaaagaggcccaagggaacttgtttgcctcttccactatgtgaagacacagctagaaggagccatctatgaggaatgggccctcaccagacactaaatctgctgacatcttgatcttggccttctcacccgccacaactgtgagaaaaaatgtttgcattttataattctataatattcttgttatagcagcccaaacagactaagacaaatgactagacaacaagtcagaaaggatgcagaagaactgaacaacacaagcaaccaacagaatctaattggtatgtagaatgctccacagaatagtagaattatgcattttttaagcactcatggaatactcaccaagatagatcatgttctcagccacgaaaaaaatctcaacaaattttaaaaaatggatatcatccagagcatgttctctgatcataatggaataaaagttaaatttaataataataagattaacaatttctcattacttagaaattaaacaacactcttctaaataacccatcaaagaagtctcaaaaataatttttttaaaacatagaacagaatgaattctgtagaaaataaaacatatcacaatccatgggatgcagctaatgtagtgctgagagggaaatttatagcactaaatgcttacactagaaatgaggaaaggtctcaaatcagtaacagatgtggcttgggttgggttggagcagtgagtttcagcatctctccctgccttctgcagcctgattgactcagcccatagtactagaagcactgtgatcttttggtgttgcatggtgcctcaggcagacctattcttaagtacatgtaaggcacctcttgaggaggccctgagatacctggggcccactttaaaaggactgagttgagacctggtggtctaggtgttatcagtggctacactcaacaacacggatgaaacttagacataaccacaggccaaaaaagccagacctgtcatagagtacttattatcaaatttcatttatatggatatcacaatcagacaaaactaacctgtggcagtagagggcaggatggcagttcttggggaggaaagagacagtgctgtttgggagggaatattagaggggcttttgaggcactgatgctgttctgttttttttttttttttttttttttcatttgggtgtattcactgtgaaaattaatggagctttttccttattatttgtgtactttcctctatgtctaacttccaagtttattattattttataagttaacgtggcttcatttttttcccctaaaggctgatgaagttgcaggcattcagttttcactgggaatgtcctccagacggatgtgtaagaaggccagggtcaggcttcaggagcacctaggcaggttcacacttgacacctgtcactcgtcactcacccgccagcccactgcctggtcaacgtaaggctgtctccttgcggagactggctcagcactgaagtaatggagctgtctttctgtctgtctggcttgtggtttagagcaggaaagatggaggtgaggaaaatgtcaatcaaactgtctcttttgcaaagaacagagcaagccctgccacgtgcttgggtcagagtagaatgaatatggagaagtgcctcctccttggggagattctgcatggtttcccaggccgtatcgactctcctggattcctgtgccacattcagccgattaggacagcacagcagacattggttgagtgcctactgcttgcagaacgcaatgtctgcacttcccatgttagctatggtttatgtattcaagcttccctctactgaagaaagcccaaggaatgtccaacccaggaacaaaccagagtggtcatgggtcaaagcatccttcctgccatctgggccaagatataggactcaaagcttaagtcacgtgaaccaccctgtgtgtcatgagttgataagtctataaacagcctcgccctggcgccatgaggggtggcttatgattaacttgttagagctgcaatggcagctccacactgaagggctcaagaagagtgaggtgaccttagctgcctggaaatgagctgttgaaggcggctgaggttctccctgacaggaggggccctgctgacgggacgtttcttctccaggggtcacatagcagctggcccatccccattttacagatcatgaaggtcagggtcagaaaagtttagtgatttggctatggtcgggagacaggcaaagaaaaatatgaagaattttttcttctatggtcccctttaccccctgcttttctctttgctttaatttctttgtatagaggcatccagccaactagcacagaatgttgcgaaaacttggcccacgggattccagagcctgtgtcctctgctatggcacggagaggacttctgtgcacacacgtccccagtgagccatttcccctgagtggttccctctttctgccctttgccctgcattttcacagaaaggtttgagctcaatttacaacctcagtgggccagggactgtagtgaatgaagggagtgactgagagcattgtggggcagtcctgccccctggtgggcagcgtcacttactacagaaggccgtattttaaaactttatttgcaaagatgagggctgcatatgttagtggctaggttcaaaatggaaagctagtgaaatggaaaatttagtggttagaaatgtggatgctggagccacgttgcctggcttcaaatcttggctctgccttgtatacactctagtacaatgacaagttatttagcttctcccatttgtcaaatgggaaaagcaatcaggcttacatgccaagattgtggtgagaatcagatgagttagtacacattaagtgattcagatgttgcctggcaaggaatcttcactaaataatatctagatagagttacctttaaaaattattgaataggattttctgtaatccccatgaagtcatttgacaggatttgtggatgttcagcatctcaaactgtgaaacattgagacccatttcccatatgactagtttatcctctgtaatagtgatcacacaggacaggggttggtaagcttttcaaagggtcaaggtgaactcctcgtactgctggggccgaggctgcccccatcttcacgtgactgatgcattggtctgggggtctcccgtctcagtgcacataacagctcacatcatcactatggtaagttccttcaggcaggacagtgcagacccttctccctttcctactatgcaacttcctcacccccctttgtgctccccacccacatttcagccatctttaccatctgtctataactataaagaaataccaggagataaaacaaaagaaatttcctttatgaggtgatgaaaatcttctaaaattgattgcagtgatggtggatatactaaaaaccattgaatcgtacacttcaaatatgtgaattgcacagtatgtgcattatgtctcaataaagctattataaaagaatctaaaaggagactaaagacaaactcaagaggcctcagtgtatgggccatcatccttagatctctgcacacagattgctgggggaacaatggccttacagtgccaaagtggctatggtcttgagacatgtcattttcgagacctagacttgggaatcaacgtgaaaataaacttcattggctaggcgcggtggctcacgattgtaatcccagcactttgggaggccgaggctggggtatcacctgaggtctggagtttgagaccagcctggccaacgtggtgaaaccccatctctattaaaaatacacacacacaaaaaaatcagccagagtggtggcaagtgcc

SEQ ID NO: 2661 - DNA, 1818 bp, Homo sapiens
tgggtgggggacgccaccgctgggacagggactcgggactctgctcaccacgtagggctgctggggacacagcccaaggagttccctctgtctggcccacatcctcccaggcccttccatggactgaccagggtcctgggtgccagaaccacgaagctgccctgagacgctcactcacgctgtggggatgtcagagagccccatcggacccaaatccacgatgctccgggctgatgcgtcctcgacgccctcctttcagcaggcttttgcttcttcctgcaccatttccagcaacggccctgggcagaggagagagagctcctcttctgcagaacgccagtgggtggagagcagccccaagcccatggtttccctgctggggagcggccggcccaccggaagtcccctcagcgctgagttctccggtaccaggaaggactccccagtgctgtcctgcttcccgccgtcagagctccaggctcctttccacagccatgagctgtccctagcagagccaccggactccctggcgcctcccagcagccaggccttcctgggcttcggcaccgccccagtgggaagtggccttccgcccgaggaggacctgggggccttgctggccaattctcatggagcgtcaccgacccccagcatcccgctgacagcgacaggggctgccgacaatggcttcctgtcccacaactttctcacggtggcgcctggacacagcagccaccacagtccaggcctgcagggccagggtgtgaccctgcccgggcagccacccctccctgagaagaagcgggcctcggagggggatcgttctttgggctcagtctctccctcctccagtggcttctccagcccgcacagcgggagcaccatcagtatccccttcccaaatgtccttcccgacttttccaaggcttcagaagcggcctcacctctgccagatagtccaggtgataaacttgtgatcgtgaaatttgttcaagacacttccaagttctggtacaaggcggatatttcaagagaacaagccatcgccatgttgaaggacaaggagccgggctcattcattgttcgagacagccattccttccgaggggcctatggcctggccatgaaggtggccacgcccccaccttcagtcctgcagctgaacaagaaagctggagatttggccaatgaactcgtccggcactttttgatcgagtgtaccccgaagggagtgcggttgaaagggtgctcgaatgaaccatatttcgggagcctgacggccttggtgtgccagcattccatcacgcccttggccttgccgtgcaagctgcttatcccagagagagatccattggaggaaatagcagaaagttctccccagacggcagccaattcagcagctgagctgttgaagcagggggcagcctgcaacgtgtggtacttgaactctgtggagatggagtccctcaccggccaccaggcgatccagaaggccctgagcatcaccctggtccaggagcctccacctgtgtccacagttgtgcacttcaaggtgtcagcccagggcatcaccctgacagacaatcagaggaagtgagtgcctagagggaggcaggagccgtccagcaggggcggggctgtcacgttcctcttgttcttccctagtgtgagtagtcatccaggtaaatcattagccgtctttgaggtcatgagtcacccagggtctgtctaggcatttttctgtcattaaatacgtcctgggaaccacataggaactcttagcatttgtttgcaaggctatttttcttagaaatcagt

SEQ ID NO: 2662 - protein, 465 aa, Homo sapiens
MSESPIGPKSTMLRADASSTPSFQQAFASSCTISSNGPGQRRESSSSAERQWVESSPKPMVSLLGSGRPTGSPLSAEFSGTRKDSPVLSCFPPSELQAPFHSHELSLAEPPDSLAPPSSQAFLGFGTAPVGSGLPPEEDLGALLANSHGDTPSIPLTATGAADNGFLSHNFLTVAPGHSSHHSPGLQGQGVTLPGQPPLPEKKRASEGDRSLGSVSPSSSGFSSPHSGSTISIPFPNVLPDFSKASEADLPDSPGDKLVIVKFVQDTSKFWYKADISREQAIAMLKDKEPGSFIVRDSHSFRGAYGLAMKVATPPPSVLQLNKKAGDLANELVRHFLIECTPKGVRLKGCSNEPYFGSLTALVCQHSITPLALPCKLLIPERDPLEEIAESSPQTAANSAAELLKQGAACNVWYLNSVEMESLTGHQAIQKALSITLVQEPPPVSTVVHFKVSAQGITLTDNQRK

SEQ ID NO: 2663 - DNA, 6621 bp, Homo sapiens
gcccagaaaaccccagcaggatctgcatcgtcatcgagccggcccagcttctgaagggagatgtcatggtgaaatgctaccacaagaaataccgctcggccacccgtgacgtcattttccgcctgcagtttcacactggggctgtgcagggctacgggctggtgtttgggaaggaggatctggacaatgccagcaaagatgaccgttttcctgactatgggaaggttgaattagtcttctctgccacgcctgagaagattcaagggtccgaacacttgtacaacgaccacggtgtgattgtggactacaacacaacagacccactgatacgctgggactcgtacgagaacctcagtgcagatggagaagtgctacacacgcagggccctgtcgatggcagcctttacgcgaaggtgaggaagaaaagctcctcggatcctggcatcccaggtggcccccaggcaatcccggccaccaacagcccagaccacagtgaccacaccttgtctgtcagcagtgactccggccactctacagcctctgccaggacggataagacggaagagcgcctggccccaggaaccaggaggggcctgagtgcccaggagaaggctgagttggaccagctgctcagtggctttggcctggaagatcctggaagctccctcaaggaaatgactgatgctcgaagcaagtacagtgggacccgccacgtggtgccagcccaggttcacgtgaatggagacgctgctctgaaggatcgggagacagacattctggatgacgagatgccccaccacgacctgcacagtgtggacagccttgggaccctgtcctcctcggaagggcctcagtcggcccacctgggtcccttcacctgccacaagagcagccagaactcactcctatctgacggttttggcagcaacgttggtgaagatccgcagggcaccctcgttccggacctgggccttggcatggacggcccctatgagcgggagcggacttttgggagtcgagagcccaagcagccccagcccctgctgagaaagccctcagtgtccgcccagatgcaggcctatgggcagagcagctactccacacagacctgggtgcgccagcagcagatggttgtagctcaccagtatagcttcgccccagatggggaggcccggctggtgagccgctgccctgcagacaatcctggcctcgtccaggcccagcccagagtgccactcacccccacccgagggaccagcagtagggtggctgtccagaggggtgtaggcagtgggccacatccccctgacacacagcagccctctcccagcaaagcgttcaaacccaggtttccaggagaccaggttgtgaatggagccggcccagagctgagcacaggcccctccccaggctcgcccaccctggacatcgaccagtccatcgagcagctcaacaggctgatcctggagctggatcccaccttcgagcccatccctacccacatgaacgccctcggtagccaggccaatggctctgtgtctccagacagcgtgggaggtgggctccgggcaagcagcaggctgcctgacacaggagagggccccagcagggccaccgggcggcaaggctcctctgctgaacagcccctgggcgggagactcaggaagctgagcctggggcagtacgacaacgatgctggggggcagctgcccttctccaaatgtgcatggggaaaggctggtgtggactatgccccaaacctgccgccattcccctcaccagcggacgtcaaagagacgatgacccctggctatccccaggacctcgatattatcgatggcagaattttaagtagcaaggagtccatgtgttcaactccagcatttcctgtgtctccagagacaccgtatgtgaaaacagcgctgcgccatcctccgttcagcccacctgagcccccgctgagcagcccagccagtcagcacaaaggaggacgtgaaccacgaagctgccctgagacgctcactcacgctgtggggatgtcagagagccccatcggacccaaatccacgatgctccgggctgatgcgtcctcgacgccctcctttcagcaggcttttgcttcttcctgcaccatttccagcaacggccctgggcagaggagagagagctcctcttctgcagaacgccagtgggtggagagcagccccaagcccatggtttccctgctggggagcggccggcccaccggaagtcccctcagcgctgagttctccggtaccaggaaggactccccagtgctgtcctgcttcccgccgtcagagctccaggctcctttccacagccatgagctgtccctagcagagccaccggactccctggcgcctcccagcagccaggccttcctgggcttcggcaccgccccagtgggaagtggccttccgcccgaggaggacctgggggccttgctggccaattctcatggagcgtcaccgacccccagcatcccgctgacagcgacaggggctgccgacaatggcttcctgtcccacaactttctcacggtggcgcctggacacagcagccaccacagtccaggcctgcagggccagggtgtgaccctgcccgggcagccacccctccctgagaagaagcgggcctcggagggggatcgttctttgggctcagtctctccctcctccagtggcttctccagcccgcacagcgggagcaccatcagtatccccttcccaaatgtccttcccgacttttccaaggcttcagaagcggcctcacctctgccagatagtccaggtgataaacttgtgatcgtgaaatttgttcaagacacttccaagttctggtacaaggcggatatttcaagagaacaagccatcgccatgttgaaggacaaggagccgggctcattcattgttcgagacagccattccttccgaggggcctatggcctggccatgaaggtggccacgcccccaccttcagtcctgcagctgaacaagaaagctggagatttggccaatgaactcgtccggcactttttgatcgagtgtaccccgaagggagtgcggttgaaagggtgctcgaatgaaccatatttcgggagcctgacggccttggtgtgccagcattccatcacgcccttggccttgccgtgcaagctgcttatcccagagagagatccattggaggaaatagcagaaagttctccccagacggcagccaattcagcagctgagctgttgaagcagggggcagcctgcaacgtgtggtacttgaactctgtggagatggagtccctcaccggccaccaggcgatccagaaggccctgagcatcaccctggtccaggagcctccacctgtgtccacagttgtgcacttcaaggtgtcagcccagggcatcaccctgacagacaatcagaggaagctcttcttccggaggcattaccccgtgaacagtgtgattttctgtgccttggacccacaagacaggaagtggatcaaagatggcccttcctcaaaagtctttggatttgtggcccggaagcagggcagtgccacggataatgtgtgccacctgtttgcagagcatgaccctgagcagcctgccagtgccattgtcaacttcgtatcaaaggtcatgattggttccccaaagaaggtctgagaactcccctccctccctggacccaccgatgcctctcgaagccctggagacagccgttgggtgagggtggggcccccactttttaccaaactagtaaacctgacattccaggcccatgaggggaaagaggatcttccagctctgcaaaaacaagaacaaacaacatcaccgtgaattggcctttcctgaaagtgacttatctgacacatctctgtagccacatgctttttgggtagaagaagctgggcatgggtgcaccccaccccctagggtccccatgggaaagggacatgcaaggaaacagcacagaacacgaggtggtccccatgtccctggcacactagcattccgggggatgaggaatccccagcccttgaggcagaggtgccgagtgactgccatgcttcgcccgtccgcatgggcgcttctgtccagctgcacccgaggccgggggtttccctcacctcggtcttcccaagatggagatgctaacgaaactgagaagggggcgtatgtttgacgaaggtttgtgcaagtcaggcccttctggaacacagcagggcctacaacgaggggcctttgcgatgggctgtgaggatgggggtggtgggaagaattggccacgttagagaccccatgccaccccaccatggtgagtgctctgtgcctcctgctcacctgtggtgagctgggcgagctgggcgagctgggcgagctgggctggggagagcctgtgaggaccgagaggagaaatgagaagaaggaacaaaaatattatttctatgtaatttatattttacttatgccaaattatttatgataatttgccattgctatactgtaccagtgtcaaatgctgcagcctgccaagctgtgattttgtgaggcttgtccctatgtaggatgcaccgcaggcccctggccactgaaagagtgtgcagtggactgtgggtctcccatatgcggtgccgcccaaaggtggctttgcctcaagcaacctaccctgatgttttactcattggaatgtttttccccgattgtggatgacttcttttctgatggagagagtccaggagggatggaaaacgcctggatttaagctcagcatcccccacatgggcttttcgatcatcttcaggcctgaagctgcacgacctgaagttcgcctgcatttatcagccctctttgtgctgctccttgccaccttggggttcctgctggggaccatgtgtggttgtggcatgtgtgagcagaagggaggatgaggaaaaagagaagaaaccccggtactgacaagctgtttttgagtgccactgtttgccatcatctaagccactgaatcaagtgtatttcaggcttatttcaacattccaatgccctggttttcctgcttgaatctgttcgtggtcaaaggtttgggggaatttgtgaccctggaacatccccagagtgaaagatggagctgggccacatcagaataaggccttggccccatcctctcacagcctaggtgctctgcaggcatgctgactgtcctgattgcgatccagcccgaaattccctcctctgctttcaaaagtcaaatcccccattcttaggccacactggtgtcacaagctcctgtcagggagctggggtttgggaatgtgctttgtgaactctgctttaaagtgaggggccgaggaaaacttagaaacaggcagagttggaagcagccaaatcacagtgggtgttgtgtgtgtgtgcgtgtgtgcatgcgtgcgtgtatgcgtgtgtgaaagcaggtggaccattccactttttagctcctattgatgcaccaaaccaagtgcctcatttctgtgccaaatgtttgccttggtcgttgtggacctccttctctaacttgcggtggcatgactgtcaggaggtgctggcattttcagcagatcctcatgtgttgaccctgatgtctttagcagaggcctctagcatctcggtttttcatccactgcaggaatgtggccacagggagcagaggtttgtactttccccaagaggtcctcatcctgagacggtctctacccatgtttaacccaaagagtgcaggccaggttccttatccttctgatgaaggatgagagagctcatttagaagtcagagcaaactagggtctcagtattgagaaacgcagcctgccagggaatcacagagacatcggggtgcccgcgatggccctcatgaagccatgcctcgacggcattcaggaagccctgcaaacgtgctttttgaactcattggccaggtgtgatttttacacaaggtaaacgtggtcaagggcatcggggaatttgctccaagcagatagctccctctgaggaaccaaaggaagcaagtttccacgatttctgaagagctggtataggaagtttctttcttccttttgtgttacatgtgcattaaacagaacaagctgtgtgtcatcacagattgtactgtgggctcagaaaccgtgagagagcccccaccgtggacaccggctctagggccacaggaaaaggaacgtttccaggcattttgtctccagggctcccgctggacaggcacgtactgccctggggagtaaatgcggagagttcacgaactgtgcccaacgcatgttatagccagggtcctactaactactcagtaaaagaacgtattgttgtattcctccagtgttaagctatagccatgttaaaagtcactgtgcatttattctcagcatcaaataccttgtaacgtcttctctgccttgttagtgcatatttttacttttctgatactgtaaagaatatatccagtatgtaaatgaatgttctataaatcttttgtatagtcattttctctgctccttaaatatcatctctattcagagtataataaaattatgaacttggtaagcctccgtgagacggt

SEQ ID NO: 2664 - protein, 1199 aa, Homo sapiens
MVKCYHKKYRSATRDVIFRLQFHTGAVQGYGLVFGKEDLDNASKDDRFPDYGKVELVFSATPEKIQGSEHLYNDHGVIVDYNTTDPLIRWDSYENLSADGEVLHTQGPVDGSLYAKVRKKSSSDPGIPGGPQAIPATNSPDHSDHTLSVSSDSGHSTASARTDKTEERLAPGTRRGLSAQEKAELDQLLSGFGLEDPGSSLKEMTDARSKYSGTRHVVPAQVHVNGDAALKDRETDILDDEMPHHDLHSVDSLGTLSSSEGPQSAHLGPFTCHKSSQNSLLSDGFGSNVGEDPQGTLVPDLGLGMDGPYERERTFGSREPKQPQPLLRKPSVSAQMQAYGQSSYSTQTWVRQQQMVVAHQYSFAPDGEARLVSRCPADNPGLVQAQPRVPLTPTRGTSSRVAVQRGVGSGPHPPDTQQPSPSKAFKPRFPGDQVVNGAGPELSTGPSPGSPTLDIDQSIEQLNRLILDPTFEPIPTHMNALGSQANGSVSPDSVGGGLRASSRLPDTGEGPSRATGRQGSSAEQPLGGRLRKLSLGQYDNDAGGQLPFSKCAWGKAGVDYAPNLPPFPSPADVKETMTPGYPQDLDIIDGRILSSKESMCSTPAFPVSPETPYVKTALRHPPFSPPEPPLSSPASQHKGGREPRSCPETLTHAVGMSESPIGPKSTMLRADASSTPSFQQAFASSCTISSNGPGQRRESSSSAERQWVESSPKPMVSLLGSGRPTGSPLSAEFSGTRKDSPVLSCFPPSELQAPFHSHELSLAEPPDSLAPPSSQAFLGFGTAPVGSGLPPEEDLGALLANSHGDTPSIPLTATGAADNGFLSHNFLTVAPGHSSHHSPGLQGQGVTLPGQPPLPEKKRASEGDRSLGSVSPSSSGFSSPHSGSTISIPFPNVLPDFSKASEADLPDSPGDKLVIVKFVQDTSKFWYKADISREQAIAMLKDKEPGSFIVRDSHSFRGAYGLAMKVATPPPSVLQLNKKAGDLANELVRHFLIECTPKGVRLKGCSNEPYFGSLTALVCQHSITPLALPCKLLIPERDPLEEIAESSPQTAANSAAELLKQGAACNVWYLNSVEMESLTGHQAIQKALSITLVQEPPPVSTVVHFKVSAQGITLTDNQRKLFFRRHYPVNSVIFCALDPQDRKWIKDGPSSKVFGFVARKQGSATDNVCHLFAEHDPEQPASAIVNFVSKVMIGSPKKV

SEQ ID NO: 2665 - DNA, 6629 bp, Homo sapiens
caacgttggcccagaaaaccccagcaggatctgcatcgtcatcgagccggcccagcttctgaagggagatgtcatggtgaaatgctaccacaagaaataccgctcggccacccgtgacgtcattttccgcctgcagtttcacactggggctgtgcagggctacgggctggtgtttgggaaggaggatctggacaatgccagcaaagatgaccgttttcctgactatgggaaggttgaattagtcttctctgccacgcctgagaagattcaagggtccgaacacttgtacaacgaccacggtgtgattgtggactacaacacaacagacccactgatacgctgggactcgtacgagaacctcagtgcagatggagaagtgctacacacgcagggccctgtcgatggcagcctttacgcgaaggtgaggaagaaaagctcctcggatcctggcatcccaggtggcccccaggcaatcccggccaccaacagcccagaccacagtgaccacaccttgtctgtcagcagtgactccggccactctacagcctctgccaggacggataagacggaagagcgcctggccccaggaaccaggaggggcctgagtgcccaggagaaggctgagttggaccagctgctcagtggctttggcctggaagatcctggaagctccctcaaggaaatgactgatgctcgaagcaagtacagtgggacccgccacgtggtgccagcccaggttcacgtgaatggagacgctgctctgaaggatcgggagacagacattctggatgacgagatgccccaccacgacctgcacagtgtggacagccttgggaccctgtcctcctcggaagggcctcagtcggcccacctgggtcccttcacctgccacaagagcagccagaactcactcctatctgacggttttggcagcaacgttggtgaagatccgcagggcaccctcgttccggacctgggccttggcatggacggcccctatgagcgggagcggacttttgggagtcgagagcccaagcagccccagcccctgctgagaaagccctcagtgtccgcccagatgcaggcctatgggcagagcagctactccacacagacctgggtgcgccagcagcagatggttgtagctcaccagtatagcttcgccccagatggggaggcccggctggtgagccgctgccctgcagacaatcctggcctcgtccaggcccagcccagagtgccactcacccccacccgagggaccagcagtagggtggctgtccagaggggtgtaggcagtgggccacatccccctgacacacagcagccctctcccagcaaagcgttcaaacccaggtttccaggagaccaggttgtgaatggagccggcccagagctgagcacaggcccctccccaggctcgcccaccctggacatcgaccagtccatcgagcagctcaacaggctgatcctggagctggatcccaccttcgagcccatccctacccacatgaacgccctcggtagccaggccaatggctctgtgtctccagacagcgtgggaggtgggctccgggcaagcagcaggctgcctgacacaggagagggccccagcagggccaccgggcggcaaggctcctctgctgaacagcccctgggcgggagactcaggaagctgagcctggggcagtacgacaacgatgctggggggcagctgcccttctccaaatgtgcatggggaaaggctggtgtggactatgccccaaacctgccgccattcccctcaccagcggacgtcaaagagacgatgacccctggctatccccaggacctcgatattatcgatggcagaattttaagtagcaaggagtccatgtgttcaactccagcatttcctgtgtctccagagacaccgtatgtgaaaacagcgctgcgccatcctccgttcagcccacctgagcccccgctgagcagcccagccagtcagcacaaaggaggacgtgaaccacgaagctgccctgagacgctcactcacgctgtggggatgtcagagagccccatcggacccaaatccacgatgctccgggctgatgcgtcctcgacgccctcctttcagcaggcttttgcttcttcctgcaccatttccagcaacggccctgggcagaggagagagagctcctcttctgcagaacgccagtgggtggagagcagccccaagcccatggtttccctgctggggagcggccggcccaccggaagtcccctcagcgctgagttctccggtaccaggaaggactccccagtgctgtcctgcttcccgccgtcagagctccaggctcctttccacagccatgagctgtccctagcagagccaccggactccctggcgcctcccagcagccaggccttcctgggcttcggcaccgccccagtgggaagtggccttccgcccgaggaggacctgggggccttgctggccaattctcatggagcgtcaccgacccccagcatcccgctgacagcgacaggggctgccgacaatggcttcctgtcccacaactttctcacggtggcgcctggacacagcagccaccacagtccaggcctgcagggccagggtgtgaccctgcccgggcagccacccctccctgagaagaagcgggcctcggagggggatcgttctttgggctcagtctctccctcctccagtggcttctccagcccgcacagcgggagcaccatcagtatccccttcccaaatgtccttcccgacttttccaaggcttcagaagcggcctcacctctgccagatagtccaggtgataaacttgtgatcgtgaaatttgttcaagacacttccaagttctggtacaaggcggatatttcaagagaacaagccatcgccatgttgaaggacaaggagccgggctcattcattgttcgagacagccattccttccgaggggcctatggcctggccatgaaggtggccacgcccccaccttcagtcctgcagctgaacaagaaagctggagatttggccaatgaactcgtccggcactttttgatcgagtgtaccccgaagggagtgcggttgaaagggtgctcgaatgaaccatatttcgggagcctgacggccttggtgtgccagcattccatcacgcccttggccttgccgtgcaagctgcttatcccagagagagatccattggaggaaatagcagaaagttctccccagacggcagccaattcagcagctgagctgttgaagcagggggcagcctgcaacgtgtggtacttgaactctgtggagatggagtccctcaccggccaccaggcgatccagaaggccctgagcatcaccctggtccaggagcctccacctgtgtccacagttgtgcacttcaaggtgtcagcccagggcatcaccctgacagacaatcagaggaagctcttcttccggaggcattaccccgtgaacagtgtgattttctgtgccttggacccacaagacaggaagtggatcaaagatggcccttcctcaaaagtctttggatttgtggcccggaagcagggcagtgccacggataatgtgtgccacctgtttgcagagcatgaccctgagcagcctgccagtgccattgtcaacttcgtatcaaaggtcatgattggttccccaaagaaggtctgagaactcccctccctccctggacccaccgatgcctctcgaagccctggagacagccgttgggtgagggtggggcccccactttttaccaaactagtaaacctgacattccaggcccatgaggggaaagaggatcttccagctctgcaaaaacaagaacaaacaacatcaccgtgaattggcctttcctgaaagtgacttatctgacacatctctgtagccacatgctttttgggtagaagaagctgggcatgggtgcaccccaccccctagggtccccatgggaaagggacatgcaaggaaacagcacagaacacgaggtggtccccatgtccctggcacactagcattccgggggatgaggaatccccagcccttgaggcagaggtgccgagtgactgccatgcttcgcccgtccgcatgggcgcttctgtccagctgcacccgaggccgggggtttccctcacctcggtcttcccaagatggagatgctaacgaaactgagaagggggcgtatgtttgacgaaggtttgtgcaagtcaggcccttctggaacacagcagggcctacaacgaggggcctttgcgatgggctgtgaggatgggggtggtgggaagaattggccacgttagagaccccatgccaccccaccatggtgagtgctctgtgcctcctgctcacctgtggtgagctgggcgagctgggcgagctgggcgagctgggctggggagagcctgtgaggaccgagaggagaaatgagaagaaggaacaaaaatattatttctatgtaatttatattttacttatgccaaattatttatgataatttgccattgctatactgtaccagtgtcaaatgctgcagcctgccaagctgtgattttgtgaggcttgtccctatgtaggatgcaccgcaggcccctggccactgaaagagtgtgcagtggactgtgggtctcccatatgcggtgccgcccaaaggtggctttgcctcaagcaacctaccctgatgttttactcattggaatgtttttccccgattgtggatgacttcttttctgatggagagagtccaggagggatggaaaacgcctggatttaagctcagcatcccccacatgggcttttcgatcatcttcaggcctgaagctgcacgacctgaagttcgcctgcatttatcagccctctttgtgctgctccttgccaccttggggttcctgctggggaccatgtgtggttgtggcatgtgtgagcagaagggaggatgaggaaaaagagaagaaaccccggtactgacaagctgtttttgagtgccactgtttgccatcatctaagccactgaatcaagtgtatttcaggcttatttcaacattccaatgccctggttttcctgcttgaatctgttcgtggtcaaaggtttgggggaatttgtgaccctggaacatccccagagtgaaagatggagctgggccacatcagaataaggccttggccccatcctctcacagcctaggtgctctgcaggcatgctgactgtcctgattgcgatccagcccgaaattccctcctctgctttcaaaagtcaaatcccccattcttaggccacactggtgtcacaagctcctgtcagggagctggggtttgggaatgtgctttgtgaactctgctttaaagtgaggggccgaggaaaacttagaaacaggcagagttggaagcagccaaatcacagtgggtgttgtgtgtgtgtgcgtgtgtgcatgcgtgcgtgtatgcgtgtgtgaaagcaggtggaccattccactttttagctcctattgatgcaccaaaccaagtgcctcatttctgtgccaaatgtttgccttggtcgttgtggacctccttctctaacttgcggtggcatgactgtcaggaggtgctggcattttcagcagatcctcatgtgttgaccctgatgtctttagcagaggcctctagcatctcggtttttcatccactgcaggaatgtggccacagggagcagaggtttgtactttccccaagaggtcctcatcctgagacggtctctacccatgtttaacccaaagagtgcaggccaggttccttatccttctgatgaaggatgagagagctcatttagaagtcagagcaaactagggtctcagtattgagaaacgcagcctgccagggaatcacagagacatcggggtgcccgcgatggccctcatgaagccatgcctcgacggcattcaggaagccctgcaaacgtgctttttgaactcattggccaggtgtgatttttacacaaggtaaacgtggtcaagggcatcggggaatttgctccaagcagatagctccctctgaggaaccaaaggaagcaagtttccacgatttctgaagagctggtataggaagtttctttcttccttttgtgttacatgtgcattaaacagaacaagctgtgtgtcatcacagattgtactgtgggctcagaaaccgtgagagagcccccaccgtggacaccggctctagggccacaggaaaaggaacgtttccaggcattttgtctccagggctcccgctggacaggcacgtactgccctggggagtaaatgcggagagttcacgaactgtgcccaacgcatgttatagccagggtcctactaactactcagtaaaagaacgtattgttgtattcctccagtgttaagctatagccatgttaaaagtcactgtgcatttattctcagcatcaaataccttgtaacgtcttctctgccttgttagtgcatatttttacttttctgatactgtaaagaatatatccagtatgtaaatgaatgttctataaatcttttgtatagtcattttctctgctccttaaatatcatctctattcagagtataataaaattatgaacttggtaagcctccgtgagacggt

SEQ ID NO: 2666 - protein, 1199 aa, Homo sapiens; identical to SEQ ID NO: 2664

SEQ ID NO: 2667 - DNA, 4662 bp, Homo sapiens
cagtccttccagcttgagcactgcactcgactcatgaaccacgaagctgccctgagacgctcactcacgctgtggggatgtcagagagccccatcggacccaaatccacgatgctccgggctgatgcgtcctcgacgccctcctttcagcaggcttttgcttcttcctgcaccatttccagcaacggccctgggcagaggagagagagctcctcttctgcagaacgccagtgggtggagagcagccccaagcccatggtttccctgctggggagcggccggcccaccggaagtcccctcagcgctgagttctccggtaccaggaaggactccccagtgctgtcctgcttcccgccgtcagagctccaggctcctttccacagccatgagctgtccctagcagagccaccggactccctggcgcctcccagcagccaggccttcctgggcttcggcaccgccccagtgggaagtggccttccgcccgaggaggacctgggggccttgctggccaattctcatggagcgtcaccgacccccagcatcccgctgacagcgacaggggctgccgacaatggcttcctgtcccacaactttctcacggtggcgcctggacacagcagccaccacagtccaggcctgcagggccagggtgtgaccctgcccgggcagccacccctccctgagaagaagcgggcctcggagggggatcgttctttgggctcagtctctccctcctccagtggcttctccagcccgcacagcgggagcaccatcagtatccccttcccaaatgtccttcccgacttttccaaggcttcagaagcggcctcacctctgccagatagtccaggtgataaacttgtgatcgtgaaatttgttcaagacacttccaagttctggtacaaggcggatatttcaagagaacaagccatcgccatgttgaaggacaaggagccgggctcattcattgttcgagacagccattccttccgaggggcctatggcctggccatgaaggtggccacgcccccaccttcagtcctgcagctgaacaagaaagctggagatttggccaatgaactcgtccggcactttttgatcgagtgtaccccgaagggagtgcggttgaaagggtgctcgaatgaaccatatttcgggagcctgacggccttggtgtgccagcattccatcacgcccttggccttgccgtgcaagctgcttatcccagagagagatccattggaggaaatagcagaaagttctccccagacggcagccaattcagcagctgagctgttgaagcagggggcagcctgcaacgtgtggtacttgaactctgtggagatggagtccctcaccggccaccaggcgatccagaaggccctgagcatcaccctggtccaggagcctccacctgtgtccacagttgtgcacttcaaggtgtcagcccagggcatcaccctgacagacaatcagaggaagctcttcttccggaggcattaccccgtgaacagtgtgattttctgtgccttggacccacaagacaggaagtggatcaaagatggcccttcctcaaaagtctttggatttgtggcccggaagcagggcagtgccacggataatgtgtgccacctgtttgcagagcatgaccctgagcagcctgccagtgccattgtcaacttcgtatcaaaggtcatgattggttccccaaagaaggtctgagaactcccctccctccctggacccaccgatgcctctcgaagccctggagacagccgttgggtgagggtggggcccccactttttaccaaactagtaaacctgacattccaggcccatgaggggaaagaggatcttccagctctgcaaaaacaagaacaaacaacatcaccgtgaattggcctttcctgaaagtgacttatctgacacatctctgtagccacatgctttttgggtagaagaagctgggcatgggtgcaccccaccccctagggtccccatgggaaagggacatgcaaggaaacagcacagaacacgaggtggtccccatgtccctggcacactagcattccgggggatgaggaatccccagcccttgaggcagaggtgccgagtgactgccatgcttcgcccgtccgcatgggcgcttctgtccagctgcacccgaggccgggggtttccctcacctcggtcttcccaagatggagatgctaacgaaactgagaagggggcgtatgtttgacgaaggtttgtgcaagtcaggcccttctggaacacagcagggcctacaacgaggggcctttgcgatgggctgtgaggatgggggtggtgggaagaattggccacgttagagaccccatgccaccccaccatggtgagtgctctgtgcctcctgctcacctgtggtgagctgggcgagctgggcgagctgggcgagctgggctggggagagcctgtgaggaccgagaggagaaatgagaagaaggaacaaaaatattatttctatgtaatttatattttacttatgccaaattatttatgataatttgccattgctatactgtaccagtgtcaaatgctgcagcctgccaagctgtgattttgtgaggcttgtccctatgtaggatgcaccgcaggcccctggccactgaaagagtgtgcagtggactgtgggtctcccatatgcggtgccgcccaaaggtggctttgcctcaagcaacctaccctgatgttttactcattggaatgtttttccccgattgtggatgacttcttttctgatggagagagtccaggagggatggaaaacgcctggatttaagctcagcatcccccacatgggcttttcgatcatcttcaggcctgaagctgcacgacctgaagttcgcctgcatttatcagccctctttgtgctgctccttgccaccttggggttcctgctggggaccatgtgtggttgtggcatgtgtgagcagaagggaggatgaggaaaaagagaagaaaccccggtactgacaagctgtttttgagtgccactgtttgccatcatctaagccactgaatcaagtgtatttcaggcttatttcaacattccaatgccctggttttcctgcttgaatctgttcgtggtcaaaggtttgggggaatttgtgaccctggaacatccccagagtgaaagatggagctgggccacatcagaataaggccttggccccatcctctcacagcctaggtgctctgcaggcatgctgactgtcctgattgcgatccagcccgaaattccctcctctgctttcaaaagtcaaatcccccattcttaggccacactggtgtcacaagctcctgtcagggagctggggtttgggaatgtgctttgtgaactctgctttaaagtgaggggccgaggaaaacttagaaacaggcagagttggaagcagccaaatcacagtgggtgttgtgtgtgtgtgcgtgtgtgcatgcgtgcgtgtatgcgtgtgtgaaagcaggtggaccattccactttttagctcctattgatgcaccaaaccaagtgcctcatttctgtgccaaatgtttgccttggtcgttgtggacctccttctctaacttgcggtggcatgactgtcaggaggtgctggcattttcagcagatcctcatgtgttgaccctgatgtctttagcagaggcctctagcatctcggtttttcatccactgcaggaatgtggccacagggagcagaggtttgtactttccccaagaggtcctcatcctgagacggtctctacccatgtttaacccaaagagtgcaggccaggttccttatccttctgatgaaggatgagagagctcatttagaagtcagagcaaactagggtctcagtattgagaaacgcagcctgccagggaatcacagagacatcggggtgcccgcgatggccctcatgaagccatgcctcgacggcattcaggaagccctgcaaacgtgctttttgaactcattggccaggtgtgatttttacacaaggtaaacgtggtcaagggcatcggggaatttgctccaagcagatagctccctctgaggaaccaaaggaagcaagtttccacgatttctgaagagctggtataggaagtttctttcttccttttgtgttacatgtgcattaaacagaacaagctgtgtgtcatcacagattgtactgtgggctcagaaaccgtgagagagcccccaccgtggacaccggctctagggccacaggaaaaggaacgtttccaggcattttgtctccagggctcccgctggacaggcacgtactgccctggggagtaaatgcggagagttcacgaactgtgcccaacgcatgttatagccagggtcctactaactactcagtaaaagaacgtattgttgtattcctccagtgttaagctatagccatgttaaaagtcactgtgcatttattctcagcatcaaataccttgtaacgtcttctctgccttgttagtgcatatttttacttttctgatactgtaaagaatatatccagtatgtaaatgaatgttctataaatcttttgtatagtcattttctctgctccttaaatatcatctctattcagagtataataaaattatgaacttggtaagcctccgtgagacggt

SEQ ID NO: 2668 - protein, 544 aa, Homo sapiens
MSESPIGPKSTMLRADASSTPSFQQAFASSCTISSNGPGQRRESSSSAERQWVESSPKPMVSLLGSGRPTGSPLSAEFSGTRKDSPVLSCFPPSELQAPFHSHELSLAEPPDSLAPPSSQAFLGFGTAPVGSGLPPEEDLGALLANSHGDTPSIPLTATGAADNGFLSHNFLTVAPGHSSHHSPGLQGQGVTLPGQPPLPEKKRASEGDRSLGSVSPSSSGFSSPHSGSTISIPFPNVLPDFSKASEADLPDSPGDKLVIVKFVQDTSKFWYKADISREQAIAMLKDKEPGSFIVRDSHSFRGAYGLAMKVATPPPSVLQLNKKAGDLANELVRHFLIECTPKGVRLKGCSNEPYFGSLTALVCQHSITPLALPCKLLIPERDPLEEIAESSPQTAANSAAELLKQGAACNVWYLNSVEMESLTGHQAIQKALSITLVQEPPPVSTVVHFKVSAQGITLTDNQRKLFFRRHYPVNSVIFCALDPQDRKWIKDGPSSKVFGFVARKQGSATDNVCHLFAEHDPEQPASAIVNFVSKVMIGSPKKV

SEQ ID NO: 2669 - DNA, 7654 bp, Homo sapiens
ccggcagccagccaggaggacgggcccgcccgcgcgctactcggagcccagcctcgttgcggccatcgccctgccggaccgcgcctcaggctcccccagccggaagaattaacctcgagtctgcacgcttttaagaacaaggcctttaaaaaatccaaagtgtgtggagtttgcaaacaaattattgacggtcaaggtatttcatgccgagcctgcaagtattcctgccacaagaaatgtgaagccaaggtaagcattccgcagagccttccacctccttctctgggccccgctcccaagctccccaagcacggaccgactcagaggtttccatccttgaggtctaccagttctttgcccgtcatcctgagtcccaccatggaggagggccatgggctggacctcacttacatcacggagcgcatcatcgctgtgtccttccctgccggctgctctgaggagtcctacctgcacaacctacaggaggtcacgcgcatgctcaagtccaagcacggggacaactacctggtattaaacctttcagaaaagagatatgaccttacgaagcttaacccaaagatcatggatgtgggctggccagagctccacgcaccgcccctggataagatgtgtaccatatgcaaggcgcaggagtcctggctgaacagcaacctccagcatgtggtcgtcattcactgcaggggcgggaaaggacgcataggagtggtcatatcatcctacatgcatttcaccaacgtctcagccagcgccgaccaggcccttgacaggtttgcaatgaagaagttttatgatgacaaagtttcagctttaatgcagccttcccaaaaacggtatgttcagttcctcagtgggctcctgtccggatcggtgaaaatgaatgcctctcccctgttcctgcattttgtcatcctccacggcacccccaacttcgacacaggtggagtgtgccggccctttctgaagctctaccaagccatgcagcctgtgtacacctccgggatctacaacgttggcccagaaaaccccagcaggatctgcatcgtcatcgagccggcccagcttctgaagggagatgtcatggtgaaatgctaccacaagaaataccgctcggccacccgtgacgtcattttccgcctgcagtttcacactggggctgtgcagggctacgggctggtgtttgggaaggaggatctggacaatgccagcaaagatgaccgttttcctgactatgggaaggttgaattagtcttctctgccacgcctgagaagattcaagggtccgaacacttgtacaacgaccacggtgtgattgtggactacaacacaacagacccactgatacgctgggactcgtacgagaacctcagtgcagatggagaagtgctacacacgcagggccctgtcgatggcagcctttacgcgaaggtgaggaagaaaagctcctcggatcctggcatcccaggtggcccccaggcaatcccggccaccaacagcccagaccacagtgaccacaccttgtctgtcagcagtgactccggccactctacagcctctgccaggacggataagacggaagagcgcctggccccaggaaccaggaggggcctgagtgcccaggagaaggctgagttggaccagctgctcagtggctttggcctggaagatcctggaagctccctcaaggaaatgactgatgctcgaagcaagtacagtgggacccgccacgtggtgccagcccaggttcacgtgaatggagacgctgctctgaaggatcgggagacagacattctggatgacgagatgccccaccacgacctgcacagtgtggacagccttgggaccctgtcctcctcggaagggcctcagtcggcccacctgggtcccttcacctgccacaagagcagccagaactcactcctatctgacggttttggcagcaacgttggtgaagatccgcagggcaccctcgttccggacctgggccttggcatggacggcccctatgagcgggagcggacttttgggagtcgagagcccaagcagccccagcccctgctgagaaagccctcagtgtccgcccagatgcaggcctatgggcagagcagctactccacacagacctgggtgcgccagcagcagatggttgtagctcaccagtatagcttcgccccagatggggaggcccggctggtgagccgctgccctgcagacaatcctggcctcgtccaggcccagcccagagtgccactcacccccacccgagggaccagcagtagggtggctgtccagaggggtgtaggcagtgggccacatccccctgacacacagcagccctctcccagcaaagcgttcaaacccaggtttccaggagaccaggttgtgaatggagccggcccagagctgagcacaggcccctccccaggctcgcccaccctggacatcgaccagtccatcgagcagctcaacaggctgatcctggagctggatcccaccttcgagcccatccctacccacatgaacgccctcggtagccaggccaatggctctgtgtctccagacagcgtgggaggtgggctccgggcaagcagcaggctgcctgacacaggagagggccccagcagggccaccgggcggcaaggctcctctgctgaacagcccctgggcgggagactcaggaagctgagcctggggcagtacgacaacgatgctggggggcagctgcccttctccaaatgtgcatggggaaaggctggtgtggactatgccccaaacctgccgccattcccctcaccagcggacgtcaaagagacgatgacccctggctatccccaggacctcgatattatcgatggcagaattttaagtagcaaggagtccatgtgttcaactccagcatttcctgtgtctccagagacaccgtatgtgaaaacagcgctgcgccatcctccgttcagcccacctgagcccccgctgagcagcccagccagtcagcacaaaggaggacgtgaaccacgaagctgccctgagacgctcactcacgctgtggggatgtcagagagccccatcggacccaaatccacgatgctccgggctgatgcgtcctcgacgccctcctttcagcaggcttttgcttcttcctgcaccatttccagcaacggccctgggcagaggagagagagctcctcttctgcagaacgccagtgggtggagagcagccccaagcccatggtttccctgctggggagcggccggcccaccggaagtcccctcagcgctgagttctccggtaccaggaaggactccccagtgctgtcctgcttcccgccgtcagagctccaggctcctttccacagccatgagctgtccctagcagagccaccggactccctggcgcctcccagcagccaggccttcctgggcttcggcaccgccccagtgggaagtggccttccgcccgaggaggacctgggggccttgctggccaattctcatggagcgtcaccgacccccagcatcccgctgacagcgacaggggctgccgacaatggcttcctgtcccacaactttctcacggtggcgcctggacacagcagccaccacagtccaggcctgcagggccagggtgtgaccctgcccgggcagccacccctccctgagaagaagcgggcctcggagggggatcgttctttgggctcagtctctccctcctccagtggcttctccagcccgcacagcgggagcaccatcagtatccccttcccaaatgtccttcccgacttttccaaggcttcagaagcggcctcacctctgccagatagtccaggtgataaacttgtgatcgtgaaatttgttcaagacacttccaagttctggtacaaggcggatatttcaagagaacaagccatcgccatgttgaaggacaaggagccgggctcattcattgttcgagacagccattccttccgaggggcctatggcctggccatgaaggtggccacgcccccaccttcagtcctgcagctgaacaagaaagctggagatttggccaatgaactcgtccggcactttttgatcgagtgtaccccgaagggagtgcggttgaaagggtgctcgaatgaaccatatttcgggagcctgacggccttggtgtgccagcattccatcacgcccttggccttgccgtgcaagctgcttatcccagagagagatccattggaggaaatagcagaaagttctccccagacggcagccaattcagcagctgagctgttgaagcagggggcagcctgcaacgtgtggtacttgaactctgtggagatggagtccctcaccggccaccaggcgatccagaaggccctgagcatcaccctggtccaggagcctccacctgtgtccacagttgtgcacttcaaggtgtcagcccagggcatcaccctgacagacaatcagaggaagctcttcttccggaggcattaccccgtgaacagtgtgattttctgtgccttggacccacaagacaggaagtggatcaaagatggcccttcctcaaaagtctttggatttgtggcccggaagcagggcagtgccacggataatgtgtgccacctgtttgcagagcatgaccctgagcagcctgccagtgccattgtcaacttcgtatcaaaggtcatgattggttccccaaagaaggtctgagaactcccctccctccctggacccaccgatgcctctcgaagccctggagacagccgttgggtgagggtggggcccccactttttaccaaactagtaaacctgacattccaggcccatgaggggaaagaggatcttccagctctgcaaaaacaagaacaaacaacatcaccgtgaattggcctttcctgaaagtgacttatctgacacatctctgtagccacatgctttttgggtagaagaagctgggcatgggtgcaccccaccccctagggtccccatgggaaagggacatgcaaggaaacagcacagaacacgaggtggtccccatgtccctggcacactagcattccgggggatgaggaatccccagcccttgaggcagaggtgccgagtgactgccatgcttcgcccgtccgcatgggcgcttctgtccagctgcacccgaggccgggggtttccctcacctcggtcttcccaagatggagatgctaacgaaactgagaagggggcgtatgtttgacgaaggtttgtgcaagtcaggcccttctggaacacagcagggcctacaacgaggggcctttgcgatgggctgtgaggatgggggtggtgggaagaattggccacgttagagaccccatgccaccccaccatggtgagtgctctgtgcctcctgctcacctgtggtgagctgggcgagctgggcgagctgggcgagctgggctggggagagcctgtgaggaccgagaggagaaatgagaagaaggaacaaaaatattatttctatgtaatttatattttacttatgccaaattatttatgataatttgccattgctatactgtaccagtgtcaaatgctgcagcctgccaagctgtgattttgtgaggcttgtccctatgtaggatgcaccgcaggcccctggccactgaaagagtgtgcagtggactgtgggtctcccatatgcggtgccgcccaaaggtggctttgcctcaagcaacctaccctgatgttttactcattggaatgtttttccccgattgtggatgacttcttttctgatggagagagtccaggagggatggaaaacgcctggatttaagctcagcatcccccacatgggcttttcgatcatcttcaggcctgaagctgcacgacctgaagttcgcctgcatttatcagccctctttgtgctgctccttgccaccttggggttcctgctggggaccatgtgtggttgtggcatgtgtgagcagaagggaggatgaggaaaaagagaagaaaccccggtactgacaagctgtttttgagtgccactgtttgccatcatctaagccactgaatcaagtgtatttcaggcttatttcaacattccaatgccctggttttcctgcttgaatctgttcgtggtcaaaggtttgggggaatttgtgaccctggaacatccccagagtgaaagatggagctgggccacatcagaataaggccttggccccatcctctcacagcctaggtgctctgcaggcatgctgactgtcctgattgcgatccagcccgaaattccctcctctgctttcaaaagtcaaatcccccattcttaggccacactggtgtcacaagctcctgtcagggagctggggtttgggaatgtgctttgtgaactctgctttaaagtgaggggccgaggaaaacttagaaacaggcagagttggaagcagccaaatcacagtgggtgttgtgtgtgtgtgcgtgtgtgcatgcgtgcgtgtatgcgtgtgtgaaagcaggtggaccattccactttttagctcctattgatgcaccaaaccaagtgcctcatttctgtgccaaatgtttgccttggtcgttgtggacctccttctctaacttgcggtggcatgactgtcaggaggtgctggcattttcagcagatcctcatgtgttgaccctgatgtctttagcagaggcctctagcatctcggtttttcatccactgcaggaatgtggccacagggagcagaggtttgtactttccccaagaggtcctcatcctgagacggtctctacccatgtttaacccaaagagtgcaggccaggttccttatccttctgatgaaggatgagagagctcatttagaagtcagagcaaactagggtctcagtattgagaaacgcagcctgccagggaatcacagagacatcggggtgcccgcgatggccctcatgaagccatgcctcgacggcattcaggaagccctgcaaacgtgctttttgaactcattggccaggtgtgatttttacacaaggtaaacgtggtcaagggcatcggggaatttgctccaagcagatagctccctctgaggaaccaaaggaagcaagtttccacgatttctgaagagctggtataggaagtttctttcttccttttgtgttacatgtgcattaaacagaacaagctgtgtgtcatcacagattgtactgtgggctcagaaaccgtgagagagcccccaccgtggacaccggctctagggccacaggaaaaggaacgtttccaggcattttgtctccagggctcccgctggacaggcacgtactgccctggggagtaaatgcggagagttcacgaactgtgcccaacgcatgttatagccagggtcctactaactactcagtaaaagaacgtattgttgtattcctccagtgttaagctatagccatgttaaaagtcactgtgcatttattctcagcatcaaataccttgtaacgtcttctctgccttgttagtgcatatttttacttttctgatactgtaaagaatatatccagtatgtaaatgaatgttctataaatcttttgtatagtcattttctctgctccttaaatatcatctctattcagagtataataaaattatgaacttggtaagcctccgtgagacggt

SEQ ID NO: 2670 - protein, 1437 aa, Homo sapiens
MEEGHGLDLTYITERIIAVSFPAGCSEESYLHNLQEVTRMLKSKHGDNYLVLNLSEKRYDLTKLNPKIMDVGWPELHAPPLDKMCTICKAQESWLNSNLQHVVVIHCRGGKGRIGVVISSYMHFTNVSASADQALDRFAMKKFYDDKVSALMQPSQKRYVQFLSGLLSGSVKMNDLFLHFVILHGTPNFDTGGVCRPFLKLYQAMQPVYTSGIYNVGPENPSRICIVIEPAQLLKGDVMVKCYHKKYRSATRDVIFRLQFHTGAVQGYGLVFGKEDLDNASKDDRFPDYGKVELVFSATPEKIQGSEHLYNDHGVIVDYNTTDPLIRWDSYENLSADGEVLHTQGPVDGSLYAKVRKKSSSDPGIPGGPQAIPATNSPDHSDHTLSVSSDSGHSTASARTDKTEERLAPGTRRGLSAQEKAELDQLLSGFGLEDPGSSLKEMTDARSKYSGTRHVVPAQVHVNGDAALKDRETDILDDEMPHHDLHSVDSLGTLSSSEGPQSAHLGPFTCHKSSQNSLLSDGFGSNVGEDPQGTLVPDLGLGMDGPYERERTFGSREPKQPQPLLRKPSVSAQMQAYGQSSYSTQTWVRQQQMVVAHQYSFAPDGEARLVSRCPADNPGLVQAQPRVPLTPTRGTSSRVAVQRGVGSGPHPPDTQQPSPSKAFKPRFPGDQVVNGAGPELSTGPSPGSPTLDIDQSIEQLNRLILDPTFEPIPTHMNALGSQANGSVSPDSVGGGLRASSRLPDTGEGPSRATGRQGSSAEQPLGGRLRKLSLGQYDNDAGGQLPFSKCAWGKAGVDYAPNLPPFPSPADVKETMTPGYPQDLDIIDGRILSSKESMCSTPAFPVSPETPYVKTALRHPPFSPPEPPLSSPASQHKGGREPRSCPETLTHAVGMSESPIGPKSTMLRADASSTPSFQQAFASSCTISSNGPGQRRESSSSAERQWVESSPKPMVSLLGSGRPTGSPLSAEFSGTRKDSPVLSCFPPSELQAPFHSHELSLAEPPDSLAPPSSQAFLGFGTAPVGSGLPPEEDLGALLANSHGDTPSIPLTATGAADNGFLSHNFLTVAPGHSSHHSPGLQGQGVTLPGQPPLPEKKRASEGDRSLGSVSPSSSGFSSPHSGSTISIPFPNVLPDFSKASEADLPDSPGDKLVIVKFVQDTSKFWYKADISREQAIAMLKDKEPGSFIVRDSHSFRGAYGLAMKVATPPPSVLQLNKKAGDLANELVRHFLIECTPKGVRLKGCSNEPYFGSLTALVCQHSITPLALPCKLLIPERDPLEEIAESSPQTAANSAAELLKQGAACNVWYLNSVEMESLTGHQAIQKALSITLVQEPPPVSTVVHFKVSAQGITLTDNQRKLFFRRHYPVNSVIFCALDPQDRKWIKDGPSSKVFGFVARKQGSATDNVCHLFAEHDPEQPASAIVNFVSKVMIGSPKKV

SEQ ID NO: 2671 - DNA, 157903 bp, Mus musculus
  misc_feature (1)...(157903): n = A, C, G or T/U
gtatagatttttaagaaatggccaaatatctgactgcaattttttttctcccgaacatccaagataaaatcccaggcaaccaaaacttatactaaaaggttagagataaacagaaagtgaagataaaacagaaataaataactgctttgttttaggaacaaaatttgaagctcagctaaggattttagcactaccaactcactacgcatcctggcctcccttggacagtgttctcgtaacggggtgggcagtggggttcagggaaagagaatacaatacagttttgtaaggtttagatcttagcatcccaattagatattatgtctgtttgaaatctatgatgttttgagttcctttgtgtttgagttcctaaagacaagctactagtgggacagggttagaagtcatgtggtacaggagtaaatgatgtcttgagtgtccctgctatgtgggtgaccagacccgggccagttgaccctagagtcagtcttggcatctattcaaaccctccaggctcctttcttccttgtcccaagggaactgaataagtaggagtccaggaagtccatggaaaagcctgaaggcttttggttgttgctgctgctgggggggggggaggttggaggggggggaggttgtcctagacggggcaagccctggaagactcctgctgtcatctacaagctctttttagtctctttttttgtcttgaaccttcctcctcctaggcagcctagggggttcctggctcacagaaagtgtctcaatgatggagtccgggctaccaagctagaactccacatcattatccaggccatgctctgccagcacacagcatatacctacctccagtcttcttaggagagaagagcaaaatctctggtgtgggtttgtttgtttgttttttaaataaattgggggggggggttttaaaaagaacattgaggcacatagaaaagagaagaaattggatgtgtcatttaaactctctggatctttgcttgtgcatttgtgaaatgggcttataaatgccttgacacctgagctctgaagtgctcagctgtggaggaacagctgtaaaaaggggacccccaagcagatctttcatccaggtcattagggcactgagtgactttttactgcttgaaggagggcaatggcttctcccagagtcttagcccagccttcagtattagtagctcctgcccctccaacatattttcctttgcttccttgccccaaggacatttctatctgttaaatgtgaacatggaggcccacacagctttgcccacctcgaaaggtggacgtgccatcctgcaaatgcctgacccggatctcgcgcggaaggggacacgctcatttcccgccgtggcagcgtctagggacgagcccagccagagtctgactccagctttaagcgggactctgagtctgaggccctctgagtctctgggtccagggtcccacggcgcctggccccgccctcgcttgcccggctctgctgttccctgaagtccttcctcccgcccgctccgctcgctgcacgcggcgctgtgcgactcgactccccggtcccttaggtccctccgcgtccactcgcggcggccggaagctgaagtgaggacacgcgcgaatctccacgcggctcttctgagaacctgaagccctaactcagttcagctcctccctccgagcgtgcacaagggtccctccatgttccgaggctctctgatcaccgagcacatgacctacaggacctattgaccgcctgaatgcccctcgaaggaaaaactgtccgtgaacaaaggccagaagcttctagaatcagaccccaggccgagagctcaggaatccttcagtctagctgggaagaaaggcaccttatgacactcagcctcgagcagtggaagctattgccagagtcgcgcgcggtgtccctgtgtccccaagagctttgcaccgggcgggctacccagagcctctagacgggatctgctccctcctgcagaggctgggacaagtcccccacagaatggctgtccagagtggccggggacccgacaggcagctacctgcaaagggatcttttccaccttttctggccactcgtcctctccccaaaggactcagaactcccctgaacccagcccagtgtgcacagactcctatcccctgtgcttgcaaatcccgtggcctcgggcaccccaccgatcccagggaatgctcactccaggagtgcaggcaggccactgaggcttggcgacacgtacccgcacaggcggagggatacggtgactgcccccaccccatattcccggaagtggccaaggaagcgcctgtgagagaaattatcctttcggacctggaaggaggggagcctgcaagattgtagacttttcctcccgttttcaaacggactctaccatgcagaagttgtttagacaatgtgattttcagcaagcataaccgtagtctgaagctatttttaagacaaggaaagatggtatttatttttcatttttcaataaaggcacagaaaagtacgtcacaaatgagtaactgctcagcaggcacccttcagtttcttcttcttttctcctagtgtttttccgcaccgctagaattctctctgagctgcaggaagccttcgacgattttcttattcattagacgactcaatgaaatgttaaaatatttatttttgaataatcattccccactaccacccttttgcctggagattcgcacaaaacctgcccctttattcggtgtaatactgatgctaagcatgggcaatcagcctcatccagttgctttcaaaggtaaatgtttgcaactgctggctgcgtctgcaccagccagttctcttccagcacttggtaattccattaccagtgtggactatatcaggcttgaattcacttgtgattattttctgggaaaaaaaattctaagttttccagctattgcaagtaggatttttgtttatttttaaaacttgagttaagtcgttcataaaatagtagccatttactacctgtgagctcaattaaagctaccccaggtttcagactcccatgcaagtcgtatccatgcttactgtgtagtcagtggcagtctggattctctgataaccctgatatttaaaaccactctgacagggtgtcacttcaaaacacacatttgaaaagcattgctaaaatacatttacgtatcaataaaatgtcttactctccctcttccctattgtatattctttaaaagtaaattttgctttttaagttatcgctggtaagttggcatacactcctggcttgatttcagcaaagcagatctacagtttgaagagtccttgcaccaaggttttgtggctctttgaccaagaccaactcaatttcttcattgttggaaagggtatcgagctttttaaatcacaaaattatttctatatggccatatattgaagtatatttctattacttcagaaactaaatcaatgtcagaggtcaaagttgtttttttttttttctattccaaagcttccataatgctagggctccatgcatagttttaaatcaaacaaaaacacatatagtattttcaatatttcagagaacagagactgcctctgctgtaagaagtgtctaacttttataagacttgcacctccctgctcttcctccccagtagcactaaatatatgcttcaggaatcactaaaggagtgtgcacaaaaattttctcatagccagtttcatctctgatcttctaaaagtggctttcttggttgccagataatattatatttgggtgccaagcgctgatgtgcgcatcctccactgtccaggtaggtgttaccttttagctcatctctcaagctagtacacactcagagtcaagcaatcgcctagagtgtcttctcagagaggttgagcctgtcacaccttttatggctttttccacagtgatcgtaaaagagggtgggtaggaagtgagaatccagtatttgaaataattagtctcgtgctttaaccaagtagcttggatgcatcttttgggttgaaaaacataatttgagtataatacctttacagtgagtcccaagacctgtgggtctttcttgtctgttactagtatcaactctcatcctacccaccccacccccaacacacacacacacacacacacacacacacacacacacacacacactctccccacccccaccttcactaaatactggacagtgaaaagtttaaagtaaacaaggctgcagtttttctattgtccagtagacggcacaaaagatcaagcgtttaaataatgaacaatccagagaggtttggttctattttgatgccagtggcctgttcttttagaaaaggcaggcagacagcactggatccaccggtgaagcagagagaaaaaaaaaaaaaacaaaattaactttgcaaaactttgagatggagtcatacgaaaatatttttgtgtatctgctcaacagatgcatttccttcagaaaatacattaatggttataaatggagagacgtgttattattgcaggttttagtaactaaaagctacctgtagggaaattaaataattgagagatttaaagttttgaaaaaaatgaggcacctcaattttacttagtttctagtgggtaaagtctttgcaacttgggccttcaaaatttcatgttagaatttgtattatacttctatgttctttaatatattcaacacaaagctgaggctcagacactgaccattgtgttttaaatgaaaatgtgtacacatgcatatgtagtgtgctgtaaaggagagaaatgcttttgaagttttgtgtgcagttttgggagtgctttgggtgctaaagccaccaggagataatagttagggcctctttagggcaatctatagctttgcctaatacttatattttttaaaaatctccatttctttccactctgcagaccctgtcgaggtttggaggaaggcaaagtgtaggctaataactcatttcccagttaattttattaagaatttatagcactgtttagaaagttttaagacaaccataaattttattaggaatattttattaaaccctctatttaattaataaaagacctctataagttctgaaaatgtcagagctggtaattatgttaaccagtgtagttttctcctctctagagaccaaagcattttaatgatttgaaatagaaaagtagtaaggaaagcaaccaggctcccaacatttatttttcctggacttttgttaggcagccagtagatagtgagtcaggcattttccctgtgatggtcagagagccgaatctgacctctcattgacttgtgaactggacccagacagtctttgttttttgaagcaaaatgtggtaaacaattctcccagccttgtggcccggattgctttgggacacttgattaacgtccttcctaatcctgcgctttaaagcctctttcctatcacctaaccaggtttcccgctgtaatagccatctaaatagtttatttcagtttcctcacagtcatccattagctttaaattcctggtagtgttctcctatcacacaaagactcttatcgccagcattcctccattatctctaccagatttcaaatccattttctttaaactaccctcatttctgtttttttaaatgcaaatgttaatgtgggggggtatttggagggcagagaactgataatgtttttcttgaagtacaaattccaagcccccacactccaggagaacctcaagagcaaccacaacattttaacaggcatcttaaactgaggtgacagatgataaacacttatcattttgtgaacacagctgccaaactccattgattaacaggactttatttgtgttgggctggcaaacacacatacacacacacacacacacacacacacacacacacacacacacacacacattttaccttcagaggtgcctctttaattttgagaaatttaggtctgactcatcagtgggaacttttgaaacaaaaacctagttcaggatgtgaactctgcagagagttcctcacaggagaacaaaaagttacaggaatgtctctgagactaccaacagccaagatgaacactgcttgctttagaggcctcccaacagggtaggtgataaacaatagggaccaggagctcaggctgcctctttcttatccctgcattctatctttgggaagatactgtgagccatgaaaggaaaacagaaaggagaaggactgcatcttgaagagcagcaacagcggctagaacactagtgttctgcaaaagccggaatgctactgtctttttaaaggaaacatctgaaataaacttagggtcaggcacatccagaacagcacacataccacagtaatttatgtcacagtaactttctgagatgccgtgaactgcctctgcacctttccttttactagatgattgattaattgctgccttgctagaagggtttttttttgttttgttttttgtttttttggggtttttttttttggctactatcttacaattctgtacatctgtcatttctctcagcaagccccaactgtaataactgtttgctaattgtaaaatccttatccagaatgaggtttgagcaaacaattcatactactgtaattacattgtaaaagtgttttagttgctcaattgttcagaagtaatctatgaaggcctgcaagtagcactaggttcaggtacacattcttaagtggaaagttttcaaaaccaagagagctttattttaaactcacaagttcaaactatcctcacctttaagggaaaccctgttggtagataattaaagtgtgctttaaaggtaacctgacatcactttaaaaaaccaacagctttgtccttgctttgaagattgtgcttatgttcctttgccacctagaccggtaaacaaaacaatttactgaaaagcaggaactccaaataaatcctagcctcaaaaatatgtagtttatcaaaactgaccttgttcaaacatgaaacctttgcgcagagttaaggaaactttaagcccattacttaagtctgcctgaaactcccttgggctcttaaaggctaggtcatatacgtgtattttacagtaaatttctcccagttaaattgcacttagacgatttcccttgcgattcatttaaggattgtaaacatagccatgcccactgtggtgtctggattgagtgtcctgcccccccctcacccccgtgggaatttcaccggtgctctgtaggcctcttggggtgatgacactcacaccctgcaagacccagcagcggtggaccgccactcaggtttgggccgcattggtctggagctggggaagggcttttaggctgtctgtccagctcagtaggttctataatccgcggagaagtggctgtttggcccagccagatcagcttccttaaacttggcggggaaatctccttccagtgagcaggaggtaattcaaggctcttccatgcctgtttttgacgcacaagtctgtattaatcttctaaatgatacacggggcgtttgtgcaagaaaagagcacaaggatgtgatggggaaactaaaagcttcaaacttgagcgtcaaaacaaaaaggacacagagaggagacacagaggcacatgatgaggggtcgtggggccttttattgttttaaacagtcggatctctttcgaggcaaagcccattgaaggtttggggtgaacatatgtcaaccttcaggtgttcgttgttgggggcggagtgctgggctggaggcccgcacgccttgtctgctaggcttatcccacgcgcactgccgctggtgtgaactagcccggcgctgactcgtgcagactgctaaaagctgtcttaggaggctccgttgctcgatagaacctgattccaaatctaggttctaatgtttaccctgtatcccctgttccgtagacaccctctcaatagaaacttgaatactggctgaagaatggaaacaggtctgtgactttgaacctaagagttggcttcagtacctttcagagatgctaaaccttttccaaacaatctccgcgtgaaggaagcctccctagtctttctcagaactctcctcaaaaccttccccggcccctggggtgagggttcggtccgcagctggcggtgggatgggggcgggggcgttgggagcgtaggctggctgctttgggggagagagccttttggccaccttcagggcgggaatccggaatggcagtttgcattcccagcagatcgaagctccctgctgatcgattatttgataattgattttccccgcagccaatgcgcggctgcctgggcggggacgccttccgattggtggagctctctccacggctgcctaccgagatttgggtgagctcattttccagtcgaccgcagggggagttttctgcgaggtttcagctggggggtgaggggaatcctctccgagcccagcgagctgagagccctgcctgggatgtgaggtttccagctgctccgagagctactgtgactgagcaatctaagccacgagagccgggcgcagaaacataaagagtaaaataacccccactagatagagtagctgaagagtgagaataaaaagactcaaaaaacaattttaagtccagggtgtggtatttcaagagagaaagttaaaaaccactggctggttggagactttaagttgtgggcagggtcagcttttgtctgaaatctcagcttccgaagtggatttctttttctctggaactgggagctttcacggggctgggttcggagatagacaaattgagagatggaggtctgggaggccggctccgggcgtcgccgctgaaagagctgggggtggggggtgggagggagcgcagcgtctccaggcccgagcaaggccgaggctggagcccctcggcgtcgcccagacaaaggcagccccagccgcagcgcagcggagctctgcagcttcgccgcgccccgggcgcacggctaaacttgccggtagcgcaatcgagaaagagcctcgggtcccggggctcccaggccccggccgcccgcaaggtctggctgcttggtgcccgcgttgagtttcgttctccagcggtcataaatagctcggtgtttgtaaacaagcgctgggggcacattcccggcgctcggctcattgttccctcccttcctccctcacttcgcgcggcggctggggctgagggctgcaagagaggaggtggggacgtccggactcaaagtgacaaaatgcaagcatttcctttcctccggccctacgtccacttctgacagcggggggagaaaaaaaaataaagaaagaaagaaaaaacccaaaccaaaagaaaaaaaagaaaagaaaagaaaacctctaagctgagtctgcagaacgcccgggcgaccgctaccccacgttctcaggactctcgagcggaaccttttccagtccagttccagctcctcttcttgctctggctttgacttttctcctccgggagtctagcagagaatccagtacttttggcatcacccccaccccgaaaaatactggcagaccccaataatttcgaggaaagtcttgaagtctttcatgagcggagccctgagcgaattaactccggcatctgcctgccctacgtttattcccgatttatttcaagcgtccgctttgggaagagaggctggaaggggacgtaaagccggcgggttgggagctgcagcctgtatttgtgtgcatgtgccctgggtgtgtggtgttagtgcctgggcgtgcgaatttgtggagtgtctttctgcctctccagtgcggccagagctcgcttcgcgcacccacccctgccgaggagcctacttgctgcagcccaatgcattgtgtaagacgcgacctgttatggccaccactacttccgggttctagcattctggtcggaatccacctctccgcctgtgcaacacacactttacacacgcacggcgactgcaagcgggcagcatcgatcgtggctcctttaagacaaactcagacagacatttttttaaccctcctctctaatctcccttcagtgcagcagttgcaaagagggagagagaaagagaaagagagcgagagaagagagaaactgattaggaattaggactgattcaaggaaagcgggcgctagggctttgtgcatttgaatattaacatttgaggtgttctgaccagaagaagacagaacggacgatcattcattcaccacgttgacaacctcgcctgtgattgacagctggagtggcagaaagccatgagatttggtagttgggtctgaggggcgctcttttttttttttctttttcttttcttttctttctttttttttaaactgatttttttgggggggagagaagatctgctttttttttcccctcccactgctgtcttggtggaaccagagcgcttttatgctcagcgacgcgggcgccttgcttcaggtccggtagaccgaagatctgggaccagtaattcacactgctggagacgcaaagggatttttttttgttattgttgtgctttatttttttttccgggggagtttgcatatttgtttcttttcacactggccttaaagaggatatattagaagttgaagtaggaagggagccagagaggccgatggcgcaaagggtacgtattaaaagcaattgtggaagtcaaatgtgagattaaattgaaacgtggctgaaagacactgctactaagtttcctcttttctttctctctttttgaatgaggatcctaaagccgcggcctaaatcgacagttttacttaatgcgtttgcagccttatgcatgtttcttgtggttaattcaagtgatcaagttgtctatagattcctagccaacagctatataaataaaaatacaagctcaaggaatcacctgttttaaaagataaaaaagacaagggggaagatgcttcatatccagtgctgtaatttaagcatttagggaccaaaagtttaaagctatgtttaatgaaaatgaacagctgagaacttttgcctcattatcgattatattcatcttcagtatcagtagaaatggggagcattttccgctaagtaatgtcctggtgcagtgaatttttggttggaaaaacattccttttataaaagtaattttaatttgcatgggattttatgcaagataataagtttgtagattttttccttagctaagttctgtactagttagatactaaatacagagctctcacttttaaaatgcaatactaatttccccaatattcctatttgaatgaaaatgccttgaaagtaaactgagacaatgatgcccccgcagaggtggcttcttaaaagaaaggggtctacaaaaaggctgccttgcataatttgtgtcttggccctcaaagccccttttggaaaagaaagttactagaggacacatttttctttattctcttggttcagacaaatgtcagccttcttccaaactcttcccacctctggctttaagaggttgaaagtggcaattcccctctctttggaaatcatttccctctcaagatttccaaatcttagaaaagtaacttgcttgaaataaaacaatcagaaaaatccaaatagctgaatttatcacagacagtaatggcaatcaatttgaaagcagccccccccacacacacacaccagagatttgcatgtgtattttgcttttgaatctgcttagaaactaacacatagcaattgcttccttgacttcaactctagggagaaagtttgtgaaggttaaaaaaaaacaaaacaaagtagagtattagttgcttcctttatagctttctttaagcttggaaacagcgttgtccatgtgtatgttcagctgtaaaaggcaacacaagctgccttgtgcacactgcgggataacatatatggggggcagttcgtttttgtataatttagcagtttggaaaagcaaggcaaacatagtgtcttacaggactgcccaattccatgctggcagggaagtaaaataagaagcctttcagaattcactgcttggcacaactattcccatcataacttttaaaaaataccccaccccccaagtgaaggctgtgtgaagcaaggcgggtctgctacactgttccggcacgttttattgttgtgattttcggtttccacctccagaaacatgcatgttttaccttccgcctccgggagaatgcctctctgcctttccttttccttcctccctcccttccttgccaaaagattttggatttctgaattggtctatatggacacaagttaggacaggaaccttcatctcagatgactctcactgagaattctggagctcttactgttaaaattaatttttacaacagaacgctcaactttagagatgtaaggccagggaattcgggttgaaggatcctgttgtactgatctaagctcggtgccctaacgttcccggttacccgcctggcctctgaccctttttttctctcctgtttgtcatgcagtacgacgacctaccccattatgggggtatggatggagtaggcatcccctccacgatgtatggggacccgcatgcagccaggtccatgcaaccggtccaccacctgaaccacgggcctcctctgcactcgcatcagtacccgcacacagctcacaccaacgccatggcccccagcatgggttcctcggtcaatgacgctttaaagagagataaagatgccatttatgggtaggtataatgggcaggagttaaggagtgaggcgcgatgcttcccccatttcccaagcccttgcaaccggaaagtcagagcactctagattagaggtacaattcacagtgcgtggaaactggtttggggtatagcgggggagcctcctcccgattcagcgcccggcttggccgccacgttggtcgcaaaggagtcccagtgctggagtggccgtctaaagattccgaatcccctctcagactcgagtcagcaaatctgagatcttgctcgctagacttagctcgagcgttggggagtttctaagggtaggcgccttagtttagggaaaatcttttaagccattgattgttctgacttgcggagtttactcagccaccgcatgccggttctgccggtgcacaataaagtcagagggacagctgcaggtcagacaaggggaacatgtcttgctttaagaagtttgttcaactgaagtcaaggagaggggccgctctgaattgacacagacatttagaaacttctgggtgttttgtcaatctgtgttcaaaggcaaacctgcaggatttaacaagaaatgtttgtgggatgctcttccgggggctctctggccagggcttactgtgttccgtcggccattctattagagcttccactagaaaagccttttgaaagttacttgtgcttctctgtgtgctgacgatttgagggggaaactccccccacttttatttttaaactttgtaataacttttattacacttttctctttaaaaaatacgtaatgcggagctttctggttaggggggaaatctttgtgctttattttctagtcccttgcgcggtgggcttgcttaaaacctagccttctctctgcaaatggtttaaactccatttgaggaagctttgaaaaggaccccaaactgttaaattcccagctgggctgtgagagctaataaaaaaggctcgagactcctggagcattaaaagtcttttttttttttttttttttaaatgggctgagacgagcgacatctaggccttttagatgccagtcgctttaccactccaggcgagatggaaggcttgaatgtagaatcatttgaaggaactttccttgggggattatggggagcgtctgcgaagggagggcactgccggggaaccgggaaagacctcttgctactggagggctgtgcggccagggtccgtaggtgcagccctgtgacagtccgttctatatccacagaggccctttcctcaagtttgctgcgcccctgccaccaagatccccttagcctgggattttgggccgagcctccgaggaaggtagagaggctggtcctctcccaccccgtgtcccctgcgccttccccgggcacccggtcttgcctgtgcggcggagggacgagggtttgtcgcggtgcgaaacttaattcaaaatggctgctggaaccgcttgggttttattcgtagcaaatgttgccaatttcttcggccagatatgctgaaccattccacagacacggtccagggctctgggcctctgagttcagagacccaggagtaagggggaggtgagccgtcacctgggcggagggtgagaaaaagggcaaaagctgatcagatcacccaagggtctctcggcctcgagctactcgggttgtttctcttgggcgccttttttttcggtgactctggactaatcattgtgttgtttgtgactgttgtattttcttgcagacaccccctcttccctctcttagcactgatttttgagaaatgtgaattagctacttgtaccccccgcgagccgggggtggcgggcggggacgtctgctcgtcagagtcattcaatgaagatatagcggtgttcgccaaacaggtcagcaaaacaaatattaaaaaaaaaagagtaaaaagaaacaaaaataattctgtccgggttccctgcgcgcacacatgcacacacatagaaacacacacagagagatagagaagtagatgtttagagagagcaatttctcaaaggtagccaaaagtagtctcccttaacccacgcgtgttactgcctccctaagatttgcttccagtgaatgtgtttgccagaccatcacccatcttcccacccactcaccgtccacaagttgaggtcagaagctcactcgggaaagaaatcacgaacaccacgctatgtggctgttttggagtggcaggcgggcagcgttccgcgtaagtggagctctagctgaccggagagagcgctctgggctggtctcaggcctactgggttcacactgaagtgtttccgtgagggacgaacttgagccaagagtccctcctggaggttccatcctatccctaacagtgtaaaggaggcaggacagtaggaaaatgaacagatttcattttgtttcatttttttctttcccctctcctcacttgtatttagattcgcgcagaaaaacctctattctcttctaatccagaactggataacttggtaagagtgacccctcactcccctccctatctgtccaccccacttctatcccccatccctgagctttccagactggtctgtctgtagctgcaagtcgactgcaaacgttttctgtccacagacaagtgtttggggactggatcccggggtataaactcatctgagagagcccaggagcagcggctggggaacgccagcttttgttttttatgatggtcaggctgcacagctctaatcagcctggggatttatcttctagcctgtcagcgtgtgtgcttaaaccttgggacttccagccttattgagcctcgttcactagggccatgacgagggccgagcccccagacaaccaattggcatcaaaggtgtatggacagaaggcagaaagaattttgcaaagtacaaacccactgttgggggaaagtagagaaaactttcacataacttcatcacaggaaaagtgtaacccagacagtggccctttggggttggggtggggactttaagactggggaggagggagccatgggggaggagagtgtttatgatccccacttagatgttttgttgttggtttagccattttttctccttaagaaatataaacctctagatggtacccagttgctgctattaagttttagtgttattgccataaatcaaaataactctatttatggggggaagggttgagttggagatgctagagctgtgacagccaattttctgcaaaccaggaatggagtatttattcttgctgtatctttgcagatgattcaagccatacaagtgttaaggtttcatctgttggaattagagaaggtaaattcctgatttcccttccctacccttttatcccagcacacagaagggaggcttcagagggactgaagtttaggcttccaagagatttgcataaatgtcttgctttctggtaattagtgtcaaggccaatcttagcgtccatttctctttgcagtttaattacaatttcagccactaaaaccaggatcacagacaccttagcctcatgtaccttgctggctttgtgcatcagctgcactgctaggcactccaagcatgtttagaatggcggagtgaatttttttttacaagttaatgcctccctcactctctctccctccctcccttctctctctctccctctctctctctctctctctctctctctctctctctctctctctttgtgtgtgtgtgtgtgtgtgtgtgtgtgtgtgtgtgtgtgtgtttactcctcttctttgctatctaggggagggaaaggttgttttcctttagtgagtttctagaagatggtttgagatcaggggcaggtcaaactcagaagggactgagggaagggataagtgggcaatgagccctagggaggagcgcacagttagaccttgcccagagacaaagccggttgatggttgggtcaagttctctgaatctgtgatccagcacacacctcaccttcacattcaagagagggtgcggggtaacatgattttgctagctgttctataaatctcagcaataaaaacttaatgcattgtaattcaaactaacattaaattgcaagcacaccagggtttcttgtgagtttttgcatgttagggatgcctggggcctgtaagagtcagctgcacttagactgaagtattttgagtaattcttctgtttcttcttcctttttttttttttttttatcaatttgaaaagttttgtggctatatctttttcttttctttttttcatataatgtgcagaggcaacttgatttgagatgtagggcatgtatcttatatcaccacagtgcagactgtaatatgtgtgtgtgtgtgtgtgtgtgtgtgtgtgtgtgtgtgtgtgtgtgtgtgacacactttccttagaaactttggggaacactttatggtaaactaagtgtatgaaattacatagtttaccttaagtgtccccacgcaggtcacctgtgtcctggccagagcctcaggagcagatgaatttaacatgggtgttgaatatgttgtcgcctgtgaatcaatcctgtcactgtcaattttctgggatatctctattttgcaagaaaagaaagttattcctaattctgaatgcgtctgggggtctcccgaggacaattgccctgtgtgtcccctatttggaagtttggctctcacaagggggtggactgcacttgtcaatgtcgtttatgctctcctgattatatttccattttttttatttctgtcataatgtaggtacacgaattatgtgacaatttctgccaccggtatattagctgtttgaaagggaaaatgcctatcgatttggtgatagatgatagagaaggaggatcaaaatcagacagtgaagatgtaacaagatcagcaaatctaactgaccaggtatgcgactttcaatttcaacatccctaaggaaaaaaaaaatctgtatgcatattgcttgctgggtcaccaccacctcctttattatttgcatatgattaagtcccttttagatacatttccatcaaaatgaaaatttttgaataatgtggctattattgcttcattaaggctggctctaggattcgacctggagagatgagcttgtaaaagcttcgcctgcaaacttgacctgtttcttgtcgcttttaatttttgtctttattttatttaccctccataataatgggagtgttaactgccagtgaccacctctgattgtaggtctttgttcatgggcacccccccccatcttgaagaaaagaaaagtgtaaggtctgtttatttcttattttattaggaataaatccaagataggtggtctaaggcagacagtgagggtttgaaatctagcaaacgctggctattttctcgctgtctacacggttcattagcctgtcttgtcagttttccccggccgaacgcttctagacctcactgaacattgctttgtgtggtactcccttcaagctctcccattttattgtacttaatagaaaaaaaataaaagcaggccgaggttagaaaaacagataaatatggacttttctcctcctccttccctctcgtcctccagctggtatgtgctctgggccttctgctttggcaggttttggcagggtgactgtcaaggacgccctggcgactccctgggtgtggagggcagggggccacgcggttgctctccactgaggctctctgctgtgccccctccttcggtcctctctccgggtccttattctgctgcgctgcgttgctaagtggggacgacttttatttggagttaggggtggtgatgattctgtcactgggcccactgttgctctctgtttctttttcctgttgctgtgtctctggattggtccaaatgagttgggaaaggggagaaaaaaaaaaaaaacaatgaaaatgaaaacctaaggaggggatgagatgaagcagggtcctggacagctttgtagagaattgttgcaaagaatctagagatttgagcagtggcctcttctgcagccagctctaccagcaaacccctagagcccattcttatccgcgcttgacatgtgggggaacaccagactgctttttgttaagtcaaagaggccagccactccactgttttcctctgaaagttttaccacggtcactgccggccaaggctgtcttgtcccaacttcatttttagttgtcctcttaagatatttttcaacatcctcttgcagcaagaataattgcgcgtaattctgaaatttgtgctgcatttcttctttgcccatgagtgatcaggcaaagcagatctctagaagtgtcagcgggagagtcggaaactagtcggtgtagattggtacaaagaaccaaccaaaaaaaaaaaaaaaaagtatgagcatatgaaggtgggaaagcggcaggctagtccctgtcctagtacccaagactgcccagccgctttaggggctcagtcaccaactccggtaaatgcagattccactagtagctgctgttgagtaaaaattgtaatccaacaagctgaactagaaaatgggattctaaaagctccggagtactgggtacataaagctatttgagcaaattacaagaatcgcttaggggcatgaatgaaatcaacactttaattgcctccaaaatgaagatttataccccattttctcaacgaatcattattttattaaagtcaaagataaaggaccaaagttatggagtttggggagcatagaggatacagaattaataaaacgttattgagttctcccctactccttcccaaacttaccttacttagtttcattagtcatgtgttgggtaaacatgtgccttttattctccattcctaccttccaaaagagaatggtgcaggcggtccacgccattaggatgtgggcttcgtatgtttgtctgggtttatggagctgttggctcgtggctggtgagcttgccagtgcacccagatcggttggattgaggacagcgatggatgtatgttctttctattgtccagttctaaaaagacaagagctagctagtgtggaggaaagggtctaggggaggtgaaagcaagatgctttgtctgggagcagggtgggctgggcttctcttctcctgaaggggtggggagtgaaggtcaaggcaccagagccacctcatggtctccaagtgttggtttagaagtctagggctggtcccagggggatgctgaggcccgttgtggatcctcaggagccagacatggaagagtggcttctccacctgtcaacgaaggtggcccagcctgttagagacccggcactggagctaggtaccctaggggactttacacttcaggaaggcctagttagctcattaaccacgctgtctctagggcctgctggcagtacggtttattttgttttatctcccttaccctcggaagacaccgaggttgccattctcaccaggcctgggatcaaggacttttatgccagccaatttcctggagtgctattatgctggtgggaaatccacttgttcatgtaatgttgtaggacctacatctatctatctatctatctatctatctatctatctatctatctatctatctatctatctacataaaatgtatcatatatcatatcgtatcaatatcatatatattgtatatcatatcagatttaagacaccagtagaagctgtaatcctattcttacccacttcctaggggttcacggtcttctccactcttagaggccatctggaggtcccctggccatgcctagtggccgccagcctcctgggcgccctctcccgaccgctgcgctatcgctaggcgcagatgcccgcgaccccgaggggttgcagagagcctagacaggaattgctggtctcagagggccaggctgaaacccgtagagtactgaaagggaggcgtctaggctaaggtttggctgggaggacgcgggctaggcggtgctggagactaggggtcgtgggtagaactgggggtgcctggcggggatgctggtcttgaggctgcactaccggatgtcgcctttcttcccgggcatatctggtcctctttattctcgaatctaagcagtttggactccaaggactaagggagataggagcggagagcctcggggctggccaggtctcggggagagagcagagattagccaggcctgtgctccgccatcagcggcgacccagcttctctccagcggggaagctggacgcggagaaatcttcggattacagttttattcaacagcagctctccaggagttcctcctcagaatctgcatttaactgctcctgggccggggctggcggcctgagcagggcgccctgttgcgtgttaatcctgacaggcccgtgacgtccgaggccaagtactgtggcttgctgagatgaagctcagaagccccgctggcaccacaggttaaaagccaagtgctagctggctccctggggtggaagcagcttgagggcgagggcgggcacccagcccccgggctgggcagcctaggcttcagggcgcctggtcaccaggtccaggagatctagagaggtctgagccattgcgaagggttctcaaatgggcctgggaactttgatggagatggtttttatctatttgcgaagttccgaatgcctcttttaaagcatagtttgagtgaaacagttttaaaaccgaaatcagacttgactgaaagctctcccctattacgaagtagcaaggaaagtcatcctcgggagatttcagcttcctgctggaagaggttcctggaagaggttcctgtaaggcggggacaacctaatgtccttcatggcttatatcggcagcttagaaaaaaaaatgatgaggcagcagatgtttaccaatactagaaacaattgtgttttcatctactcaaaaactggatacaaccagcagtgggtaggcaaacaggcccttaggtagcttgtttctgaatgcttacatttaatacacttttaaaaaaaatctgtaaatccttcataggatcttatttaagaacttattcctgagcctctcagtgcacaatctttgtagaatatggagtgttagcattatctaactttactgtagattgttgttgtgggtcacatgatgtatctttaattcattttttgaaatatgtcagaggagaattatggcaagattctctttaatgattaaataataaggtgttgactgcttgtcactacacgggctaattgggatgcacattccagatcctctgttgctttgaattaaaagttacttatttagcaggtatgtttttattgttattttctgcttggcttttatatttatgtatggatttgtgagtagagatagattgattcttaatagaggtatttaaaacatttaagaaaaacaataagaaaaaagggtataggatctagtctatgcaaatagcctggattaattacaacgttaaatgtcagccaggtttaaatgccaatagtacacagactactactcctagggcctttccagttcccctctttctcctctcttcttcatttccttagctcccccccccaattccctctcctcccagtagaagtccccagtgcaagttctatggttaatagaaagcagcaatcccaatgctactttgtacaaagcaaactgtaactattgtttctggtttaactagctctgaggcaataggtcactcaaacagccattcttctccgttggaatggctccattgctcaccattcagtagtacatagagtagtgtgcccactatgactattggactaatactaaaggaagagaaggggggcaggaaataaaggatggaaatgtgggttctcctttccaaaaggcagccaatatgctaaaactgtccaactctgacaataaattttgaatcactttgttttcagacacttatatattcatatcttaaaatgcttggcatagcccaaaagatgtaaaacacagctgttactgggcaatgggagggaaaatacacatggaaacttcagactcaaaaaatgagactgcttgtggatctgtagctgcaaaatggttattaaggccaagcagatagattgaagtattagcctggggtctactaagcagtatacagtcagcttagcctccctcgatgttcaaagtacatttggagaaactgcaaagaatgataacagattttattaaggctctcaccattaagaaaatattttcaacatagattcggatgaaacattttcttcatattggcaacattacggtttccattgcaaaagcaatattctcttatggaaagtaaacatgtcaaaagtgtgaagctgtagagtatagacgtgtgtttgtgtgtgtctttccggggattggaccctacctaaatcagtgctctaccactgaactacaccaccaaccctaaaggttttaataaataatcatttaatcatcaaacacaacccaaggatgtatacaaaaacttctaaaggaaagtgggcatgcagccaaagtcctacagggcctaacagagaaaaattaaaaaaaaaatgaacatgaaataagacttcctgtaaggagtctataattcaacattatttgactccactgtcaaggaaatagttgaaggacagtaaactcgtatgattctcagtcacttctgttacacagtcttaaatgtttgcaactgtcacacttcacatggcctctttttgtgtattatgacatctgtcatatttgtattgaagtaatactcaaatgtatgctctagttgaaacagaaccttttgctgtttcttttatggtaaaaaaaaagttgatatttcagattaaatacaattatgaaaattagtcctttacaaataaaagatatgagagtgtctgcatatggcatgtttatgtggccgtcgtatagatgccaaagatttcctaaaattctgaataaaacagaactataaattacaggaggcttgctgttcttgctcagctgaaaacatccagatgtggtgcttgtttaaagttagggtctctggcactggagagatggcttagtggttaagagcaattgttcttcgagacgacctggctgggtttgattcacagaatccacaggatggttcagaaccatctataactccagtttcaggggatccaatgccctcctttgttgacctatgtgggtatcaggcatgcacatggtgtacagaaatacatgtagccaaaatactcatatatataaattaaataaatcttaaaaataaaagaaagttagggacgaggagatggagtgtggctcaacaatgcagtgcttgcctaagcacatgtgaggccttgggtttaattccccaagccacaaaaagatattttttaacataaaatataaatgtaaaaaactcaaaacatacaacacatattctctcagttcagtttttaataataaggttaagatttggcttttgaaatgcagtaaaagtttgacatttttgctatcctttaacaattgtacgtgactctaacatgtataaattaaatatgcagacaatctcagtggtagttgaacatgccttcagttcactagaaaggcagagacaggcagatctctgagtttgaggccagcctggtctacagagaaagtgccaggatagccagggctacacagagaaatcctatttctgaaaaccaaccaatcaaccaaccaaccaaaaaaaaaaatctgcagaaatgaaagagaatggacctttatgaaaaatacaagataaatgaccatctatcccatatgctcagattaacatgctgtgctttcaaaattatggaaatgagagcatctttgtaaactcttaagcagcctctctaggaaatatacctgtatggagcaattgctacatgttttccacacttacaaatgtgacattttaaataaatggcataaagtatactttgtaaaataactgagaatacatttgtttaaatatttgtcactagaatctaatttcaatcagtttaatacacccaagtgcacagaattaatgcagttggtaatacttcactgggctgactcagacagcttctcttcatctagaaaatacactctcattaaaagaaaatatgattgtacgaatgttgtgaaattatgtttttcacttgtttcagagttcctaaaattgactaaagcacactataaagtgtatattcccctgtgaaaaacgacttatatctagacgtattcagttagattcctgttgtttattgttagcataagtagacatagtcaaatacaaattatagccagaattaggtcataggattttctgaagctatgaaacagggcctttgtgttctttgcatgacatatgcaaccatttatagacataaactaagagaataaataacttaaaaataaattttgtattatttataatttccagaaatatgtttcaactatcaattctttggcacttcaggacccacggttcatagatttatgttcaagtgagggacttgtctgtgcagtgaaaatttaggattttcaactctttgaaaatcctagtgatagcctgttcttctacagatgccagggactgtcacagtgtgtatgtgcgcaaagtataactttaaagacaaccacgatgtttttatagtttaataagattaatcaaactttagagttgggctgttttccattccacacagcacacagcctcctgctttacaaatggtttaagcagagggtatcctgagtcatttagaattcatgacagtgacattttcagtgatcttggcatcaccctaaaatcgatgtatggcaactcttgcatcagagctgggcagcacaaggtgactttgagggcactgtggcttatgggcgctcagtcctgcaggctttctctcctcacactgctgcccgagatgcctggctggggaatggtgtagtgaggaagagctgcagtgatttctcttctggatcactttggtttttccttgttttgaaaaacttatctgtctgagatttgaacctgcactgccttggggtttgttagccacacatgggattatctccggggaagacgttcactgtccatttagaataagaatagacagaggctaaagccatggaaccctgctagcatttgctttatagttaggtgaaaagccacacactctcagtcttggtcacctcctctggggctgccactcctgggtgaacagattagtataccagccttcttccttcctcttgtacccagatggctagttttggtgactgtattcttaattaatggtccagatttggtcccatatctccatgattggcattgtattctgaatttacattcccattatgacccacagaaacactttaaagtgaagtgtgtttttttttatgactattatgaaactctggaaaatgaaatctatggagaaattgacacagctgtcaagggacaaaggacggagcagtttgatgtaaactctgttttcttatgtcatctcaacttacagaatgcttctcttctcttaaaagattcagaaatgggagagcatgcacttccttaacaataaaatacctcttaaaactccacagctgttggatgtgttccctaacattaacttaatttgataggtaagctataattagctgcgacctgtagtgttttctgttattcagaagttattccttagtggtttgaaaagttaattccaaactgaatggtgtacaatgtctgatattctaaggcatacttgcactatttacatgaaatgaagtgtttgtctgccaggcctcagaagagagatccacctgggagggggctaatgatttctacaatgtaaggacaaggcaaagtaacccatgagctcccttggatggcttttaaaggtagccttccttctgcttattgaagtgttcaaattactctccatgaagctaaaacaaacaaacaaaaaaaccccagtgctctccataggataaaactcagacatgttatcttaaatctttattaatcacaaataccagcaatggagagatgaaactaaaaatagcatcaaatggtgtaaacgttatgagctatgtcacttatggaattgtctttagtccctcgctgaagagaagtttagaatagagatttggggtaactggtcattgagtagtaccttgatttaagattgtcactcctgagtcttctgagtagccaccttgccattcactcttgagcatgtcagtagatgggtcacttattcatattctattgtttgcctggtttaaaggaattaccctatgattctaccaaaagtataaagttttcctcataaggcaagggtggcatttcgccttaagtgggtaataggggttgctcttagtgaatgcatattgtcctcttttacagggtcgttcatttctttccatgagatcagcttcggttttgttgctgttgtttggttggtttggggtcagagtcttactatacagccctgactgacctttagcttaaaatatataccagtggttctccaccttcctaatgctggtgccctttaataattcccccatgttataaggacccccatccataaaattatttgtattgctactttgtaactgtaatttttgctgttatgaatagtaatataaatatctgatatgcaggatatttgatatgtgacctccaaaggggttgcaacccacaggttaagaaccacagaaatagacctgcttggcctcagtcttgttcaaagaggcccacctgcctttgctttttggatgctgaggttaaaggtatatatatgccttcacacagggtggccatcttcattttagttattgtgatttttcttggtcatagtttctaataaagaaaaattaggagctttacattttgaactgtacttacccataaattaatttgtaaaagaaagcaattgaggaatagacccagcaagcttcctttctttcagtgtgttctctgcccctagcccatgctgaaaacttctgagaaatactgttcatgaagtctccccagaagctgcttatgtgatgacttggcctatggatttgcctcatcagtggatttttacaagttgtgttcaataatagcatggtcaagacacatataaagtcctgtcctgtagctggttgttcgaaaaggtgctggtctactaatgatcgatgttctatgctcatcaagtgatttattgatgatcaaatatttttattctaataattattccagtccaggtacagtctgcatctgagtgagtttattataaacatttagatctggaattggggcttggcagcagctcactttgatttttccaagttcctctgcccttcccattaggaacatggttctttactccaccattggggctctctgaaggtttgcttgccaccctaacaatgagtgccaattatatagctctccctccttgccatttacctgatacttacatactttagacagtgagaaaaagtccaagtcttgtcagcccaggatatgactgaagcctggctttctaagtgactacaagatttatttatttacttatttttgttttatataaattggtgtttgggctgcatgtatgtctgtgtgaggctgtgagatcccctgaaacaggagttacagacagctgtgagctaccatgtgggtgctaggaattgaaccctggtcctctggaagagcagccagtgcttttaactactgagcaatctctccagccctccatgactagaaagttttaacaagggacctccagggttgacaccctgccctggaacccacactcttttgcattgacctctaagctaagtgcttgaatatagcgaagttgggcatcttgagatgcgagtttcattgacctctaagctaagtgcttgaatatagagaagttgggcatcttgagaacagagtctcaagtccaacttcaggcagccttgagaagagtctctctgaagaccatatctgacataaatcatggaaaatggtgaatagatctcctcccccatctccaaatttaacactgtcaggaagcttaaagatttggaaattcttggagacaacagaatcaagcttggttgaaatgctccagcaaatctgtaaggaagttagacgagattttattataaccgtcatgagcatcaatgttaagtgaaagtttccaagatgggaggggaaaacaagactgtaaagtagctagctttttcttccttggatcaagattgggattatttcttgcatggaagtataaaagtagaccaggtaaaactttggaaacactagagaaaaagcaattaagtctgctaacttttacactctcttggacacttggaactctccctccctacccccaccccaaatgcagtctcaggacaaagcacacaaatttgaatgtggactttggttgagaggtgatgtctcttcaccttggtgagcttctcccacggtttctgaaatagagaatgggcaaactccactcacccactcgccatgagaactaatgaggaccaaggagtaccacgaaaactgtgtcaaacagtgccccaagcactccattaaacaatgtgctttctttttaattacactctgttcatctttcaaaaacatcaattgacttgacaaaaagagatgggtactgtttgacacaggtattgttttatagaaaattttataattatagagcttcaagaaaaatataattgttacttttaagtaggtcactattattctgctaacaaacatggaataaaaagagactgagcgtgccacactcctgtaatctctgcactcaatacaacatgaggcaagaggactgggagtttgaggccaataagatgctgtcaaaaccaaaccaaacaaaacacaaacaagaacccattgcaaaacacaacacaacacaaaacaaaataaaacaaaacagaacaaaatgcatcaaagcagctgggtacagtgatgcacaccagaaatgggaggcagaggctggcagagctctgtgagcttgaggtcagcctgatctacagaatgataggccagctcgagctacgtagtgagactcttgagacaaatagagatagaaacagagagagaaggggggtggcatatagagaaacaggcagagagagagagagagagagagagagagagagagagagagagagagagagagaagcaaaccactgaaaactcactcttatgatgcaacccggatgacagtactgggtgaatcctgtgcttagtgagtgtgctgtgttcatgcatttgtttataacgtgtgctaaggatgcaatattttaagcatcattgggtgctcttgctggtagaatgcttgcttaggaagtttgtggtttgtggttgtttcgtataagacacctttgagtttatcttaatttctttgaaggactaccatcatttcaaatagataataaaacactggcacacaacaaacagtctcatacaagggactttataacactgtgtgttagcatttagttatagaatctttcctgctgctgaatggaaacgatataaagacaacacaaatttcagtagaaagctatcagatacagagtgtggcttgaagtatttagaaataaatatttgcaaatagagtggtgctggttggattagggattcatttgttgtttcactcaaagattaaatgatgtgaactaacattccaaggtatgatttccaaagcagcaaagaaaaggaaagatctatctatctatctatctatctatctatctatctatctatctatctatctatctatgtatttttgagatagcttgtcagtatgttgcccatgctggctttgaactactgggctcagctttccctgttgctgggactacagacacagtccattgtccctggcatagacacactcactaggagactttctggaatcaggctttcttttctcttctgttcactgcttgtggtcccactccaacagcctgcttagtagaatttgaacatttggtgaacttgaaccttctgtaaattacttatctattcctaatgccacttttgagatttgggtaaaactggttgtcaatacttgtcaactgcccttgagccatgagtattcgtttgtcttgtaacctgttgaatgtaccccatttggaaacctgttatcatctggggccacagggaggtctttctggaatgatgttaatgctgattctcaaaatagaaaagctgcagagagcctgtcagtgctgcctggattcatcaggaatgcttttgaaacattctgggtgttcttttacatttacacatcttggctttgcattgttcatctttaaattctcaaccatgtgcattcatcgtcccgagaattttggactagagacctaaaagatgccagctgtgggaaaggagggttttaagaagcattggaatagatactggatctgagcttcctcctcactgtccctcctacatgccacggtagtagatcccaggtactgagaagagaatgaagcatggacatttgtgtgagactaggtgacatatataagagctagtagacttaaatgtcttgcatgatggccaagctgctttaaattccattgggatataatttataacatttaaaatcactcgatactttttaccttatgcttatgcacatgatagatagatgctgtcgtgtgtgcataggtgtgtgcacacatgttcctttgtgcatctgggcttcgatgattcttggaactcatgcagtcacctgacagaaaactttttatttatagatgaaataactccttggagaattttcaccaaaggtttaaaaaaaaaaaaaagcacaaaaattcttcctcctctatatgtctcactacacagagataggagattcagtatttggaaaaactatcatttgcagaacttatttgtggtatatgtgaactaagaaatatagaattcaattcaacagatgctgtctttatttccacaaattacctgctttggctacatatcgtcatacatacaataacaaataatatatacacaatgtaaatgcatgcatataaagttgcttagtcatcaaggtttcacacttgtattatgtatgaagataccagctagcaccaaggtagcgggtgttgcgcctaaggaatgaatgactagatagccaaccagatatgtgtctagactgcgagcagaggaagtgtgatcacttggtgacagccacagaccctgagagaggatgctggacttccattgccttaccacagatttaccatctgccctagtctccaaaattaacccttgggcctctagtagtgaagtaaaagcccattttattgcagtcttaaataggaacacagtaagatcctagccatgcatggtgacaaagacctttgatctcagcactcagcaggtgtatctctatgaggtcaagagtgagtagtctggtctacatagtaagttcctgtacagtgaaggaccttgactcaaaaacaaagaactgttcagacctacagatttgaagaaggtaagagagcaaggtaaaggaagagaggaaactgagaagagaccaatgagttggtaaagacagtaggattgagcgtgcccaggagacactgttttaaaaagccagcagttgatgggtaagaacacttgccacccacatgacccacacccctgcttacatctgccactaaagccaactccaggggttgcaatgctctcttttgacctctgggggcattgtagttgtgtgttgcacaagtagataaataggcatatgcaccacacacacacacacacacacacacacacacacacacacacaaataaagcgaaatggagtaaagtaagataaagcaaaccttctgtcaccagcaattgtttcccactctttgtcaccagcaattgtttcccactctttgttatccttcagcaggagatgtgggcctggaaatgtttaatctcaagtgccctgtttaatgtttaaatcatttctgaagactgttctaatagtttaagctttatcattatttttaagtgcgttggtgttttgttgtgtatgcttgtttgtgtaccacatgcatacagatctgcagaggttagaagaggatatcagatgccctgcacctggagctatacatggttgtgaccctctatatgggtgctgggaatcaagccaggtcatctggaaaagacatcagtgctcttaactgtagggccatctctccagcccctccctaaaacactttaatgtggaccttcactccacagcttttgtgtatatcaaagtattaatgttttgaatgcttctgacattgaaaaacaactaaaagcataaaaggggaagacacagatttactccatcaaaacaagcaaacaaacacaaaacaaaacaaaacaaaacaaaacaaagcatactgacagcccaaacttcctttggttagctgagttttgtttaatgagttccaggaatctttttaaatgcctataaagaattttatgtttttttttcttaattatctatattttaagttgagaagatgtagacttagaagaacattcctccctcatctctacaaaatgcaagtgtctaataaatagtggctcaatggacttagtgattgacagtgagttttggctctaaagcagatgcaaatggggcctgcagggatagcagtgggagtgccagtctatcctcacacctaggagcatctccacatccttcattcccctgtttcaagtccacactggtaaataggattttgtttcccactgaagtgacttgcttggctcctccttccttccagtttcttggtatttgcttctttctggcctttttccttgaatggtagttttggttacagggtttctcaagaaatatattggcggataccatgtgcttgtgaagatttaggaaagacactttggaggcagaaagtagagagctggggttaattaattagctctggctctcctggtgtggtggggtggtgccacttggcaactccatcctctatgataatggctaagtgtgatatgtgtgtgcaggtgagcatggcatgtgtaggcatgggaatctgatgtgcatatgactatcaagtacgtgagtacgtgtgttatgtggatcaggattctctggatcgggaagtctcagtctctgccctttgacagaatttaaaggtgtcagttcttccaagtcattagagattctttgttagagagccctggtggtttgagagcacatgtctgtccccagtgagtacctgctcacgggtgtaaatgacccttcaactttgaacccgacttgctccattgtctttccatagcagccagaagacctcttctctatcaatatcatgactcatttctctaccatttttgagaaagaccaggagggaatagttgtctctattgtttttcagtagaaaagatttaattttagtttagaaaagaggattttaacatcattctgatacaagtggaaacatcacattattttgaatactataaagtaatttataacattagatatcaaattaaacttgatagggtgggaacaagcataccactgtgaaataatgttattctgaggtgaaaggaagatccatttgcgttctctgggcacagaacagctgggagatggcctagctcagtttgtttctctgttgcttgataaatatcatgaccaaaagcaacatggaggaggaaagggtttataaagtttacagttgcatgacacagggcatcatcagaggaagccaagccagaaactcaaggcaggaaactggaaacaggaacagaagcagagatcgtggagaaacactgcttgctggatggcttgctttatggtttgctcatcttggtttcctataaactcttaggaccacctcctcaggtgcattgctctccacaattgacttggctctctcacatctgtcattaattaagaaaatgctccatacaggagtcttcccagatgactcttgcttgtgttgggttaacaggggtgggagtggagggatacacctgtgtgtagatgtctctaactttcctgttagatctgtagtgctgtcacttagtgagtacttcctgcatccttgaagcgtgtctatactatatctgcatggtgcagaggtttaaggttttcttttgagattttttaaaaaaaatttttcatacatatatgccatcgtactcatatttactctccattccctcccttgtccttcgttgaccctcctccttgcacctttcttcctttcaattgttccagggggggggcattttgtaaaattcagttttacatataaagtcgttaaggtaagagaaattgtgacttgtctcaaactatgtaaatggttcaccaaggttttctgatttgtctaattctgtatccttccttccttccttccttctctttctgtggtatgctacaactagatattaatatattttacagtatatataagtatttgagacatatttagattcttcaaatatctgtggttgtcttgtaatatttaacataaacactcacaatatcaggtgtgaggtcaggtagagatccatgtctatttattaatctattcatttgctcaaaaacatatttgtggggctggagagatggctcaaaagttaaatgtagtgcttttgcagaggaccagagtttggtttccagaattcgtgttgtgtagctcacaattgtctgtaactccagctccagggaatctaacacctctatgggcagttgctctcaagtgctcacaaagagagagagagagacagacagacagacagacagacacatgcagaagctactttaaaatcatttgtgtgtgttatcataagaacatctcctaggctgggaaacaaaagatgaataagacatgttctgaagtattcattgcagagacttgtagatgggcacagcagactaccacaaagcaacaaggtaggaagtgtgccaggtgagatgaggctgtttgagtgctctagagggaagagcttcatccagggacagcatagatgtatcagagaaggcgtaactactaagggaaaactagtggctgggtcttacagggcagggcaggccgtcagggacagagggggaagggattaggcttggagtgatcacatgtggcagggtttgctagaatatagcaacaaggacaagactggcccccagagaggccctgcaggcttcgtgaatcaggctaatgaactcagactgtactccataggcagtagggagcagttcattccgcatcgtttcatgagcaccatcacagggctatgcttgatactcagaacctaatggcgagaaaaacagaaccattcctgccttcatggggctcaagctttagtgaaacccagttcttcctaagctggggagatttgtgtgacaattacttagtgataaaagtggataaagtatgatgactctcataattatggaaagagggggagggggaggggcacagatggttgttgaggttttaccatggaggatggtatgatatgaattaggatggagaataaaacagaataaaccaagctgctgcatacctgcaatgttagcactcaggaggtggagacaggagaattgctgtaagcttgaggtcatcatggtctacacaatgagctccagaccatccagtgagactgtccttaaacaaagaagcaaaataatgaataggaaggaggctttggggaaagaggttatagccttggacttgttgagtgaagcaggcatcttcacacagaggtggtcgatcacactgttgttcatgtaagtcagaagagcagagaagaaatccatagatacaagcctagtctatatctgtgctaattcactttacactagtgaaaggagttgtccaaggataatgtccaaggtaggaagaggcctcacaatatctcagagtctaaggcggagatggaaagagccaatgtgttttaatgcgcagtctgttgagatagggctgggaaagtcagaaacaatgattctagctagttccctcagctttagctgtgggttgttccaaggtcttaaaagagcagtttgggcagattgtgttactgtccttgtcctgaaatggcctacagtcaggagaggtcatatctgcccactaccagatgcctgcacaaccctctcttaataggaagtaccagaactaaaacactgaaaagaaaacaaaccaaatgagtttttttcttcattcttaagaagtaaaagaaaaacaaaacaacagcaaacaaacaaaaaccagaaacctttaagctgctacagcaagagaagatggtgaaaacaattgcttgcttcaaatatttcaaattgctctttttgaggtcctagaattagaaacacaaatggggttattttatatgcaacatataatatttgcacattaacggagaggaacttctgctagagggccagtttaactgcctcttcccacctatgacactcaagccctgtttggaggataccactgtgccatcctgcacgtggagattcagtgacgtcagaagtcttctctttagctttgtgtctaggcctgtaagtatctcctatactaatgattcatatacttttagagtcacatgctcccttgagatctgatggacagttacagacatccccccaaccctgtaggaaaaatatgcaaataagtatgtacataaacatatgaattaacggaacagatgcccctctgcccctgacatattccataggtggtaattggacttcaggttagggcctttgtcttagtggctttctcacggatgacaatatagccattactcattctgaaattatagacactgaaggcaagaagcttctttgagacttaatttagggtcatgactaagattcgctgtgcgtctaactgaacacaccgttgattttattctgtcagccttactttccaagtggcctcaagcaactcacaacttcacagatttatatacttaatcacatgcacatattttaattccaaaatgatgatgctgtttggtgagaccacatatagtcagagacatgtgttaaaactaaaactccctggtagatggcttttgggggagttatttctgattagggctctcttacatatttatactggaagcattcatgagctgattctggcacttggactttaatcttgcttaatgaactgaagtaagcacaattctcgttctgttttggtaaccctgtggatttcttctgatactcagtttcatgtgactacaccattcttgaaatgctaatacacgatgctaattcaaggaagggccacaaaagttagacttcatcgcaaggtgctgcgctcagtattcacaggcctcctggaagaggaaggctctcagaagaatgatattagctggaaattatgggcaccttttggcgcacacaccaatttaaacatataggttgcacgaaatttggataaactgaggtggaatccaacacttcttgcatgaatgcctgtataatgtggccatagctgtgagaaaagaggagcccgcatctaagacccaacacaatgaaaatgcaatgaatcggaatgcctcacagatcatagcggaatcagaatttccagcaaggaaaatcttttcatggtgaattaagtggtggatgaagaaaaacggtaatgaaaaaggtgggcacagaccacaaacactgagctcagggctcactgctgaagatttaagaaccttagctaaagctatgcagaatagaatgtggaaaattgaatttactaaacaattaagcattgaattaatctacatcctgcacagtagagaagtgggggagggagtggagccgaactgaataaatcagcggagctcattaaaagatagtgagtatatcaggtctgttgtggcagaaaggagggcagtttcctgcctgacatggaatgataccctggttctaagtcacctttttggagtcctgctcttaatcagattaaccaccgtgtttctgatgaggttaggctgtggctctgtattttagcttgttattgctagcctttctattaattacaagtcagatcaccagtcaacaatagtggtgagggacaacataaagaaaatgagagtgcccaggagacgtcactcgctggatctcctgcatcctgaaactcccacgggctcctgcagcctcccacacgccttgctggtcttttgttcaattacagttaatgcaatagtttgccattttctccttctaattatattttcaagtgggatttgtagcacacagaaaaacatccttttacatgtcgaggcaccagggttttgtgcctggcattgtctgtcccctgggtgctgtaccattctctctgcagagctctgaataaacaagtcccccttttagagctgcagttgtacaaactgaaaatttatgcattaactgtttgcattctgagcatgtgttccagattgcatcttacagcattcttctgggatgctttaaaatgtgtgtctgcaaaaaaaccacattccatgtcaggcagcttctcctttcacagttcacatagctcgcaatgattgaatccacacatcaattagcactgtttttgagaatatgtacaatgggtgacttaaacacacaagtggtgtgctctgtgggttggttccatttgggggtggcagcagtcctcaggccttcaagggtggggtgaggtgttcattgggggaacactaggtctctcttggggctccagtgcagcaggccttgtgggcaagatcttcgttttcgtgaccctggatgtctgaatagtttgctcttctcattgtctctgggatgggtaaatgcttttcaagaaataaacaaagaacagtaattctgctaggcatagtctacttgtggaagggtcaataaactttactacaacagagtcatgaaccatgactgtctataactgaaatgatgtagacatattttacacataagatcatcttgcttttccactaataatcttgaagacaaacatcacttcccagccaagagccagctttctatcctgcatcactcctactgcggggtatgaccagtgactcatgaggctggttttgaaagcaaatactaaaagctcattcaagtcttttctggtgataaagagagatttggaagaagtatcgccatgattgttttccctaagaattgaatttacagccaatctgaatgttactttcaaatgcacccagtgataagaagcaacatctgttttctgttcaatagcacaagaaggctcggcatggggttgagtgtacacagtacatgtgaatctattgttagcttttcttttttgtctctgtgcccggtccatttgtggtgtaccatcaggcaaacagctgacacactagctattatggaccaggtcagattgtgagatcttgaaagccctgacagatttgtctcctagaatgaagcagaggcctctgggagcacagtgttaaagactagtacccccatttggcatttttagtgtagtagagggttaaggtgtagttagactcaatgccccctttggctgaaatagtttccttgctaataaagcactcaattacttatagcctgactattagaatctgggagctgaaattggcagtttttcaacataacctatgtagccctgagctagaagcagttttgaagattgggaatgatggcatggtgtccctgtagccctcctcagtttatccttgtctaatgggatcacaccctgtctacagatggcttttactcagttgtctcatttgtgccccacagccctcttggaatagagaccatgatgacacggcatccactcgttcaggaggaaccccgggcccttccagcggtggccatacttcacacagtggggataacagcagtgagcaaggtaggagaggtgttctcattctcccttgcttcttgctttgtggtcaagggttgaaaaatgtcagaaagtcagttattattcatagagcttctctgacagcataaatcccacatactgtgagaatctgttcatcttgttttgtctctggctcactcttcagggccattccagttgcctgtcacctggtcaccttcatgaatcaactgaggcaagtttagagaaatataggaggaattcaaatatgcccagatagcatggtactagtaccctgctgtggcatccttgggccttctccagggaccaggaagaaacatccatgaagagtccaaataaacactgtcaccttaagatccttagaaagagctggccacctacctcaatggtagagggtttaccttgcatgctcgtggcccttagtttgatcccagcattcccaaaagtagagtgtgtgtgttgggggtaattcttagaaggcagtttgacaacctatggtaggtttccctctgcactggggccatttttttctggtttgatatatttgactctctttgatgtgtagcttcattgaaagccagatgagacacaggagggaagccacatactttgtgtcactctttggaagctagacactctttgtgtctacacagggggtgctcatggacatacatgtttcatggtaactagtgaaaaataaggcttaaacatcatagtagtcttcagcaacaaggagactcaatatctaaaggttttacaggagggccttgctcctaaggattttgtgtgcaattaatgaaattaaagttaaaaagtttgtatctgactatgaacattgcccctgagtccacagtaggtgcaactttaaattttgattttgtgatcatttttttttaactggagtgttattcagcaagaaaggaatttggtcttgtgacttaattgggagacaccaattagaactgcatagtctacaatggatttagcatgattgattggaatccaggagcaggggttgtttttgtttgtttgtttgtttgtttatttgtttttaaaaggcatatgtgtggtgttcccctagcctcagaaataacttctacaaattgagcactggagacattttattgttccaaaaattcttttgctgacttcatcaggagtagaagcctagtaaaaatggaggctggaatagtgaggcagcctagagctgaggtagcagcaggtaacctttgacctctgacttttactgggaaatgatatgcagcataaatccgagaggcctttctttttctcttccaagtgtgcctgtatgtgttccggcttcgctgttcaaagcgagggtagtgtcagcactttctatctgaacaattccactttacactatgagttctccaaaaggggtgaatgcaatctaaattctttttcctacagcccagagctgctacaggggtcacagcctagcgttttgtttgcttcatttttgctttcatttcttgctttaaaaaaaaaacacatatcatctaaggatcagcaggtcgtttacccaaggtggaaaagctcacaggctgtggaagagtgtgagaatttaggactggaatgcacaagttttcccaaacacagtcaggggcttttgaaggacaaagatccagcactatcccccgccccctctgcccatagctgccaccagaaattaggagtttgtatgtttcttacattggaccagtgatgagcacagactgtggtgaacacatatcttcaggagccgcacaccctgtgtggtgtgctttctactcctgctgtttcaagatcactcaagatctcctttgaatgatcttggctgaatcacttgaaaacaacctggccttggagacatggctcacgtggttaagagcactgatgcccttacagaagacctgggttccattcccagcaaccatattaaacagctcataacctcctctacctctggtcccagggaacctgacacccttttctggcttccttgagtactctgcacatacagatgagctagcacatacacaaacatggaaataaaaataagctttaaaatttcaaaaagctactaaaatccaccctggtgccagacaaagtagaggacgtcaatatgagacagataaggttcaggatgtgtggaggtccctgcgcagtgcagaccaacctgccaccacttcctgtaagtgtcttctcatcccaccctttccctcacctgtccaccaaagatccaaagctgactacccgcacagcaccgagagcaagcagttctctgtgctgagccccgcctcctgctaaggtagcagcaggaaaaggaggcatacctttagtcatccttgcttttctggtggcttttctttggcaccatgaggttattcctgccgaatgccgaatgcagaatgccgcctgaaagtgttgctaacacaacttgtgtgcgggcatttccatgctaaccaggaccctcctaaacctgttttcttatccctgagacctgcggagctgaacttttgtgcagcatccggattaaatgtgcacagtggcgtctgcatgctttccctttctgcctcttctggcaggcacgggagtggaagcagtggcagcgtttggctcatcatacacatcctaaatagttatttacacagtttgagtccatgtcagtcaactgaataactaacggccctcttcaaaagatttataaatccataaatatgccatcatacatacccaatagaaagaaataactaaatctgtcaagaacattcccaaagaagtgtttccctcacaggcaggagcaggacacatttcaaaactttcttcactacattatatttgaattggacttattgttagttttttggttttgtttttttatcagttcattagggtagctgtgaaacaaaataaataaatgggtcaatagacagacagacagacatataaaaagtcccttaagctttgtcagtctgtaaagtagccttgtaggtactaaacacctatgtacatttcatgagtcctgtatttttgaaccttcaagaaagtaagtcatctagaaaaatcttaacttcctgatacattcagaaaatacaataactttcttagaagtccagcaattttggcaattctctaacacctggtctttttcaccttaataacttataatcaatgaaataattttaagatgaattttgcataaggataaataaacaaataaattgaagtgtaggcattcaaaagaaaatatggataaggtctataattatgaagataccaaatatgttatgattcagggactcaatgttaattcatgatttgtccaatatgtccatgttggacttccattgctgcgtcaaaacatcttgaaacagtgtcttaaagaaggatttattttattttggctcacttcttcaagggttggaaccttgaaaaaattctgctcacttgtacctcctctgtgtctgagcatgtgtgtgtgtgtgtgtgtgtgtgtgtgtgtgtgtgtgtgtgtgtgtgatgaggtagggcatgtggggtagcagtgtgtcacttgatggtagacaggaggcaggaagacaagggacagaataagatataggacatgaccctgcgacctacttcttccagccaagccacatatcccaataatccatccaactgtggatgtgtcaacagatcactccgttgataaggtttaagtcttcatgtccattcacttttcaaatgcccatcagctgacaaccaatcctttagtacatgaaccttttgagggggcacttcatatttaagccataacaatattgaaattacttattacgacaactcttcctgtgtccactgcattcatttcacattaacactcatgacccctttctggaaattgattccaacagcgaaaccccttaaaactggcttttagaagggagggcttcatgtctgtcatttggatggggattctgttgctgttgctatgacattgattattttttttgtctgttctataacttccttgaaagaatatccagttgacattagagtaaattctgttttatccccttggctctttgctagcttcctatttttttaggagaaacagcaagtggaggagatatacaagaaggtcacggtcaaagtcaaccttctactctgggcagtgcaagtgtgttagaatggggtgtcctcagcattcctgcgtggtgtgcttgtagatagtgtacactgccaggtgttcatttgcatatgtttcttgtatctttctgtgcatggttgtcctgctgaacagagcacagctccattgtaggaagtggtttagagtagaatgccaagccaacctagtgcctcttcctactagatccaaactccttgctgcagccattctgcctcacaagcagttttagtaatgattggcagaattatgagtttggacatgtctccatagtcaagtgagctgcctagctggtgataaaaataatagcgcaggatgcaagggggtttggttaggtaggcacatctttccattccctcatcatgtggactagttcatgggggaacagagaagctaagaggttacctaaaggtcatatattggttggtgaatgaattgaggctcaacactgttggtgtgacctaagaacctgagttcctgccatgtactattccatacagtatcttcatgtgccttgtgaatgggaaagtagactgtttgtcagacctctttctgttgccaatacagtcacccttctcctgtgcctgtacgggtcaggtgctgagctccgccatggaatgggtggagtcggtgagctggagagtacgaacctagctttatattctaagaggagcgatgactgtggcgttccagtgggagcacagtgattgataggattcatttgtattctgtattaagagcctgtactacttcccaccttcaaagacttcccgagtctagagtaagagcatagaagacaaggcagaatatttctcctgctgaacatttcccatttaaaactcatcatatttccctgtgtgtgtgtgtgtgtgtgtgtgtgtctgtgtgtgtgtgtgtacgtgtctaaataaaaagtattattttgagactggattttggtgaaaaacaattcatccggaaaggacttcaatgattacttgatactctaaaacccacttatcaggggctggagagatggcgcagtgcttaagagcactggctggtcttcctgaggactcaggttcaattcccagcatccacgtggcagctttcaactgtctatcactcctgttccaaggaatctgacaccctcacacagacatgcagtcagtcaaatcatcaatgtacataaaataaaaataaatagaatcaaaaccaaaaaaaaaaaaaaaacctacttgtgaacttcttcaggggcaggactccaatcaacaacagggccattgaaaaacaccaaagctaaagcagtgtgtctctctaaagaggacattactgacaagctgtgccgtttctgtatcatacagtatccatagttgtgacgcctcccactgccctcatcccctccacccagcttttgtatgagttcaggcaacagaggcagagggcaagtctctgtactactgcagggaatttctaggcatttgtttagagcagtgaggccagcaggcagagttgtgggagagggggtgggaggcagagagggaggaggggaagggccacattgtgttccagatgactgagcaaggatttatataccagctcgcctttttacatgaagaagaaaagtaataacagcccaaacccatgcatttgaaacagtcagctgtcctgtgaataaagggataggtgagaaggagctctctgattggatgtcttaatgagcacatttcgcgcagagttggggctgcagttccccctgacctttgccctttattgaccaaactgacacttcatttttcacatacttccaattatggcttggcttaagtgttaccctccctcctttatttctttcctatggacaacttgagagtggttgaggccacggaagatattttaatttgaaaaagtgctgtagcaactcaggtttaggttgtaatctgaaactgttctctgtttgcaatttttagatgaaaacattaagctaatactgcttgtttagaaacagttatcttttaaaaaaaatccaagtggttttaaaaacaaaatgttcttagaaaataaagaaacacttagtagtccttccttccttccttctttccttccttccttccttccttccttccttccttccttccttcctcccttcctttatctcttcttcctttctttgcttcattagtttgttaggggaatgactgactgatcatatttgttctcacttgctccttaagtattgcttctctcctggggctgcttggatgtcaatggctctctgactctctgctatagtttgattaaaacacttttgaggaaaggacaaagtaacacagaattgtgcccacaaactctgaccctcagcttgtgaccactctgttgttttgcctatacttgctactccagtgcagattaaggccagacctttacatgtagtgacagacaggataggagaacagttttctggtgggaaaagtcaggtataaaaaagaaaagaggaagttattattctccacaagtacccgttatcagagagaccatgttattaacttatcagacaggagagattagctgtgttgttttccaagaccccgttgtggcgcactttcttttccttttgctgacccagctacgtgactaatccttctcttttctctgtttgcttgatttattcatcacaaaagcagagtatcttaaagaaacatttcttcacctcttaagcagtaacttttatggcacgaacttggctgtaagcatgttcagtaaaagggcatctcctgcctattagaaaatatctctgctaaactggaggtcattgtttttcatcttaaacaaccaaaaaatgcacttggaattatggacagagcaacagagttctctttaacagatccctgtctcaaaagtgaatggaatgttaccttctttattatgtagccctctggcatatccatggcatattttttactataatatggtaataaaagaatatgtgaaagacagacaaaggttctgtctttctctgtaaggtgacctctgttaccaagtaactgctttacttatgagcttattaaaaactcaaaaaaaatgagcttttcatacttcacaggcattgatgtgaaaatgagctgtcctgtgagtagttttcttgatcatttttagaacaattgattagccagagagctcctgtcattagttgacattgactgatagcaatttgtcccgagctctgaaggtcagttagatagctgaagtttcagcttgcctttgattgacctcactgcttccattctcctgtgactgggcttgaatgggtctgaccctcgactggccaaggcaggacattagtcaccagggccgtttcttagcttcttgttgattgttcatttttatttatgtgtgaactcagtctgtatttcttaccaggttctatatctcagttgttgcaacttagaagagatgctattgattaaatgtgcctcgagacacagttcggttttcctcctggtttggattgaatagggagctcagaatgtgacgtcacagaatgtgcctgtgttatctgagtagaccgttattgctgcaagttgtacattggtgttgtgttgctgttgcttttaaggggcaagggttatagcatggcttacacactctaatataatacacaaactctgtgactcctctggttactttgtcttcctagaatcatgcactagttttcaataagggaaatgggctggtaagggatcactaatcttctcttagatcaatgcattctcgagttttgcagccagaagctgaagccttttaaaagaagagtctactgctttgttttgcttgtctgtaaattaaagagtacttcttgcttactaagagcttactaagagagattggtggtccaataagagcagagtgtattttctactgtggtggatctgttattttatacttataatattctggtctttcttttctaagctttaaggtatttttcaaaaacaccttgcatagagagaatatttttggcacccattaatgaaataaattttactattttatgcaagcaagaaaaatgtatctcttagctttaaaatatcaggtctaaagttctaattattcaatccagtccctgggtaaggcttttcttttctcttgttccttcccttgtaactctgctctgggtcttaaactgggggagaaaaaggaaaggaaagaagaaacttgttctttaggttggctttcctgaatgtttcaaggccaccacacgtcctggcacagtttaaacccatggtgtggtttctacccaagaaaaatgaatgaggagagaatccattgttccaggtgtagattctccacaccatgtcattcttggcaaggtacaagtgacgaagttaatattagagatgtgtccctttaacatagcccaaggagaaaaagtgatcttagaattatagtctgtcctgcagacacatcaagacattatcaggggctgtatttaggaaccgaggtgtaaaggtctagtcaattcatcaaagatgattaagttcttccgggtattaggtgtgagctacgggggtgagcaagtcattcattgtgtttgtccttaggaagcttgtgtgtgctaccaagaaaatcaagcatgtagtagtaaaatggtcactaagtactgggtattcttggaagctttgactgtgctgagtcctccatgtactgatggcccagccctggggaaccagtctgagaccggggttcattgttcttagttaccattagttacttggctgtcaattcatactgaccttcttcaggggattttgacatcttggttgaatccttttggcagtccaatgaagccagtagataactttgacagagtaatattttttactaatatgtaaaatatgcaggattagatgggggcactacttgtactgaaatcccattattttaaattttctaatatagccgtgtaagttctatctttaatatgcattcactaataaggtctatcagtaattcctttgtctaatctacttttgaagcagtgatgaaggtagagtatgcgatactgtgtttgtaacaggcacatatgtaatatgattgccgctgggaacaagtcatggggactgctaaaagttatggggtttgtaacttgcctgcatacagtgttgaagaaaatacaaattccagttagagattagtgagactcagagtaagatgatgatctttctagttctagctagttatatccctttagttctaactgtagaggtttctggtcagagagctgaagcattatctgcgggacttatccccgacccctggggtggagcgtctgaccctcttcagctctctaccaggatctcatgttgttgttctttatcatatgtcgaggtgagcagtttatgggtcatccttcccaggcttccttggaagggactgtgtattcatcatctttaagtctcctgtgccctgcacagttgcagtgatatagctatgaatggatactttcttattaaagaggactgcttttaaacctcaaatgtactatattcccattctagactgattgcttctgggtaatttcagacagaaatctgtcaaagtataaatagataccaaaatgccacttgtctcaacgatgcagtttgagggcccaatcagggaaagaattaatgggaggctatcagaagtcaatggtagttgggatgtgctgtaaaccactctatgtgtgattcttcgttctgcctacttgcactcctggacactgtccatgccacttaatgggtgaagacagccacaggactgcagggtgaattctgaaacaggaagaagagtaacaatgttaccctaggaggatgcccttatgccctttgcccttcctagtagcagatacagtttcctcccctgggatgtgatatttagctctgtccccaagttcatctctcttccttcctatgaatgctagcattgatttaaaatggtagcagagattttggctgttgacctacctagctaacaacaacaacaatgacagcaacaatactccaaacaataaacaatttccttaaaaagatgtagtgttgtctgcctcttgtattgattagtccctgaagtgcatttggtgaagttgggttttgcccgtgtctgactttgtggattagttcagtcttgcagataattttccataattacttaacctgaaagtgttctatctgattagcacagttagctttggctttcttccatttatcaataataactcatctagattcccttctacatattgcgcacaacaaactgctgtttggctcccttttgcttgcttctatatcataaaaagaagacaagatgctctacagcaagtcttcaaatttagtcactgtcttggggtttctattgctgtgaccatgaccatgacaatgactgtgacaaaaagcaagttgcagaggaaaggatagttttcagtttaccattcttgggttacactccagccctgacagacatacatcaaggaaggaactcaaacaaggcatgaacctaaaggcagaaactgaagccgaagccgtggagtagtggtacatactagctttgtccccatggcttgctaagattgctttcttataacacccaggatcaccagcccatggtctgcactgcctccagtgggctgggttctcccacatcaatcagtaattaagaaaatacactactgacttgcctacatcttatggaggcgttttctcatctaagtccctcttcccagatgagtcaagattgtgtcaagttgacctaaaaatatcccagacagtcagcataatatatttttaaggaaagggaatagaaaagaaaatgcataaaatatctaatatctttatagatttgttactaaaagtcagcttttgatcaatgtgttctctatagaacttcatttgttttagttgactctgcccttgagctctcctattcaaaggtgtttataataccttgacattctttttacactttgacaccttgggatagaaacatatatagacgtttcttcatgtacaatgtgatatgacctgattaactcaccttaaatggaaaataataaaaataaacaatgtttctagtgtacctacccttcggcacatcatagcttcacaacaccacacattctaggataccagttgcttatcttcatgttcttaaggctgactgaaaaatacaactcactgctattgactaacattgtgagacagtgtattgccgcacatcaccagcccaggaaaagatccatacatgacatgtggaatctattgaacatgtaccacattcccacacctgaaaagacgagaaatcattagtttaaccataagttggtatcatctatattgaactttaagaaagtatgtaagtcaaaaagtcttggtactgggaatgtagcttggttggaagagtatttacctagcatttatgaagcccagggatccattggtggcactgcatgaagctgggtgttggattgtcatgcatgcctttcaccccagcattggggtggtgaagatagaagggacagaaaatcaaagccattctcagcagctcagtcaggtagagctcagtcaggtatgggccccattcttgaaagaaagacacagaggatacgttgctagccttcaagagagacagaaaaatatgtaatatacaataatgtataatagctagaagttggcagttaattaaccactgatctaacaccttggagcatgtatgaaacacattatgctacaagatttatagtatcatgacagttactcagaatgacaggaattgatatcagaaagaaattctcctcatgtcctctctcaaggagccctgtgacaccctcaacatctgcatgactcctcctaatcccctcccctcctatctcagtgctacaaatgcaaaatcaccccataactatgctattccttgacctgactaggtgtgcagctcacacccagtcacacctttacagttgccatcctgtctcaatatgctagttgtctccgttggccattgtcttaaggtgactaaggtgttcattatcttgtgataccaggagggctttccccacttgtctatctccttctgatcatttcctggagtgtcagcttcatacttcaaattcttttccctctacctgaggccaagcaaggagataataacattcttgtcattctgttgcctagagacaggttaatggagccagagagattgagatgctaagggacatcttaggtctataaaagggaaaatctgtagttaatattttacccaataaaatttggattatgggtattcagattacaacattttagcaccaagaacatccactttcataaaaggactacattttaatgcaatagatggaattgtttgatgctggagattgaagcttatgaatgggtgttcccaaatgcaggagaggtgaaaacagtcttgttcacttttttttttcaaaacaaaatttctttctgtatccttggtcatcttggaactcttgctgtagaccaggatggcccagaactcggagatttgactgcttctgcgtcccaagtgctggtattaaaggtgtgaactaccaaatctggtttgttcactaagttagtgagcacaaagtgaacatggattgtacaagccaacgatgtggtaagatgtgagcattctgaaggctcactgggaaagccaacagttcacctagagccagagaagatgtaagaatgaacaagcccagtgtgatgcaggggactaacaaagatgcagtcccattggtctggggacagcctggcttctgtctttctgtggcaagcattcttgtgaagcctgagtggaactcacacattggtccttcactagtgcctttgtttttggcaactacttcatttcccagaattggccctagggaaagaagcatgattgctcatctagctcctctaacagagtgagttgctgatatgaagatgggacagatgcatagagtatgagaggcaagtatgcctttacataaaggcagctacacagcataacataggaactgtcagtaggagcaccggtcaggatagaaggaaggatgcatctgatggaaggcctaagaggtgataacacccaggaaaaaggcccccagagcctcctaacacttctggtacttattcaagaagcaatcagatgcccctgaatacattctagttgtgactcaattcaggacccagtaaaggagggatcaaggcacaggaaggctggcagtagcctggcagttcaaaagtaccaagtctgccctaaagcagaggatgggtctgaagcggggaaggactgggctagactgagagaccatgcacacatggtgacaggtcagaaatgacaccaagatctcagactgggatgcaaggattccattgagtactccccctcacctactgcctctgttgcctccagaccttctttttcttaatgttttcactcttacctgttttgtcaaggtaatcatgcattcaccttgtgtgtgtgggagggcagagaacaacttgtttgagtccattcattctctccttccaccatgtgggttttctgagattgaattaacgatgtcaggcttagtggcaagtgcctttacctgcggagccatctctctttctcctattctcttctgctgttttgttttgttttgttttgttttgttttgttttgttttggtttggtttggtttggtttggtttggtttggtttggtttggttttgagacagtgtctctgtacattgcattggctatcctagaattcactctgtagtctaggctggccttgaattttcacagaagttggcctgcctctgcatgccatgtgctgataataaaggtgtgcacccccaacccaacttcattgtgtagtcctcaggtctctaggaaaggatcacccagagaaccagctgcctttacttagtacccaatgggcaatactaatccttttcagcccttcctgggggtgcactccagctctctgctgcccctctatactgcagtctcatggagaagtctctggctttggtgattgggtccagggcctgggcagaaagagacttgtcaagttctcatgggagttcggtgactcatttcatcagctcagaagattaggtgaccccacccccgccccctgtttgacaactggctgatgagtgtttcctgcaaatcctggagtcaatgctttgcctcctgggtatcccagggctgcacagcctcatccacttcctgcctacaaccaacgttggttgacttttatgctgaatcttcacattacctccccaagtctagtagaatctaggatcgagatggtatagggctttgcctgctgattaaactgattacatttttgtgccaaaatgttaaagagagaaaggatcatactttttaaaatattgaagtaattagtatttgactcaaactttctccctgggacttagtatgtctatatggaaagttctgtttaagcatagtgtattttgtatatttagagtctttgtttggcttttcaggttggttgtattcccaggtaaaggatttgcatgcttatggaaggattatcctttcctttgttcctaggtgtctccatgctgttaggagtgagtgagcttgcaagtaggaatggcttgactaaaagatgaaatgttacaagttttgcaccaagagacagatggaagcatcactgttacacatcaagaatattttctacactccttattaatttttttcttggtttgctttttcacaattgaagtgcaggcaatagtttgtgtattgtggaccagggccactgtcttagatgccaatcccagcccttaggtttaattttcattcttcagatggaagcctcagctttcatggattcttactctgcagctagaacaggctctatttttaatctttaagtcagatatggcatggagccctgtgctgccttgacctaaatgcatggctcctgttgatatcagtgaaccttgtgacagatttgaaagaactcatagcttctgtttaaatatcagatgttctagaattgaacatcctgagcaaattctagcacctgtcaagttaaaatgaatcattttttttttttaaaaatgtggtggcacactggtttaaaggagtaatgccacacagttctaggtagatatgcacataactttagagttggttttttaagccaagagagggatctaggttcaggaacctggatagcacagtaaaagccatgctgtgctgacttacataaaaactggtcttaaacagaaaaaaaaatattatatggcactatgctctttaggggtcgtgtcatttctggtgagaaagtctcgtaagtgttctcacaaacttctcccttcttgttgctctcatgagggggtggcaatcatcattcataatccactggtgtttgcttctataagcaagtgtactcaagtcataatttgatggtttgattacctggcaatggccatatgctctgatagcttctggatcaagtgattcttggggacattggcagacttcagggttattgcacagttgaatgtcagtggtaatcacaacttaaagatacagaaaatgcgagttcttgttgaccttgactcttttccagaagagatctgacttactgttaggccgataagggttataaataatagtttaaggaaaatgctctgttacaagatgtaaatatcctatttgctttgttaagtaatcctaaaaatatatatcttttgccagtttttcctttatttgcctttattttggcagtggagaaaggatttgggtaaaaaagctttttatagctttttttttaatgtacattttcaccaattgttctaatctgccaatggcataagtagtagaatgaatatagtcttaggagaacccagcactgtttctatgatttatggtactcaataatatgagttcctttgaaactatcatgttattataagattgtgtttcacagatgaagatcttgtttaagaaaaacatgcaacagaatagcagtgttctttctggttctaattaaaacattaaagtgtgattgcttagtgtggtttcactaggagcaaggagataaaactgatccaccgagcatttgcaaaaggcatcccatcagtgcacggtgtgtgtgtgtgtgtgtgtgtgtgtgtgtgtgtgtgtgtgtgtggtaactggcacttttttctggcatagtatcttagttccaggtttaaatccaggaccctggagccattagggactccgtgtggtggggcatcaagcctcagtggcctgccctatttgctccttaaacccccactgcacttttcatttagtgcaggagtactttggctccatgccagcagcttcaacttttgctcttaaaatgttgttttgaagcagagtatagtgatggctgaattgatttccgtgcataaacagtggcctagattcttgccctgtggaaatccacggaattaagaactctaggttcctggagtgataagaggtaagcaaataattagatatgcatgcaggaaaaaaaattcagatgttcatagaatgaaaataagggtatgtatactttgcaagtttaatgtaaatggaagccactaatgcaactaataatttaatgctaatatttgatggtcagtaaatgtaattctaattgtttcctatttagtgtgctttcaaatagttctgagtaaaaatgtactggattgaaatattattcttggacatatggcctgctaactactgtgacccccaggaagtttatggcatactagtgacttgaatttctctttacataaaaggttagggtagtttgaaataacaggatctcaatcagaggtcagagtctgaagtattatgggacgttggcattggctgctattgctgagatgtagaccagtgccttctttttacacaatctagtatttagtattatttaagaatgcagaggggctggagcggttaagagcactgacttctgacttctcttctagaggacctgtgttcaatttccagcagctacatggtagcttacaaccatctgtaataggaatcaccctagtctggtgtatgtcatatatatatatatatgtatatatatatatatatacatatatatatatatatatatatatatgaataaataaacattgaaaaaagaacacagaatatactttttgtaaaactctttgaccttgtagtctagctcaaaatacaaaatttaatgtttgtttttgacacataccagatagattttttttactgagaacagataatctgagggaaaattaaaagtatcaagaaagaaagttacatcatatgtaatcaaaggagatttcttcctttcttcctgttttacaaaaacatcggaagaggcctgttctcctttgtccggtttctttatttataaacttcttcgggaaataactgcttcctgacttccactttactatagaacgaccacaaagagcaatggagatatttgccatggcagatgccatctcaggttattgtgatgtccattgctcagcagatgacagtgcggcaaggttatgtgactatggtaggtatccttcctaggcacaggaagagtgcaacctggaacactgtaggaacaacatcccaaggattgctggtgattttgtgttcacactttagaaaaaaagcagaatgaacctgctgctttaggtattctggtgccagtgcagaggggcacctggacctcagagctggatgagggagaaatgcatgtgtggtggggagagactgtcctctttcttgccattggctgatgaagggtttggcaagggtgtgaattgtttgtggctgcctcactaccctgcatttatctgcattttctgagtatccatcactatgtcacctcccagaccactttgtgggaaacttgctttatggtgagtggcaggcatttcttgtcacttcctcaaattccttcctgctgcctatcactgctgccctgtacttatctgggctgagttgtagcctgctagaactaatccaggttcctatctcagtggagcaagaggacagcaatgacgctgctgtttctcagcctgacttctgggatcctgggaggaagagcagagagctggggaacaagactcagggctggccgttggctggctgttcatgcctagtacagttcctctctctctctccatcagttctgcttcctcattgattggcaatcttctctattttgctatgcatcagatataataattacaatgttaacctgaagagtaaatgacatttacctgagattagcttcattccctctacttagttcagccgtaataatgttgagcctttaaggaaaaaaaaaaaggtctggtgacctgagatttagagactgagacacagcacccttttgctctgatcctgttagttagtatatttttatacaccacctactacatgccacacacaatgctacatgatgggaattaaaaaaaaaaactctacttttcagtttgtcagttctacaccaccatgctgtagcaggacagctatccatatctattttatgggggagagacaattgcttatctttaagttggagaatagttgggctgggattgctcaagcttgtcaaccccacacctcattcttgttctaggttaagaagtagcctactaacaaacactcacctatctttgacatgtatctcctggccttctgattgtttctttcattggaaaggagggtggatgcaggacactctcttccgggcagagtaaggagagctcactgctcagtgggctgtgttgtattctttcatcagctcattcactccctcagacacagagaactttctacagaacagctgtaatcctgttaatgctaatcctgggacagtaaaggcaaataagaccaacccccaccttcaagaaatttataacccagtgtttgcttctccccctcatccctaaattatgaaatgtcctgagcaaatatattttctgatgctgttctttctgaagtcacctcttatgtctttcaatgtgagttctctccaagaccaatgtgggttctctccaagaccactgggggttgcttagcataaagtcagaatggaagcagcgctccactggtctctccacatggtaaacaggcttgtaacaaatgaggctctaacacaaagtagcttagcttatttggccagagagcagcctaaacctacccataaaatggaagtattctttgtacctacctgcaagggtgccaagattaaaatctagatggcagtgtgatatctgttgtgaggtaagcattgcatgcatggccactagacatctctttttttactttcctctggagagagaagctctcattagcatcggtgttcatctgagtgcgagtgaaagcattgagaatctggtgctatgctactgtgtcttcattttatgtggggttgcttgaacatctttcctgttaggatggaggtcactctagtcttgggctgctgagatttctactcatacaggactccatttgctctcaggggactttctagctcattgctctgacctgaggaggcaatgagaagatgactaacacagaagagatctagatccatgagtccattaaagaaatacactgctcatgttttctctacactatatattaaagggtctgccagaaaatgaacttcagcgtgtcagacagggtgatacatccaatggtgagtcttcttttgattgtcagcttgggttagggctgggtaacctctgttgtcctatggcatgagggaaagacagtttctttggaggagccaagttaagattggaaatggatttgctcaacagcaaagtcctttttacagcctggtctcatttgtccttgaggagggtattgggaagtatcagaattttgaatttcagaaccaatggtttcttagtgaatatttaggatacagccagccaatgcttagtgtatcagataaactttagcaaattaaatattgtgatatatatatcccatatatgttatctaattatatataatatatagtatttacatatatgtatgtatgtatcttaaaggtcaggtttcatagcaattataattagggagtaaggttccaaataactctagtgtattgagagtaaaatagcttggttccagaaagatatggggagacaaaatagatttatgggggggggttctatttatttatagccaatcaactttagcacttcttcccactccacgattattggtgatgcaagctgcccactcctattctccagaccttgttgtttctgtcttctcttgctctttcatagatgtacagtgctgtggccaagttatgatacagccatattccacttcttattttgatgatttaggttgcctttcctaaccatttttatcatgatatagttgtgcctggattttttagtactagttgcatgccatcccccttcaaagaagtatagattatagatattttttttaacaaatctgtttgtttttaagagaatttcttacactgaagtgtggtctctatttcagggatgtatcctgcagtaagagggtctaggggttcttacacaaatctgagtctgttagacggaaaatgggaaacagagtgacattcatggatcatggtgtggagactttcacgtgtgctatttgttagcattatccctatttctcactatacgcattttcatgcatgcagaaaaataagatgaaaagtacactaaaacatccataatgtaccacaagtttgctactttgccatgtttgctttctttatatacaaaatatatacttgtctgtatatagtattatatattgctttaagtaagaaattaaaaaagattccatcaatttctgagaagaaagatattttggttaggtccttccttactccacaactaaagcagtattttaatatttgtcattcagtcaaatactaataaataaataaataagaattgtaaaaatacagttgttcttgtcttgccatcagatcagacctttatggtcatttctatatttatttatatttaggttaataataaattgattaaggttcctccccacaacacctgtctgtctctcattaggaaacaaacaggcttctaagagacagtaataaaataaaataggttatgataaaacaaaaccaaaaagatctctagttctctgcaaattgtctggctatggctctctgtttgttgacatctactgcgggagaaagtatctctgatgatggttgagcaaggccctgatctatgagtatagcaaaatgatgttgtgagttgttttattgctacattcttttagtaaaacaggagtatttgattttgccctggatccatgggttatctggttgcaagttcttggtcacccaagcagtgttgtttctgtgtttttcatggagtgtttcttaagtcaacttggttggttactccagcaaagcctgtgccatcattgcactagtgtatcttactggcaggacactattgtagatcgaagggtttgtagatggattatgcacatgaaatattatttttttgtaaatggcctacactcagccatcagagtaccatataccatgcctgactcttcaatttctattttatatagttgtttatgcacctttcatgttgggaacttttccagatatttctggagttttcatggtgcattctgaagtttagtgtcattggacttcaagttcatttgctctaggtcatacaagtcatgtacgtttcctgggatataatttattctataaataaaagatggtaggcagttaagttctgaaatactgagacaccaagaagcaagttggaaatcctaacctaggtaaagtgaagaccctcgagtacaagttttacataaagttgaaactgacaagaaggccagggtattctacagaatttcatgatcaaggaggagagtttctgaatctaagtcttagcattggtagtggcagacagacacgtgttgaacatcccaagccttttctgaatagctgggagcaaagtagcattgaggatgcccttcctctacatacaggatatggatgaggaagctcctgtgcacctcagcctgttgattagatagaaaatatggaagagccttgtggtgactactgaagtctcttggaatttgtattccattcccccttctccatgtaatatgctttgtgtaggaagtgtgtgggggtccggaatgacagggacagatggatacactacatcctatgcaagatgatcttagtgaggtcacagagcaagttgctttgctgtctgtggggtctatatgcttttcctccttttgcaaaatgacacaacctgagaaccatcagggtaatcattagagatgcactctggagaaattggcttttcctgttgatcctttcaagaactgacagtggccagatgtgttggctcacaactttagtcttagcattagggaggcagaagcaagtggttttctgtgagttcaagttcagcctggtgtatgaagtgagttcctagccagctagcgctacacattgagaccccgtcttaaaaaatagtaataaaataaaaatgggctgggttgcactcattttaatatttgcctaacagcattccccaaggctctgagcccagtccccaacactgggaaaaaaaggcaaatttttaaatctaatttataaattatttgtgtattgataaaaatcagttggcaatgccataattgcttgtagtcttggaattgatctactggttgcaactcaataaatcttctcactacacaagagtgagagaaggttcagtcgtgaactttgcttagtaaacactcctacagagccttgctgctgtaacatctgccttaatcaatacaagagtgggagagacaagcagaggtttcattttcctcaagtaaacagaccccagtggcttacctgccaaattcatgtttccaaagttaattcttcctggttacactgctgcagacctgctaaaagggaagtattatttgaagccatttctttgtttataagaatcattgtttgtgatgtaatccttttaaagatctagccagtgcccacttgcctgcatagagactatactatattatgggcagccccgttcacttggttgtcagaaaacagatgtttaattgttactgcaaagggtctttaacaaaccaactctggggtacaggtagcaaagcgagccttagctatctaggaaagtaacagtgtcttgccttggaagcttgtgagtacccccttgatacagcaacctgtgtaaagatttgaacctgttttgaagctcaggcacatgaaagaaggatttttacactgattcctcgtgctggcgtctcttaggggttgtattgcactaagatgtatcagcaattgttaatctaaactctcagccaatttgcttaaatgttggaagctagcaagatgtggagcacgcaatgccattgtcgcgaatttcactgtggtcccagtcaagtgcagagtgttgctagagcattgtgctaattttagcctacaaagaggatgaagataaactgccatatgctgtcctggtgataatattcaagtgcaaaatattccatagagagccttattgtctcagttagggaagcttgggtgagagttaagcaaatttctgctcagtaggtttataagaaataatgaagtaaaacaattctcaaatgtaggtagatgaaatctgctaaatttattttggtttcattgactttcatgggagttgacagaattagttttggttttatatttgatgcaattctatctatttttcacatgtaaatcttacaaatcaatctgaataaatattgatctctttcagagctgcaaaaaaatatatagtttggactgcacaaagctgcttaaaagacagcattccttgaagtccaataaaggaataaagtgacctgttcaactggtttaaaataatcctttaaaaagccccttcccagatgaaaaagccaaactgcatcacctctccatgtttggtagagcccaggtctacagtttcactgcagagagcttggcctacttatttgtcactgagaccacttcacagtaaaggaattcttagctcctgataacatgagaaaaatccaacgagcccagcacacttgcagatgagcacagagcgtgtagacgagttttgaggctgcagctttgtgttaacaactggcgaaaggcttgacctctcagtggcctcggtcaaacaaacccccagctcaagagctctcctctaacaggcaagaggaccaaaagaggccagggccataaaacgaggttatggacatgcaagctgactttcttaaagatttagtccacatgtctgtggggagacctggtggccgagggctcgaccctcctcagctttccctgtctgtctcggtttccttcgatgacagtggccatgcacaggtgtctctcccattccctagcaatatgatctggggtatgattcagagttgaatgagtgggctgagggccactgatggaaacatttgatagtgtgtaaaataaaagccctggcaaggaggagctgaacaggctcccattgtttgtccccacacttgtttttatagaggttctcacaggaacaaataaattgaagtaaataaaagcaaaatagcactgttggtcatatcgtggcctcacacatgctcgcacatcaacttgggcaggaaactagcagaggtctgttccctaccatttacgttgcatctttatctctcggggcattgtttgcctgcagagtgcctaaacctcaacttcccaagtaaaagcttcctgttgcttttaaatatagttttcttacaacaacaagaaaaaaatgcattaaggaagccaacctggggggtcgggtgagatagaaaagaagaaaacaggtctagtccaatgtagctgtaaagcattgctcagaagcctggggctggcaactctgggctcattaatggccttctacagaatacagctattggatccatcccgtgccttctcttgaggtcagaggtgaagcaggcccgagacatgtccagtgttcctcatatctccctagtgttgtcttcatgtcgctgggttttgaaccttgtttgtggctggacatttctgcctttttcaattgtgagtcagaaaaggacttgtctttcattacgttagctcactgtgaggtcctttcatgtcactatgtctgaaaataatagtgtgcatctcatagaaggtacatcttagtccacctcaatgggtagggcttgctgtgagccttcctacagtttgggaggagagtggggtggttttctcaggcttgaatataaacaatattgtttatgctgtttccattttcctaaccctctgtttgtgcaggccctaaaacaaggggatctgttttgaatttaaaaaaaaaattagtgtatgttttcagaaccaatctatcaagttaggccaaggaatgccatcagaatcatggttaagagttaccaaattctggctttcaaaacttacttgacagccatttaaactgctgggttgataatcacagggtgtttggaacttagtatatcccttttaatgccatgatggaagtggttcacgtgggtctgattctcctgtgcattgcctgatatgccaaaggccacaccaccagagccacagttttcaaaggaatttccatactgctaagatgtggacggcattgtgtaagtggagtttactgaggatatttgattttacaaatctttcataaattgctagatgtacagtgaattaagtatgaaaggggaaaagctgattaaaacacaaaagcaatgagaatgtatgtgtgtgtgtgtgtgtgtgtgtgtgtgtgtgtgtgtgtgtgtgtgttaatgtgtgtgagggagaaaggtcaagaagaaggtggctccaggggcactctagtgtgcacatgtgaggaaggcattgaacagtctttgtcccattaaagcagaggagacagccagcttgtcatgaagtccctaacactttcagtctgtctaactggctcagcctgtgcagacagccacatgtgttctgtaggtatcagagaacgacacatgcctgcaggtggcttgagcacgggagcacaggaagcaggcctccttggtaggtttctcagctacccagcatcaactggggttggatgctgaggcctcagtccctagtccagcttggtttcccgagttccatgcagcacacaggttgatgattcattaggtggcattttactatcctgccctggaaagctgtctcttggacaactaagctactagactgctcccactcctgcatgcaagtcctcagctggttcattcaagcactctccacatgttcctggagatgcctggaacccggccactgagagtatcttgggagactgtagatctcattttgctgttaccgtgttgcatgtaggtgctagtgaagtgtgactaaaagcttgcctcattgcctgaattagaattgcatcttagttgtactgctgagtacactgagagtctcttgctacaacttgacccatgcccatgcccacagaccaccccccccatcttcataaagtagaatcagaggaagtcaatactgtgccaggtggtctttaaacttcggggtgcattgaggcccttgcaagcaatggctgatgtagcagatgcacacatcagtatatgacccatgaaatgcagactaagttctataagtccagtggccctgcaagagcagctgctatcctttaacactctgatgcagtcaggattgttggaaagactgatatttccttttccattatctaatcttgaaggcataaatgaagacggagtttgccactcaagcctccgctcttctgtagaactcttccagcgacgggattaacatctggacagttctgttccacattctcaccctctagcttagggtcttgttggcttccaagctgtgatgtttgcatcttgttttctagttatgggttagacctcaagtcaccataaggactgggcaattcccatcttgttgctcttcctgtggtggttttcttagaaacaattcctctttcatatctatcttcaaaagatgatgttgatttttctctcaccaccatctcaacatcaataataaagtaaagcaaggggctataatgacctttcatggatcctctggagtcgtttaaacaaatacccttggttgtgttatttctgccattacaaataaacaggaacaaaatatttatgactgaatatagctttgctgccttactgtctgccgtcatcattctccctaatacagctgataattcacagagcagctaaaattaccagtattcttcattaaatgtaaaaatgatcatcttaactttgagtggaccatgccatactaagtcaggcagagagagagagagagagagagagagagggagagagagagagagagagacagagtgagttagtttagcagttcctggaaagcacattatcttcagcacgtgtaggtgatgatgccatgggctgcatgaaatacaggtttaaccaggcgagcggcatacattggtggtgaaaacaaatggcagactgtaagaagtgctctcaagagttcttctgctcttagtcagctgagtcaaccaagcgattcactatttcctatgtgcaaacgaggactaaagcaagctcctggaatatatgacaaaattcttgctaacttttctgataatgagctctgattttcatatatatatatatatatatatatatatatatatatatatatacatacacacatatatatatatatacatcccatcaatatgaatatatatggcatatatatatacatgccatacatatgtgtatgtgtgtgtgtatgtgacaaatggaacaaatgggaggtaagaaattgtaagtcttttctgtagagaaaaaagtctttagaaggcagtggccctttcccctggcccccatcgcctgcaaacaactttaaataatctaagaaaactctaaataggtttgatttccatttgccgttctttcaaccagcactgattacttgccagtgtcacgtcatgaggtatagagtgggtgtggttgcacataaacagaccacggatagagtgtaatatcagcacatggaaatgaacactggaagtgtgtgcaaggcaagggacactttacagcatgacatatattgccgagtttccacgatcttactgttgctggctctcacaccagtatttcaaatgagctagtcccttctcactagcaacttttttacagaccaaggaagagagtcttggcagaattgaggcacttcagaaagatgttgtaggaagtagtagcaggcacatgacttcagtcccagctgtggcctggagtttagacaaaattcatgtacttggagaagtgagagcattgtaaggatgagcatcaggggcccaatgtggtgacatcactctttgactgcttgggaatttgcccttgattcattgcccacttccagaaagcgtgacctggaaccaccatcccacagcccaactgtctgctaccacagaatatccacaatccttttctaaacataatacattattattttaataataacaagcaagtacagaagagaggccttgagtatggcctctttgaacagcttcataatttcatttgaaacaggaagttcacaagaatgggaaaagtggtcagtgggtaaagcagtgacctgcattggatccccagaatacacataaaggtagactgaaaaagctgacgccacaaagctgtcctctgatcctcacatgcaacctgtggcaaaggtaactgcccactcttgacatcgcatacacctataataatttcaattttaatatgagagcaatctcattttatcctttgaaagtgtttacactcctctggctttcccttctcttcttactgcatgatccttaaaaattggatatttttaaatcagctcatactagggtctttcagctttaaaagaaacatagccagctctgggccagcagaaacccactatccaacttgccagtaactttctgggatcaggcaactcttccttcattgcctgcatcacacaagaggagagttgaggcagctggttgcagagatgctgaacttatagggcctttcttctcctgcttctgaaagaaagaattatttggatgagagtgaggaccaaagaggatggctatatttcccactcctacctttggtacccagtatggaaataattctctcagagactaccttgattgggacagacttggcacaatttaccagttttaggtttcaggtgagaagaaggtaggagatggtgaggatttacagggacttactagaaccccagcaccacagagcagaaacacccccatattaagaggaatgcagccttggagtgcttaacctggatatagaacttggcctctgtacagacagctgggtggtccaagacagagtgtccaaagggtttagcaagtttgggcctggcattttggcataccccatctgttaggtggggccagaagcaaggaattctaggccacaggccaactcagaagtcagacaggcctggggttggcattataaggtctgtttgtgaggacatggccattgctcactcagtcctgctgaaagggggctagggcagcggccaggaacagaccttttctcagctgaggtagtgttcgggccacaggtaggtccctaattgggattgaagctgagctttctgtaccttcttgctccagatagatttcagttggtgtcctttgacatcactgctgaaagcctcctgtcaccttcacagctttgggctgtgcatgaacatagtttccatggggaccaccactgtctcttggtgtgggacacacatgtgcttctgctctaggctggtgtttcaagagttagccagctagcttgtttgtgtttctgtattcctttgtccaggggcagggagatgtgtcctcttgtgacacaaaaatattgagaaaaactaaaacaaaacagaaaacccctaagtttcctttcaccttcccttctgcccctatttcccttttctcgtgctcaccagcctgccctgtctgcgcggtgagagcttccaataccaaagagccagagcgcctcgggtgaggaaatacagctgctgcttttctcatcagcgcatgctcagatttctggtgtagagagatccttgacgatgctcgagaatagggccggaaagttcaggcacagactcatgattatttcaacagtggcttctccggggtccctagtctagcaagagtgcgtgctttagctggagagcttcccttctccacttccacctcaaacgtggagggcttttgtctgtttttaaaataggacgttctccttgccgctcggaggtaaggtggggcaaattcttccaaggttttgcattgcagctttacaaagccctaaagctcgtagcttcccattcttgtgagcttcctgggttggtggacacttacaattcgacttctttgtttcaaggctttcacacagagccctgcttacttcctctgactcaggtgtacagatgcacctccctgtgtgtcttccttctctgcagagaaaatcagataagactggggggggggcggggggggggagtttgcaaggctgtgatggcctgtagcaatgaatgaggaagggttgttgacacccttcaagggtttctagaggtcagggaaaggcctggtttgacgttatcttatcttaggaggttaaaagggaagggtggtgctggcatgattaggaggttagcccggtgtcagacctgagttcaaatctacaaaggcctgtatgccttatctgtggcccgttcccagagtaaaacaggactattcacagaggctccctgaaggtttctggtctctgtacagccagagtctgcagttaacgggctatttctgccagctactgagacacttagtaaatcacaatgccaggataactcaatcttgattttgattttagtcttttggtgttggttttaggagtgggggttttcctctgaagcacagcctctgacttcacactcaagtggttctcttgcctcagcctgagcacagggactggagctatgacagcacacgcccggctttaaggacttcttttttttttaaaggatgctttttgtagttattgtttcgaatcatgaacaaatgaattttaacttctaaaattttcacaagtattattttatctaagatcagtgccacacctggtatcagatatcaagtgagtgttctgggaccagtccctttcagcctttctgtcaattctgactacccggaacaacttttcctacacgtcctccacaggacacacctttctgctggagaatttttttttttttacatgacacagtagtggaatatttattgccaataatcacataagacatttattccaagggaattctttggtatacatataattttaccattttgttaaagatgaaagcaaatttgcatagtcatgaaatggacaagactggtgtttggctcagtggaagggagattgcccagaatgttttggctgtaggttcaatctccaagtggatgcacttggttagtcttacattaagaatgaagttacagcagggatcagagtcttcaacagttttcagagcagattgataattctactttataaccatcaatgctgagaacactgctttatatagatacgtaagataaagtagcaagaggttagggccatttcagaaatgtccctgaccgatagaaattctgtcctaaccccaaatgacgttgtagaaatctttatttttatttttatagttgtgtgtgtagtaggcaagtctgtgaaggtcaaaagacaactttgccgagttggctccctcccacctcgtggattctgagatgaggctcaagtccgcaggcttgccagccactgcacttagcactgagccatctggcaggtcctcagttcatctttttttttttttttaatggaaatcaagttagcaactcaagcagcagtttttaaaacgaaacacaatgtaatccagagatagctaatctgatgcatgttgagcattgatgacaagaaaaatactgcattttgttttccataattaatattatgtttctaaaggagcagagcccttcatgtgggcatgtgtgtacatgtatgtgcgagcatgtttgtgcgcatgtgcatgtgaatgagtgtgtgcatgtgtgtgcatgtgtatgtgtggcgaaaactttagaagttttaacagcaatcttgagttgcatctggagtggtttaggcttcattctttgtgagttttctttttactaaatgtttttgttggctgtccaaaccaaggctgcagtgaagtttcacgatgcaacatggtcaagtgctcccacaagcgcctgagattcatttgacattgagttttaataaatttttaattattttatgtttttaaatgttttactataatacacacacacacacacacacacaaaacaagttttaaattcagtcacatgatctcatagggtcatgacccaccatttaagaaactatcatccggatgaggatgaaaagccattttcttatagtgtatctcatttttctatcttaaagagaattctgtccatgttaatcaaacaaaccctctgtttcacaacaggacaacttacacattaacctgtctcacgagggacctaagagcctgttctgtgttctcttttatatgtgtgttttccctttctgtagtttctgttatccatactccaaaaaacattaggtggaaaggtccagaaataaacagttgataattattaagcaaattttattgcaatctactgtttatagttgtttaatttcatgattagttgttgttaatcctgtctggtgtctactgtacaagatgagctttattttaaggatgtgtgaagcggagagaacagtgcgcacacacagaggcctcaggagctcctggcttcttgcagctgctggtttgttaaaggagcctatggggattagggaaccctgaaaacttctctccccattatcactgtgcccagcagctgcctggttttgtgatgggctgtttaggcagcatggctacttattttcctctgaagcacacttacttaaaaagcacacttcagggttccttaagaaaaggggcaggggtgggagggggacaggaaaagaaaaaaaaaaaaaaaggaagcatgaagtgataagagaacagagtagatgttttggagatttagctcctaggaatgtgagtggagagagatgacaaaggcagcaaaaagttttggaagaaagatttaaactggtgtgccttgctcaaagaggaaaatacagaggcactcactcaatgggctaagctttgcctgacaggtagcatagcaaacatctttcagcatttctcccatgtggccagcaagcctaagcttcaaatacaactactaggtttactgcttccagaggggtagaagacagacttgaggcggcacccatcttccctacttagcctcacaatcggatttgaaaagctaaactactctctttttttaaattttttttaattaggcattttcttcatttacatttcaaatgctatcccaaaagtcccccatatcctccccgccccattcccctacccacccactcccactttttggccctggcgttcccctgtactgaggcatataaagtttgcaagaccaaggggcctctcttcccagtgatggccgactaggccatcttctgctacatatgcagctagagacacgagctccggggtactggttagttcatattgttgttccatctatagtgttgctaaactactctcttatgatacccgcaaagtaagagtaaggcagggtaccaggcatgaagccacaagggctttaatagagatgacattgaagctgctttcttccacaagtgactcagttaacctctgggatgctctgactcagaatcagttggtgcaggaatgctcttccttacaccaagtggccaaaccagttctcatgtttctcttgagggagatacacacatgtaccctacacgtttctggctctattcgtccagacgggaagattcttcttaatagactcatacccatggacaggcggtacagtagttatgggcctgagggtaacataaggaatgcactgaatccatgtctacagctaatgaaatcgaagatacctactcaaacaagaaagttggagtgtctggttttctgtaaaagctccttttatctttactgtgtccactaaagttgccagtgtgcacagtgtgcttgttctgaaaggcaagcacttgtacctaattaactgagtcactagtgtgagtgccactacaagtccacaaaagagctagagcctcccaaagaaaacaagctcaggcactgtgataaatgcccactcggctcaggcaccgtgatagatgcacactcggctcaggcactgtgatagatgcacactcggctcaggcaccttgatagatgcacactcggctcaggcactgtgatagatgtacagtcggaattcgctgcttccaaaacggtggaattttttaggtggttttacaagaagagagtcataaggcttttatcgttcatttaaccttcttctcagccatttcttcttcctcaattatatttaatgtatttagtatttcctaattcttctttaaataccagccgcttcatttttcagagctttgtcccaattgactctaaaataatgtaactggacagagtggagtctcttccctccctgtccatcctgagcctcttgctctgggatctgtgtgtgtgtgtgtgtgtgtgtgtgtgtgattcctgtgcttttattctttgggttccatctttagacagctgtggtcctatttgcccactgctaacatcttcccttataccttctgaccactaagaacagaatgaaaagcatccaggggtgccttgagggtggatgtccaggaagctaaggtgtcagaggatggagttgcaacacattaccatgctatgtagggaagagagagtaccctgagaaaagctcctacagaatacagacctgccacctgacttctccatgtcactcaagaacgatgtggcccacatgcactttttaaaatgttataacttctagagatgtttttggtgaaaatgttttaagactgtaatacattctgtcacttatgaatataacaagtattttaatatgatttgaagccagtagacacatgagttatagtcctgtggtgtgagtttctttttatgaagcccctgcagcatttagagggctatttgtcactatgctgacattcccccatgttactgcttctttagttcttacacttttgacttgttatcaggttatactttcacaaagctttcagcctgcaaactgtgaggcagggacctagagttggaggagcaagcctttaagatgcctctctgcagcgagcatagctcccctggttctgttctaacgtagtccttcacagacttacttgtgtggaaatcactagtgctgggctccggctcatcctctacagctgtgtaaggaatggggggttggaaaacaaaacaaaacaaacaataaacaaaacccattctcttgtcattttctaggcagccaacctgtaaactctttgcttccaatttaaattttggaaactgacttttatcttatttccaagtatattctatatactttagagaaaagttctatcctacctatgaaaggtatgcatacacacacacacacacacacacacacacacacacacacacacatacacacatgcacacaccacaaatgcacactctgataaacactgtgtgtgtgtatatgtgtgtgtgtgtgtgtttatgcatgtattatgcacatattatgaccattgcttgcctgtctgtaagagtccatgtatgacattttccccctttaaagatatttgttatggttgcatagagccttctcgacattcattaacacaggttgactcacttcttgtaaaaccatttcaaaaaaatagtgtgcgttactaggatatgtttatgcagctgccaatgccttggttcttggtatcctccctgtatggctgcttctgaacatgcgttcatagatttcccttcacatttacaagtgtgtttgactggaggtctttccattttgttctgctgttagagtcaatatacaaaggactttctatagtgtttagttgtaaaaaaaatactaaatagataaaaaaaataagtaaaatctattttttctttatagtcatcattgttatttgtcctgtgtgtaaacaaataatttgatgcagctcccctaaagggagaataaagttaaaataccatatttggtttcttaaaaagaaaaaaatattcttgcttaaaagaaccaaatacagtgattcaagagagtggggggggggcactgaaaagctgcttgatttctaagtttatgttacgtctgtccacagtacctgacttcagtgaacactaacccatagaaatatttgtcattctgacttaatcttgggtaaaagttcggtaccaatgtgagctcataactggacagtgtttgcatctatcctgtaggggctctacaaaactgtgtttaattccaccaaatgcactttaagggtttggaatgtttttgtgtctgtgtgtttcaccaaagttcataaacattttcatcctggatcttagttacttggttggtttctctccacatttcccaccccattacattttatacattatttgtgttgacagtagagaatcatgaagtgatagatgcttaattgaacgtgttatctatgccaaagaaagaattccaaatttatttccacatgctggcagtcctcaacataaaaacacccaaattaagactgacctacatatacacatggatattctcgggctcatattttcactgtgttacacccacaggatcattcacagcgatgacaatggatccatataaacttggcatgttcagaagtacagctccctaaagatggtcaggagtaaaggccagaggggggagtagatttagagcatatgtatgggttggggatgagttttgatgatcagctttgaaatgcactgtgctcttccgtgagattagtatagatcaactctaaaacaccatctttcccaacatgagctatatattttaaaaccctaacttgctttaattcaaattctatatttagcgagtcaggttgacttgtgctcacacatcttcttttatttttggcctttgagaggagagttcctatagcctgggctactccagacctcatgatggagccaaggatgtccttgctcttctgagcctttgcctccacttttcaagtgctgggattactggcctgtcctatcatcccagcaagaaatataattttaaaatgcataatacttacaattattcctttcacatctgaatcggacttctgaatgcattctactgacactctgattggctccacaagaatgcaaaggtgaacacttgggctgattgaagatgaggcaagttctgagcatgtgttaccagaagcagaagagcctcaggtgttggggcacgtaggcattccagggacagggtgccaggcagtggaactgatgcacagagaaggagatgataggggcaatgggatgtcttacttttgccagtttacagaaattcgaaaggaaatgaacgtcctcctcgggctggcactgttggcttcctgcaacctgagctcacaggccactcagagttggccttacttaacgctgggctgcctttggatctaacaacagtcttaacttgcatctctgaggagatgaggcctagttagcaatcaattcctgtcagcatgctgtgtgcctcggttgcattccatctgagtggacttattgcttttataagggtttacaactcctcatccattgtgtttctgtataggcatgcacatgtcacagaaggcatgtggtggtcagttctgtggacagtggaactgttagccttggcagccagagcattcactcactgaaccgtttctccaaccccaccctgcattcttcagccttagtttggaattgtgtgtgtgtgtgtgtgtgtgtgtgtgtgtgtgtgtgtgtgtttgtgtgtgtgtgtgtgtgagtgagtgagtgtgtgtgtgtgtgtgtgtgtgtgtgtgtgtgtgtgtgtgtggagggtcagggtatgtgaaatgaactagcaagagtcagtggagtgaagccttatttgatggaatttgtgtaatagtctggttctaataactgctggccctaacagcgtcacagatgtaccctggcaggtcaggattcccagaaccatagggatcaatccacaaggatagagctcttgttcctccaactgtccagaatcattggctctattgttccagtgagttctatggctgggttgtgctgcatgaggcctctgggcctgctcttcctgtcctatagtctggaatgcttccgtctgtcctctgcctttacttttgcctgctcttcagagtctcctgcaagtgccctctagcctaggctagatcttacttcagacactcatggaattgtattgctgtgtgattaagtccacgagtttgcaactctccatttatcattgtgattacgttgcctagcttctgtgccctccaattggaatgcttaatggaaaccaaaattctttctcatggtgtccatagcttgtgtacgattggagtatgacccatgcccggttttgcttcgcttccaggcctggatgagctggagcttgttcagcgtggtgtggctgagatgtgttgtttgccgtttgtgctctgcacggacatggtactcaggccacagtgtcctttggttaaatgtggcgatggtagtaagagctgtcgggaatgacggctttatcagcagtgagatcactttcgaatgggaaaatgaaggcagcacatcagagcaggaggcgttttcttcaagtgctgaatcattgtcttctcttaactttctgtagctgtcatgagactgctaacgggtagactaacactgaagtctgtccacagtggttaaccactaacacattcttgtcaccattcagcacacttaaattcacctagcaagccaacatctcatgaccaatttcaggagagccaaacttcagcaacattcagagctgtttctgagtaccaggaatatgtgtatttagaagagatttaatctttgtttctggctgctttgctttgcgtctcaccatgtaaccctagctgagcttgagcgcgttgctttcctgcctccattttcaggtgctgtaattacagcacgtgccagtaggctggctggagatcggacccttgttcctgtctcctcccattcttcttggtgtgtctgtaccatacaccagttgtgaagaccatgctggactttggctctgggatagcaaatgtctacaactaactccttatcttggttttaatgagaatcagctcaaacttttcaagaaagctgtgggtggtagaaccctctttgtttcactgtttctccttggccaatggagaatttctttaaactaagaacaaaaatacattaaataactgagttaaagccgggaagaccagaaactaacagaatcctaattaaaattaggcatacaattaatcattggttttgatcattaactgtttgtaatattagcttctgattagaagataaccaaagcacgttgtttctatttaaaacattagctggcatggtggtacagaattttaattctagcactcagaaggcagaagcaggaggatctctgtaagttcgaggccagaatggtctaaatagcaagttccaggacagccaagacaacatctgtaaacagaacaacaacaataacaaaaatactaagactcagggctttgggatgtgtttttatatttctgctgaaaattcttccctaggtcacctgagagcagacatgccttttgtctctgccacagtgccaagaactgagtcctcagagacctgctgaggactgctgagaccgtgctgaggcaggtcctcagatagcccactgctgcgatagtgtggaggcaggtgtatagaacgctgggggaaacaatgctgtcatttcttggaaaagctaagaaaatccagagtcccaaggagtttagatttataacagatgtttaaaatgtgagtctggagtctaagcccaggaccaagctgtctcctaaagacaactgaactctttgctactgaaaaactaggaaatgaataaagtagagactacacatattccattaggaaaataaaaggcaagaggaaacaaatagcctttgctttatcttttaatgctgaactcaggcaaactataccagccgcaaaattctttagttaggtaagacaatataagggacaattgcaggaagccctggcctgcttctgaagggcacagcaagcattcctgagcatctgatactgtgactgctcggctgtttgcccatgagtagctcctgattctgagaacactttctaattctggagaatgcatatcttttatgctttctgcgttatcagatttcacaagtgaggattttttccaagcattttactcatatacctcttgaaaagaaaagtaacaggtggaattgaagttaggctttctctgaagtggaaaaaaatatatttaccattcacaaaaacacattattctctttgattttgatggcacagacataggtatgacttgggccctgctgtattgaactcaagagaacatctctagaagttgattgtcttagaagagtatgaagtattgtcaggtagaaaatagatgtgagaatgagagagagagagagagagagagagagagagagagagagagagagagagagagaaagagagagagagaaactacgagaaactaccaggtttgagttgttgcatgggagtgacaatgggtgaataagtcagccagagtccagaaaacgcttcatatatgagacagcagttgagcactgtcttaaaggtcaccaagagacttgccacattactgaggaaaggaaaagaagcccattgtggggaaagaactagcccaagaagcctcaaagaactgagagttaccaagtgcagagagcttccacaggctcagtaccaggtatgtggaaggtaccctaacacattgagtcttggcaaaatctttgctgaaaacccacttgggaaagtctgtcacagtccccagtgccaggctaaaagttacgacctccattctaaggtcaaagggccactgtggaagtcctggaagtgccagggtgccatgatcagctacgtacttgaggaaaataattctggctgctcctgtgtactggagatggagactgtacaactcctggggatctctgaagtatttagcaaattcttgagaaaggggtgtctgtaaaccttgctagttatcctcttaacataacacaggagcattattctacttgacttttgggaaatgacttttgggatctagaggggtgggattgggctgtgtccttcacattttctaacactcctaggcattgggcatgctgagacccatgcaaagaaacccaactttccacatgtcgaaaataggatgaccctgaactatggagtctccacacaaaactgtaaatgaaaatggtctcgaatctatgattgtcggataacttccagcataacaagggtgtcccaaccttatgcttgcatttgccccggcagtcgaaaagttcagttcacttccttaattaattttgcctctatgacccagaggccctgggacataacatccactttatttttacctggtagcccactgacaggcagagttcccatcagttgtgatgtaaatcttgggctttttaaaagggttttgttttttgcctccctactgatgtattttgaggaatagcagctctgggagaaaggaaggagatagtttaaggggaggaggggcagagcttggacctgcctatagaggattccccactgacctggtcagtctgacctactgaatggtatgaatacaataaatgctgttttatcctgccttgaaaggcaggagatagcacagtctaaatgcccaggcatgcttaaataggcgacatgggatgtttgagttgagtgtgtttgaaatctgagctctctggcagcctgggagttgccacaggtcacctgccttgttccacagggacaggcccaggtttcactagagactgtccagagcggaattgtaatacaaattcctttctttgttggttggtctcattcaatagaccacggcctataaaattttgtaaaaacaattcttaaatattatttgaaagggcaaatggcctacgctgaaaggtttgacagtttgacatatagtgcatggttttgataggttggaaactggaaagtgtggccaagagtctccccctgcttgttagaagcttggtgttggtagactagtatctttttgtggtgcggagtgcctttgcttcttgcaatctggcaatgcgtctgcttcagtgatcttaaatccttttagactaatttgtgagagagcagaaaaaatcgctggcaccttagaatccagtgtccggaagcacagagccaggtaccgccaattaatcatagcaaggcagactcctctagagatctctgatagcatcagagtctgtgcccagagagtcacgtaggtgaggaaaagaaaggaatgtgagtggcctggtctctcatcagaacctgggaagttgcaaggagtagatttctgcattagaatattacatacatgcagcagtgtgcacgcaggtagccattgctggctctgcatagccaaaggccatttgcaggagcctctggcccctcagtcactggcctactagttaattgccacacggacttcatgacacatgggcagataatatgacattttcggtttctgtcactagcaaacgccacaacgttgcttgcacagttgctaagaagctgtcagaaaccattagcagttggctaaagtcgccctgtggcatttccacatagcatcagcaaaacgagcataaatcacccactggagcccactgctaccctaatgaggccgtaagcttgtttatggagtagcatcatttttatgattatttccaccttttcagtttgccttcatttggcggcaggagaagtcagcaccaggaatgaagtcactgctgacattttacaaatgggcttcagagcttctgcctgctgccgtgtggttggccgtggttctccaagtttgtgtagtgatcttaaaaataaaaaaataaaaaaaataataaaaaataaaaaaaataaaaaaggaaataaatcctcccgagaccacatcgaggtgactgtatcaaattgcggagtgaattgaaatgctaaaggtacaattgaccatttagactctcctctgaggtcgagacgctgtgagatcaattttcaattttagaaagtggaagaggttaaacaatttattaaaatctatgaaagtgtttgcttttagaggcctctgttttattatgctcttctcggcccccgtcttctgcatttccctaaccgcgttgggaaggagcacggtttattgttttaggctttgtgaacatgcaccagtatttacactggattgaaagcatttgcttccaatgaaaatcttgtcttagattacaacccagcagtgtaatttccctcccagatgggagtaaagtagctgtatttgcctaaaaacagtaggaagaacgaactgtgcagtaagccggggctggttttggcttgagctaatgatgtaacagaaaccttttattcaagagaggtcactgccagggactgaaggggtgatctggctcctgcctgaaaggcccctccattgtatctccataagtcttcacttaaaactcctgttcttaatgcttctactttcatacagcagaaataaacaggaaaggtcctggggactgttacacgtggaatgcagaaagccgccctctcctaatggagtatataactcaggtgccctcaaggcgagctttcaggaattcttttgcccgaggtaatgggaagctaaggctgctttaaggccttgattatctattaatgcacaaagctggaaaaaagtcatctccactggattatggtagatatttccataaattatcaatgaatcctcttctaggcaggcactagacattgcttgctaaattaatctgaaggggtttgagatggataaaaaaaggctatttttgtgaaggtggagacctatcacggagaggtggggaaaacagtattggtaggttagatgcttttcatttttaatcgctgagcgagtcgtatgtttctcttcctgggccaccttctgcatatcgaaggtggattagctattgcaaatgtaactgctgtggacctgttttctcttttcatgtttctttaatgaattgttgttttatgtggtgaatggcttctccgtagaagaagcgtcgttaaatactggactttcaaagaatttattaggcaaacccaaggggattgctcataacacttggttatgcaaatagagggcaggcagcattgacttaggtgtatgggtgtctggcccatcaaggaatccaacatgagcatatccagccatgtgacactgaaaatctggactttctcctttagttggatgggctgatggctttagtgttggggtcttcgtaatcttttctagaaagaactcagtctatgagcccaggaaaccttcatgacttatatagatattaaatgcactaaacttattatagatgttttataaaagtttacattacaagaagctctgccaaaactcatggtggtatagctctactaacagtcgaaatgttggaatccatctgctcctgactagaaggagtttatctctgaacacattaagacaagtgaaagccagcaggggtcacttttcacatgccacaagggtggggcatgagtttcctgatacaatagttgtgaacaattgaagatctgccgtgtaactgccataggttactagaatgaatgaaatccaactagcaacccttgttgcactgaggacttagagtagcaacaagtgatggaagaagtgaagccatggacgaaagtctaatgggagtaccaataggtagtagccatcggggaagtgtactagcaaagtgtccagttcttaggaccataggttcccaatgactttagtgggatgagggtgccctggggtgtggttgctaccgcacgttgaagcctggctattgtagcttttcattctgggcccagatcaatcagtccatttccctgataagacgtgtcagagcacagctgctgatcaggatagtgggtttagtccattgttatttgtcctttgactttggtgcaaagatcaaaaataggtatttctaatgtaggtcttgatatatattacatgggtaactttttctcatcttatcatatatggcattattacagtaatactgtattatctttttactgagttacagagatcaagtatttcctaaaataagcaactcaagtgtttataacaaatgccagtagaaaaattggatcctttaggaatatgttaccaggtgacctctcagtgagtgatccttgaagaaaaaaatgtagaaactgcccaggttattagtgagatgcaattctaacattactttattttacttcaattgcaattattttgtaattaaaaactatgtcagggggtttcccttactggatttgatgctcttgcgacactaagcaaaattatatctctcctttgaagcattccatgacaaattgcttatgtgatggattgcctgcagtttcccatgctgctcccacccccaccagtctgaagatagatcacctgtggcagcagttgctgtattaaatgcatcttcttaccagttgacgtcagtgactttatatggagttcaaatactcagaagacccccactaaccatgtcaccacactgaactccccagtagaggtattacatatactgaaataattaccatggcaacaaagccactcaagagatggatatttccctccagtccttttgcctttattactgatctttgaaagatttttttttataggcatgattattttttagttgagaccttgttctttctctttgtcttggaatttaaaaaaagtaccaaagaaactactaatcctttaattgatcttttggttttgtttgtatccaaaggcattctatttgaataaagcatgttaaggtagcatcagtcaaaatttgattcactatatttgcaggtgatggcttggacaacagtgtagcttcccccagcacaggtgacgatgatgaccctgataaggacaaaaagcgtcacaaaaagcgtggcatctttcccaaagtagccaccaatatcatgagggcgtggctgttccagcatctaacagtaagtggattctaaatgacatatgtaaactaaatatggacaatgaaccagttttgatagagaaaaaaacgatccctctgcgcttcctacatcactgtgttccccatttttaaccaagggttagcacttattttctagacccataccctaaaaatcaggagcttcatttgaagttccctattgtaattgtgttaattttcaaaagttataaggctcgggagtccatgtgtacttgtgcttttatgaatgtatgttaatatcattgcttttccaagtgacgctgaagtgcttccagctagttactaaactttctaaaaggaaagtaaaacccttcctcgagatggtaactggagtgagcactgcagtggaccctcctagtaaatgacctccaaagccgtctataatgtttggatggaagatggtcatgtaatttgctgtacagtggcttgaatagaccctttcattacaacagttatgcggtgagtcaccccagtgagagttgtccctgcagttagagctgtaaaggaaaacagcaatacacaggcaactcttcctgtgcactcccctgggacttttctcgcagagcagcagtttatattgtctgtctgagtcctgttcttttcactgcaggaattctagagatgtgagaaactagaggcttggggctttatgccaacgggggatttgtttaggttgctgattgttctgaatgaatttcatgctcaaaatatttataatcacaatcttttggtggctatattgtaagtgtacgtgggctttttggcattttagaaagaagccaaactaaaaatctacggataaaataatattctaaaattgagttaaaattgttgaccaggacattttcaatattacggatggaggttaaaataggggtacgtagatgaatagaaggttaaaatttgtgactttggcttcaatagactcactattttaaacttagattgcttttcttaaaggcttttctccttaaatgtgaaagctcaaagcctggtgactctcactcgcttgctgagttttacagccacattcttcaagagttgttctagtttaaaggaacatactcagtggtatatgaaagcaacattaactttgctgctctggataggggctgtacctccaataacactcaaggatataaattaatccaccttctccagccctgacgaatgaaataaaagctgagagcagttgcaaaaactaaaaacaacagttttctcttcttcccatagtgattcaaaacatggtctaagccagtggttctcaacccttttaatgctatgaccctttaatacagttccttgtgtcatgggtgacccccaaccataaaattgtttttgttgctgtttcataactgtcatttgctactgttaggaattgtactgtattacatatataatataatacacacacacacacacacacacacacacacacacacacacacacaggatatctgacccacaggttgcgaacctttggtctaggtagtgttgaacatttttaagtaaagttcctggggtggttagcactggaaattactggtttaagacaccatgactttgacaacatatttgctttccttgaaaggatcctgattttgttacttgtctaaaatttgttgcatataggtgaatgttttgtagtctgccttatgtaactttccaatgatgagtatcaaccatgggtgaactagagaaggaaggactgtggtacccagggcagatgatgaaagcatcatttacagaagaggtgacagtcagtctgggtgctcatgctgagatgctgtgagttagtctgagagccaactggctgacagttgagtcaaatctgcagtaagagtcaaatcaagatggccctgaacttacaccaaactattgctatttcctgtcttaacagaaaaaagaaatagatctccgctcccttctcagtctgagatggagattcggggtgacgtgactctgagatgtccctgaataaaatagtcaaatattggtcaggacaaaatcagagagataagagcaagctatcttactcatctgccaagttttccaggttgtagccctgtgaagaaccattcagagatcaataccatctaaaagaaagaaaaatcagacaccaagtcctttctagtggaatgatttttacctatagcataatgcttatgtgaactgtgtattactgggacaattgtaatggaaattacccacgagctgatttgtggaggcctggctggttgccctcagtcactagtgtgggtcactgccctggaagagcagtcctccctccaggcttcttgggctttctatgaatgtctatggaagttgccttgcagtttctattggggacttgtgttccctgacccaccccagcatcttctgctcataaagagctctgggtgatgagaacgacttccaagaagtcagttcctctggtagcagttttgaaagtagagctatagggcatgggatgttttcagccacctactttctccaaggagaatccacccccaccttctgtaacagaaagagcaagtggatttctgttttcaaggaattccccccattttttcccccgatacttacagagagaatgtctggggcacttaggcaggattacagtcaggagctgattacaataaattctatgggaaaagcaatagatttgaagagtattaccgagtgtcctagctgctaatactgaccctttggtaacttcacttcatgtcctagtagctctttagggacacatactttttccttgggaaaactgtcacagatcataaaacaattgcattatttctatgtgattactgtggtttgtctggaaactacattataaaatactgcttcacataaaagaccaatcaaaactctgatttttagaaatagtcataaccatttattcataaattataaatgaatttttcttaaataccaaaagggtgtattcttaaagctggaacaccttgtagaaagtaagttgctagttctttctccttccttccttccttccttccttccttccttccttccttccttccttccttccttcctctctttctttctttccttctttctttctttctttctttctttctttctttctttctttctttcttttctttctctctctctctctttctttctctctttctttcccttccccttttacaataaatgaacagatccttctgttgagtttattcattttaaaagttgaaaaggctttcaagcatttgtgtgttaaaggcgtagaaaaggctttgtagccagctacagggaaagaaaactgtgttggtattcagttagccacaggtagatttactcagtcacccatgtcactagtccagagaactaaaggctgtttcttggactcacagactgtagccatctaacctgcatactcatgtataataaaaacaacaggagcaaaggaaacaagtctgaggctctggtgattatcgagtcaatccctccagcttagacttcctgaacatttgtcagtgttgataagtagggaaagtctcttcaaagaaacgattcccttcaagagaaaaggctggctgacatgatttagatagttaataagagagaagcggaaaggaaatagaagcatttattcatggagatgcttgtgtttgcctgaagacaaaccattgcacacaattacaagctacttaatatcttcatgagtcagaatcagtttgggacttatgtcacatcaagatatttccccttctcctgggcattatccccaaagtaaactatgcatactatgtctttggacttctgctgggtgtgtttcacattccatatcacttactgcattgtgttgtaaagatatgttcctgggccacttgggatgaagaaaagaactaaatacagtgtttcaggttaaaaaaaaaaaagcaagggtctttagtttctccaccttatcatattgcattttaaagctataatctagttagaaaactggttaatgatggtcttctttagaatgtgctgtgtttgtgtgctcttgtttggaggctctgtgtattccaggcatcctgaaagttgggaggagtggcagtcaagatacagactcaggtggagaaagtattcaaaggtcaaaggtcattacttggttttaactagaagccagtcttcctgactcccagtctttgcgttgatatgaggatcccctcaggttaatccttataaatgttgtttctgagacaaatacacatattatctatgtgtgcctgcttcctttatttctttattttctctgtgtgaacatctagcctggaaaatattgttgtatgtgtgtggccaaattcatggctcaataactgatttataagaccttcatcttatggatacagccagtgtgagggcttgtagaatcttccagattgagaatggtgtttccatagaaacactattagatgaaaagtgccctgcgggtctgccactctactcatggagcaaatggaattggactgggaattgattgctctagaagagacagatgttgtcctctggttctgctcttggtaacaagatctgttggaggatctcagtgtcttagccttacgaacagttctggaggaatcaccagctagacactgcaatcaattattgcagtgggaaagttctaattgatatctcaatggctttttttgttgatcaaggtactagagaggtcagaaggcacaccagtatccacacagggagcgatcagtggcattttcttttctccttatatctttcctttcctttccttttctttcctttcctttcctttcctttccttttcttttcttttcttttcttttcttttcttttcttttcttttcttttcttttttctttttgtttttttcaggacagggtttctctgtatagccctggctgtcctggaactcactttgtagaccaggctggcctaaaacccagaaatctgcctgcctctgcctcctaagtgctgggattaaaggcatacgccaccactgcccagcatatctttatttcttaacagtgaatatttttagcctgtcttacctgtttagaaagaagtagggcaaattttagaaagcagagcggcaggtcatctgtatttgtgaacgcttacttgagatgccaatcagggtaatacaaagttctgaagccaggtggtctttctaaaccaaccccaaaccactttgattctcatgtgcctggctaagggaagtggtttctaattagagcaattaaattgcatgtgtgtgtatgtgtgtatgtgtgtgtgtgcgtctcactgaaaaccaaggctttgcaatgtgctaagccagccctctactactaaaacatacctgtaatccagaattttgattttctttttacaacttgcagcaatcctcctgcctcggcctcccaagagcggggattgtacatatgaattatcatgcattatctgcagatattaaatcactatacttaaacactagtagggaaaagtgaaagcttttccttccagatgtctatggaccacatttaaaacaagctccttccaacacagaagagttcctctgtggtcgtttcttttcccctggacttacacttcctttgcccagagctaggttctgctggcactagctcaggcttagccagtgaggctccttttgaaccttaagagatggctgcagcttttaacaactcaatggcagcatattccagctctgattacacaagaacctgactgcttctcatccaagtgggaatcacctatctcaggaggaaagtggaatggattatttaattattggagagatgggaatgccctaattattctgcgatgtgcatcatctaaactctgttcagtcgtgaagatggaatgaggggctagcagattccagagcagctgccttctttttttcttggtagttattgaaatcctaatggatgggtgatgaattttcttaggtcaggtaaactgaaaaggctacagctggagttcttcacccagaagaattggagttaatactaatgatcattgtgaattagaagatcaaaggggagcatagtcctgtcttcaagttcttgccccagaggccattagtgacctggcagggccctctcccagcctttcccccacctcttcctattgcctgttctttcttgcctactcctagctgtacacctttgacctggtgtaattatgctctgttgatgaggagacagaaaagggaaaacaatcaaatgtgaaaacaaaagcccagcttcacacaggtacgcaggactcacggagaggacggccgtttcatgctcattcgcagctgctgcgagcggaaggaatgcttgtcctcagaaggctcactgctttccctgatgctcacagtcccttctcagtgggacctttcgtagggtctcgctagcaacagccagcaatagctcaaaatagaaaactcctttcatgtcctaagccaagaaagaaatctagcgaatttggttttttggcatatgctttttcatcctggattctaggaatcaaacccggggcctgcacatgccaggaaagtgctctaccactgagccacacccccaagctctctgatgtactcttaattgggctaattagataaagactgagtttaaaccaaaagtgtccacatgagctcatgttgttaggctgcttgtggctgtacacatgactgaactccagccatcattcagacttcaaagcccacgtcagcagtatgtctgccttttattccagttaatgacgatatgtttgctaagacaaactatcaaacatggtcaatgaatatgcatgcaagtgatcatcctcagtttctcatgtaggttaaaattgggataccacatgtccatgtctggaactatcttctgtttgtcccacactaaactaactcaattcggtctttaggaattctgtgttacaagtctgactggttactttctcagggtctgagagtcctagaagccagcagtggcatcagaatctataatcccaggactttggtgttccaaaaacatgggcagaaactttgaaagtttgagggcagcctggcatacgagagagtatatgctgcatagagaggccctttctcaaaaaaatatgaccaaccaaacaaaaaagataagatccctggaaggtactttgccctaaagaagggggtttgactaagagaaatataggttggttttgttttctagaagtacaatttttgtctgatttgctttagattggtttggtcgattgtttggaaagaattaaaactatatgtcatggaattagattgctgtgtttgacataattggaaacgtcctcttcatacctcagttattctaatggaagtattactatacatacatgtttatttttaataatatatttcaatatgaatttttctgcaggataaaattttaaacctttgccatctctgccagtaacctattttgcttcgagtctccaaattagtcatgttgtctagttttttttttttccatttctgtttatgtcagcctcttcacatctattgctgtgaataaataccagaatccacaagaaacatgggaatgaaaaggctatcctaacaacagttctgcacagagggaagttagagcaggaactgaagcagaggccatggaagagtactgcttactggcttgttcgcaagcttacacttagttacttttctgatagcccaggcctatctatctgcataaggatagtaccacccaaagtgggctgggccattctacactaattagcaatcaaaaaaaaacatccacagatgtgtccacaggcaatatggcacaggcagttcttcagttgaaattccctcttcttaagtgtatgaatttggcatccaatattgaccatcatatagcccatgccagtagtcaaccaaatagggggggaccatattataaaggattatttcttgggtcacaaatccttttgatcatgacccaagcttacgtgagttatacagaataacttgaggttgcaaattttactttattgatgctccagttcagtaatgataatgattatttagtgattgcttgtgacttaggcacctctgagtgtagaggctcaggcctgggatcacctcagggtgtcaaggatacagtagagccagagatggtggctcatgcttgtaacccctgtagttgaagagttagtcaggaagatagagaatttggggctagtttgaatgagttacacagccagaccagttctccaaaaaaatcagtttctagggaaggatctcaatggtaaggaatttgctgagaatcgataagggcctaggttcaagcttcagcttttcaaaaacatcaaatcaaatgtcaccgtagcaaccctttctgattccttaaccctacccaagccacaaagcaatactatgaatggaacagaaaaataattctaaagaactcagataggacacttggactcctctcttttgtaggccagcagagaaactctgggcctgaaggggatacgtcatgaagccttctgacattgcaaagcccctccagccttgctttctggacatacaaataaatgccctcactcaacaattaccacccagtggccatggcttccagtataaaatacatgatctaaagacaaaccttaaataacttgatgcgtatgaatgttagcattctcagttagttgatagttaagtgagatataattgacccacttttatagtaattgaaatattgttaatagagattcttggttactacttgaatgtgaatgtctccttgttattatgtctttaagaagaaaaaggatgaaggcaatgcatcccaacttaactcttgttggaatctgctgtttagttcttagaatcttagcggtccactgttattttattgttactggagtccctgaaccacccaagagcttccattgtcctaggacaaaattgaccctgagaacttggtatcttagaaagttcagaagtctagaggccaggaaggtcatctgttcacataaacattgactctaagaaaaaaacacaaaaataattttcaggccagcttacaaaagtttaggaataattcttacattccaaatgtggggaggaactccacaaaatgacttcaaacacatacacacacacacacacacacacacacgtataaagattgtctcttccctttatggtgttgctttattgattattttgacattggatcattttgccttttaagacgctaggaagaaaaaaaaacaattgatcaatggcctgaataaattctaatacctatgtctgtggggatttgtaatgaaacattcttccacacacagtggactcagtcagtcctgtgaggtgggcaggataatttttctcaggccagaggctcaacactcactacttttgaaccagggtctcctgacttgaatgtctacgtatttctacccagttgcctctcaaatataagcgaaataaaactgcgctgttgcatcatgggagttcaaaggtataattataacctcatctcataactagctaattagtatatttttaagtaaaagaagtgagtcagggaatttgacacaagatttcctgagtgtagtgtgatggtgcctgctaactatgggccatggatgggccttcattcctagattatttcctacccatatttaccctgacaaagagacaaggccacagccactgagagtttatgataatcttcataatttacaattgttagaatttcagattctaaacacagtttaactgctcacctttcccattagagatatgcaaatttctacccatgtctgacagtggttttagggcaaagaatcttccctcatgcaaatcccaagcaacccttgaacacagaatttcgctcctggaagaggttttcccctgacacatagtcaggatgccaaagagctatgtctttaatttgctttatggagatagaaggaacagcttatgcagccccgattactcttggacctatagcacaactgtcgtttctcagcaaaggaggctgctaaacctaagagaattaagctgctgctctggggtatgacacagagggctgatcgttttagagctagtaataaccagaatcctaaaattcttatgaataaaatgtaattttagtaatgtttccataaacagtggtaatggtggcattttagtcggcagtgacattagtcacattgaaattgcaccgcatcggcttttaaattactccacctgtctgtatgaatagaatatgttcagtgtaaaagcagagaggcagctgctgttaatgtctgcttctccctgtgcagataatgctggcaaatctacatgcataaaagaccggtttgtgatggaaaacggtacctgaccccgctggctcctgagtcacaaagcaatacctttaattaccagtggctgtgtttagttgttgatataaaaatgtcagcttccaggagcgtaacctcgggttcactccctctagtaatgtcactggctgcacactctttccttccacccacgcttgtcccgagatgaaggagcatttatcttgatgtgtttcagaaacatgtgtggcattaacgcttaaaagagaaacacctaatactgtgtgaacttgattgatgaactttctttttgaagatttttaaagattactggaatttgggtctgtctttctagccaggctagaaatgcagcgcgctgtttatatcttcaaaagacttagaagccatttatctgctctgaatgtgctttctcctgtgacgatcagggtcaggcatttcacgtagcagaaaggataatgaatagtgggcctggagaatatcacgtgtctttcctaggtgtccacatttctgctggaagatgatggagtttactctctggagaagcccatttttctcagccttttggtgtattggagcggctctgttgaaataagcctgggccaggcaagtggaccctcttgtctgttgccagccacacagtcgatgaaatggcaaacaggagctatacgtgtctggctcatttgcaagcattctttttgacttctttcatacaactggtgtttccgtgtttaatttaacaaggaacgcgtagtaaatgagagctgctgcccgagttcccactgtgagcgtgttttgcacttggctccctagtgacatggcaatttgtgaaattacgtgatggagtaattagaggaagccagggctcctgattgttgccatgcgtgtgcggagagggtttgttacgaggagggagggggagcaaaaaatagattattaccctggcaagttggctcaaagattcttcatttatttgtaaacagaatatttagtgaccgcataggaagtagctgtaatcaccagctcataaagaaaccacagcagagccttagcagcatcgcagagtgctcatgtaaaatttaagctgggaggcagaatccctgttaatgtaattagggtctaatttaccaccctttgcacacagatgtaataatgtctagatatttattctatctttaagcacgttacatatacctcagtgcagccgttactgaagagaaacaggtgtgcgcactttcctaattcatttttacactgtaaacacgtagcaattgaagggaaatatttaccaaaaatgaggggaaggaatgtctgcaaatgaggcagtaatggacagttgccctttatgtactgatggatttctcaacggttaagtaaattaaagcaaatgctagaaaaatcaataggccagcatagtcttggttttgcctcatagacttcaggacagaatgacagatgtggtatctatgacccatttaagtattaatgcttgaaaaattgcttctgcatgcaaggctgtaagcttagaaacattctgttatattaaattatggacaatagtatttttaagtgtatgtggaatttatatgtttcagttaggctgttcttatgtactgtagtgatactggaagattggttgtcggggtagccccataaatcagatgtgaatattcctgcatggaaatgtcgtcaaggggctccagttgaaaggtgtaaatgatgtattttgagtggatgtgtacactgaagtgaatatgctaactaacactatacacgaagaccaaattaaatttaattaaggcatagatactcggagcctttggaaaaagcctgaaaataacactcaaatatggcctaattcaattaacttctgggctacaaatgttatcttttatatttgaactagcagaagtagcatgttacatagatgggctgtcacagggtgtagaatattagaattaatctaaagattggaatcagcttccagaaatatacagatgcctgttgtatttctgttgtctgtaacacagaactgttcactttcatagtcattgttcatgtttagagaaatgaattaccctaggtgcagtggctcatacctttaatcccagtactcaggaggttgaggcaggcagatctttgttcaaggctagcctggtctacctagcaagttccaagatagccagagccacatagtgagagacaaaaaaaaaaaatcaatcaattactaccttcaagacaatttatatcatatcatagtaagtttgttgagtgctgggggtaggagacaagagacaggttgagaggcagattcatgtggacttgctcataagagagtgtggttgtgttgacattatcatgttggtggcttgcagtgagcttcttgttgagtccccatctcagtggttggtgcttcccttcccttctttaactagaataggcagacatggcccagactgcctctgcatactaaacatcatatataaaggtgatgctatgttaaataaaatcactgaggtgatgcaatgcaaagacacagagcaactgtctagattcttcagagaaaacactgtcatgattttttatttccatacagcatttataatatataatcatagcatcctcttgtatttgtatcatgaggcttacattgagcacattcagaaagtcatggaagcataaagaatggtctttaaaagttaaaggctgctttctaaaacttcagaaagtagaaattatgaccaacttgaagattatttgcctagttttatagaaatgatccttgaaattttaatagacctcaaattatctggggatcctttttaaaaaacacaaattctgattcaaggatagggatttttagcaagcttccaatgatgtccattttcttggctcactggcgataccttacctagccaagatctcagagacacatgccaaaagacaaatattaaatagaaaggtgatttttttcttgatttttataatttcctaactctggtttaaaatacagtcattttcattttatcagtcagactaaggtgttttgtgtttcttttgcaatcctcaattatttttcagtgtataacaacttccctttgggtatcaaatagctttcatgagtatgtcaaacatgccaaaagcttggcttcttttcacaaagaaatgagggtggttttgtctggcttattgacagtgtacttggacattctgggcagatggaaaggttgcaatgatggtctagttatagatgaggctgtgctcccatctcccgtcagtgttctggggatgctgtccagagctggaagttaactgtggtgtgagggcagagtgtgcagtgcttgtggacatccccacagtcctgctgtatccctggagaccaatggcttttgtcagtccgtagtcactacatcagtaagtactgaggcagtgacatgttttggggagaattgtatgcatatttttcatttgctctgtagtgaacttctgacttacacgcttgcactctcaaatttgcacctacctggaaagtgagttgttttaaaatatgaacatctgaaaagtcaattcgccctagtttggctaagatttaaggaattatgataagtaacaagtacctattaatcactgtggaacaggtaaattttcactcattagggtcacatactggatggagtttcttgaaattgggtcatttattttggttgaaggcattgaggatcaaaggtcacatggaatccaaaagccattagtcagggttcttttctggagcctttagatgtcattgtatgagtcacccgtggtagcctgggcctggcctgctgttgtggacctggcagggtgcctactttatttccagtttgcatagataaaaagcagagcagctactcttggaatcactataaaaataagcttacataaaatctccatttgaaatacagtatgcctgtgcccctgcaagcttcctctcagggcagtgtgggatctagacattgacaacagggagagacttgcatttcatagcaatgcaaattgtcctttgtttaggtgtacgaatttatccttcctcatggaattattgaagacctgaccttcttaaagaattgtaatgataagccacagagccatacattttaatttattaatagcaaataaaaatcaaggaatcaacttaaccagtggtgtgtgtgtgtgtgtgtgtgtgtgtgtgtgtgtgtagctattccctcttgctaagacggagacaacttggcagtactgagttatgagtagcagaagtactgggcaagagattttgtccagtcagttcatttactttccccattgagccctgtgcgtatcaggcccacaccctgaagtgaaaacaccatcaattaccatgatgacaggcacccactacttactctctgaaagttatttgtatttgactagaaactgtaagcactcagcaacattcatcacatgagggttcaaaacagactgagtaaatattggactgaatttctaagcagacatgcatgaaatggcatggatttgaatttttaaaaattgagctctaagcaagcatcccatttgacctaaacagattattattgactagttaatttgcatgtgatcctacaatgaatacttgtatcccaattttacagatgaaggaaaaggacagaaaggattagagagctaagagagatctctctatacagtgaagcaggggccataatttccaacctcctggagctctctacttccatgccctgacattaaaagttatcacttgtttttgttcttgaaattgcctcgcatgcacacttaatagatgaacatggagccaggcatccctatgacctcactggggccctggctttgccacagtcactaaagcattaacaccatggttagatggtcgccagacccctggccctttacatggaatttaaagtatccctagatgtttctggttttgctccaagaacatcagtgtgtgtgtgtgtgtgtgtgtgtgtgtgtgttgatgggtttgtgttgatggtgggattaatgttgggcccttctccaggaaagccatatttttatttgatttgataagaattatcctcatcagcctaatcccaccacacaggggctaaaatacttgaaagcactgtgccataaattatggttaaacttaaccaaggaattacaaggtaaatagagtcactgaaatttctctgtataagttcaactgcttggcgagggcctctgggaagcttcctaaggcagaaagaaccagagagtgaggagaatttgggatgaaggcttctgagagttgtgagaagtgggtgagtgggagtggggcctcaggatagcgggtgagtgggagtggggcctcaggatagcgggtttcctaccagaagcttctgtttcccgatgtccactgaaggtggagatgtggatggagccatgaatccagagtacagtcagaagaggagagagcagagcttgcagggtatacctgcttttaaaggctcagtggagcaaaaaacttacagaaagaggcaaaggtggggtggggggggctgtcaaaggtgtagatgtgagtgaactgatttctggggttctttccagcaccaataatccaagaaaagaagaaaggtacaaggctagctccaaagactccatgccttaagtttattcagttctggctccatcctcctctcccactgcccagctgatggagtcaccttgggattctggagttgctggcatttccctttcgtcctctctcctgcggctgctgattcttccttctaaatgcttcttctcctcaccattggagctatgtccagcttctgagttttctctgtctcctcagttaccccacctctaacattaacccctcattttcccattaaagacattttttggtgtgtgaagcaaaacttgaccaagtcttctttcactgaattgttttattatttccctgttgcccttagatatgagatgaacactccaggctagctggattagagcccacagccctctcttgcccttcccacacatgctccccacatcttgggaggccagggccaagtcttgcactttcttacaggtgctgtagggccctgtactctgcacctgacttagctgctttaatgactggtatgtgtcacctccatggtccctccccacttgactttctccacatccttttcatcttatctgggctgtcattgaaaggggaagtccttccttgtcctccacagaaaagaggaagtaactcttgccaccagaccctgagggcctcctgagaatccagagagttttttatctttgtgtgtgagctgcttccccatccagaagttaagatttaatctttctgccttaggttttcagagtcaaatcttgggtgctttatgtttttgtttcccctcccctcaccccctgccaaataaatgaataaaatttcaaaacagtatcaaccaaactctgagagtttaaggaagtttgaagggttgaaaaatctttgtaatataggggttaaatgccatcagtgaccacggaaggagctattgtagactcctggagggtgatagtgccttgtggtttctcaggatgatgcagccttgaagaagccagaagcagttgaattttggatgtagtttgggcaggaatttcaagcaatggcaacaaaccaggttttgtttcttgggcttttgtttgttttgagacatggtctagctttataactcagactgctagccgtgcccagaataactcacaatcttcctgcttcagcccactaaaagctagaattataagcatgggccaccacatcacaccctggttttccgtttttaatattgaagagaagggaaatttgaacacagttatgcatggaataaaatcggctgttttcatgacgtgtagcttgtagatgtgtagtcgaatctggaaacagaggaggagtctctggagatgaaagtcaagagggtgaataaggtgaataaggatcactcggaaactggcacgggtgaggggcaccaagcaatctgtcaccagaatggcatttcagagggagcatccagcaataggtaggaaccaaggaagggagagagaggcggggcttctgaggagtgggagggctctcttccccttctgaatctttctgcaaatagaagaaagtgtctgcgaaacaggactggagctggaggagaagaaaatcacacgagaaggttgttgggaatgttgtaggcagaacaaagacaaaagaaatggaggagaagataaaaaggactttcccagcgcagctgaaaacagtggtgaaatagcatgagatgccccacccccatggcctaggactcctaacaaacaggatccaaaatcatttttcttcgcatgttaaaacgaaagtgaatgccggacgtggtggcgcacgcctttaatcccagcacttgggaggcagaggcaggcagatttctgagttcgaggccagcctggtctacagagtgagttccaggacagcccgggctatacagagaaaccctgtctcgaaaacaaacaaacaaacaaacaaagtgaaatgattgtttgtttttgtttaccgaatacttttctaccagaaaataattgctttttggttttaattgactaattaattaatctttgttttctgtctcttaaaacttgctgctgtggagaaaatccactgagctccagcctgagcaacttaagcttgtattagcatgtctaggctgctgaacttgagactgcattaaaggctttatctcacgtttgtaggacgttaccatgacattactgtatgtcatctctcggtgttggttctatgagaagtttggtagcttgttcttgatggcctttgcatgcaccgtcaatgaaaaccacaaagagggaaccatttgttcagatatttttcctctcttcagataatttttttttgtttttgcctctccataatatctgagataaagggggtgggagttaatcttaatgtatttagacgatagccaagctactgagtgtgctctgatgcatagaatcccaggtatgtttctgaaatcttgcctctgccagaagctcaatttgagcactgggaaaggaggattctggaattggacagatcccgttaactttacaagttgagacagaatcgatcttgacattcctccagaagagtctaccattgtcattctggtctgatagtaggtgacacacacctggcttcaggaaataaaaagacaccttgcacatagtgatctgttcactgtcttatataaagtattcttggctcaatgtggtcgtgatatcatgggatgatgtatgtgatgtgtgtaaatagataagactactgacatgcaagctccctaatacaaaatgagtgaatgagtgagggaatgaatgaatggcttggaagtccctcaaacatctatcagagaaagacttaaacattgctttgctattctacactccatagcaattccatggcagtgctgggaagctgagtgtggatagctcatttactgggtatttctgtccttgtctctgagcttaccacaatgccatgcccagacaaagcataaaaatgacggtcatttctaggacacataattgaacattaatactcggtgacactgctgaaagaatgatatgtcaacctgacagggccggggtgcttacatctgcggattggctgaggacacaggcccttgtgccaggatcagaccccaggcccagctgcagaaggacagggatgacacagccattgatcaggagcagccaccatcagtatagatggtatctgtaaaattcgctctgcatgacctgtggtaaaaataaaacccaaaatagcatcccggactttgactatttcctcggcagacttttcagtgggtaacgtgttctttccatgcgttgctttttaaatttttcttctactagctctatattctgaataaatgggggcgtcatggatgaaagagaggttctgaggtgctgtgtcctttgttcctatgaaaattcattttgatgagtttctggctccctgattcgccatacagaggtggcgtagtaaggaaaccaagcaagaattaaaccaaacttactaactgtgatttattttttcaattctcaacaaaatattaaacgctgtaggcagaattccgaacaaagggaaaagaaatctatgcaattatttccttatccttgagatcttatctttagtgagctaagcctgctgctctagcatttccacagctaacatatcaccagcatatccacagtaagaaaacatatcaccagcatatccacagtaagaaaacatatccacagtaagaaaagacacctggagccattgccgagacccttggatacttacccctaggtgggttttcttaaaacaggggtgagttctctggtgttagtcactcagggtgggcttatgctgcataaaatgtccaaaatagggccccagagagcatccgttactacatactggttaacatcacagatttttaaaaaaatctcagttgcactggagccttaaaaaaaaaaagctttcatctgtgaaatctagtttctctttgttattaaaataaatgaagccattaaacaaaatatatgcatgtcgtagttgagctcattattagcatcatcaaaatgatagggtttcctatattttagaatagggactatttgaggaattgtggtgtgagatacaaaatcaaaatatgctagaggttttgtcaaacttgcacataatatacatttttccttagttttctgcctctctctgtctctttctctgtctctctctctgtctctgtctctctgtctctctctttctgtgtgtatacaacttttgggaattatttttctcctttcaccacgtgtgtgggagatcaaattcaagtccccaggcttggtgcagtcacctttacccactgagctatctcactgactaatcttctgttttcttctttatatatttatctgaacctttctaagacaacaacatcatcaacaataaaatgattttgcttaaaaaggctaaaatgaaaaggaaaataatgacagcatttgctcaccaaccagacatccaaaaactgtattaactataactattggtaggctcatattataaatgcactgggctgaaataatcccaaacccttcatttgcaaaggtgtgtttttaattgtgatggagtttgcttggtattcaaagatgagttctcactggagcccaggccaaagaattttctgctcccctttcctgagagcacatttttctgccaaatttggcatttattctttgtcgtggaaggtggttgcatgacccattctgacttctagccaccaaaagataaaggctttcaatctccaagtctaggaagccagatcaggcttcccactttgcatggtcctgagtcatgactcacacgctccctagagtactcatggtttggaatatttccttggtaccttagccagtcacagattgtgatagaggcagacccaggaatgtgtgtgtgacctctgaaggccaccggagcaccctgactcatccctctgaagcctcgacatgtctattttatagctttacctcttacacaccttgggttttcagtgttttctctctacaatctttccttttttgtaagaatacgttgtttagtcccctctgtgaggctcaaatgtattcaggaggagacagagttgagtctaaagcatggaaaagaaaaatagaacaggacacccacttcccttcctacagaaccagtggtctgttttggagaatgtaaatgctttttttgtttgtttgtttttgagacatggtctttctatctccttctgtctgtcctctgcctcctgagtgctaacacatgcctctatgcccagccgagattctgctacacatcattgcatgatagtaatggcaagtcctgaagacagcctgtccggttctgcattggtacactaacagcctgactgggagccttccctagtgtctggaagtgagtttgtccagatagagagaattataaaattaaatacagattaaaatacctctaccacaattaattagtcatcttttcctaacacatcaagagctgcatttgatgtatttttcacagattgcctcatttgcttgctaccaggtttgtttttcttgttgtatagacaaggaagtgaggcttgaagaactgagacactttcattaagaccatacagacagggactggaaannnnnnnnnnnnnnnnnnnntttgaactctgcgggcatagagcatgtatgtggtgcgtgcgcacacacacacacacacacacacacacacacacacacaggcaaaacactctggcatagaataatcacacacaaatctttaaaaggtgttttcagagaccatatggccagcacaagtcccaaagacctcagttgtcaagtgcagtacactcaactaaagctctcgaaatcaaggctcttaaggattatccttttgacttgccatttgtaagtgtgtaaccacatccctgaagcatcatggacttaatgaccattctcctgcttctacacccaggcctgaatcctctcaaaaagtgacagaggaacaggggaaattagcccttctggatacataattagcagctcgtgtcactaatgagatggcagagaaagatgcattaaacaaatcaaggctgtgtctagctgcttcacactaagcagtcatcaggcaaaggttctgatttccctggtcctgtcttagaaagggcagatgctgtcttgttcgactgccacatcacctgtgagtcagaatgatgacagcccctttaaaactcatcctgctttctttgggtctaagttgcttaattctaaacacagagcaatacatgtctacacattaaatcagagactggaactgtgcagtggtggggcatgcctttgatcacagcacttgggaggcagagaagggagatctctgagtaagaagccagcctaggactatagagcaagttccaggacacctagagctacacagagaaaccctgtctcaaaacaaaacaaacaaacaaacaaaaacaaaaaacaaagaaaaaccagggactacattccctgcctcacaactggctccaacagatatggctacagcatttttactttatcattaaaagataaactttgagctccagtagagtgtaaagaaagctagactgagcaaaaagaggctaagagcctaggagatgcactctagcatcagaccctgcatgccagccctgtgctcactctaggactttttttcacccttgcacagttactgtaacgtgacatcaatttatgtactcactagttaatcatagatttagattgataaaatataaaaaatcacaagtataaagtataatgtaactataggtatccctcaaatgccaagccaaagtgttataattataaatggaggccagcagcgtcctttacattgacttgaatatcattgcttttgccatcgttctttgatcttcttctgatgagcagcctaacacttagctcttgcctgtctaactcattgtacaaaccactgtgctgaaataaggacacatctgccttagcattttccagtccagttagattgagtacctaaaaatgcagaacgtgagagataaatactcaggatttgcccacatttaacgtattctctcttctggaacctttgaagacagactgtgactgctcatcagtaggggcttttgaaagaaaatttagaaggacaaaggtgatcttagcacttaaaaaaaagtttttagaggcatttgcttgctgtttctcttaaggaaaaattctctttagtttgattgcaaggtaaggtttgttaaatgaagtatggtgaaaagctggcatgtgtgttacagagaataaatgtaattaactagctcgggccacagtggttaaggggcgaaagtgcttaggtgggacttggcttaggaaaggtaaatcgcatttgaatctgaacttcagatctggatccgtgctgctggcatatgttgaattgataatgtccgtgtgttaaagaattctgattgtttcttttgcctctctcccagcttataaaaatgcaagcagacccatctaatgaatattaatggcaacaatgtctggataactatgaagcccctggatctgtagagttcagatgtagcagccagggaggaatttctgtggctttccttaatacaaatttatggagttttaaggaataaacattacttattattttagtatcagtgttccaaagtagagatttcagtaaaataaaaagcttaattccgcccccccccccccttggacattttcttcaccaaggtcttcattttaagagacaggaaactgttagctaaaaaagaaattaacttaatcccccctcattaagtttcagtctttttttgttacttagagacaagttataattatacctctgcagtgcaaagcatgttgtacacgttgttacacaaaagaactccagttgttaaggggacagcaacagaaaataagaacattggtaaatactgatattgtttttctgtacatctttcctggctcttgaaagcacatttcatccaggcattttaattcattagctacaaaaagtcttcacatgtgattttagaaaaagttaacccactggctaaattaaataacagtttcccaccaaagtggtaaatgcggcctcataggtggacagtatctgactctccatacattccagctccaccatgaacgaagggggcgtcttccccttcaagttggtaccttttagatggaacttttagtaagcacagggcaaatccagctatgttctctctctctctctctctnnnnnnnnnnnnnnnnnnnnnnnnnnnnnnnnnnnnnnnnnnnnnnnnnnnnnnnnnnnnnnnnnnnnnnnnnnnnnnnnnnnnnnnnnnnnnnnnnnnnnnnnnnnnnnnnnnnnnnnnnnnnnnnnnnnnnnnnnnnnnnnnnnnnnnnnnnnnnnnnnntccccaactctctctccccctcccccagacttctcattgtgaaaagacaggggatcgttaaaatgcagtttgcagcattcccttctagtattctccatctttatggctgttctttagatttcattgcacctttaatagtgagcctggtcaggagaggtgagaggaaatgtgtgcacacttggctgtgaggcctgcttcccagtgtctgctagctgggcttcaatccctgtccctgtagattttaatgtccccacagactgctggcagcctgcttccagctggggcaggcatgatgcagtgaattgcttttgaatgtgctttactcaaataggcagtaattacaagcttaaagaggtttagtggtccagtaaactacataatcacccctgaattagcctgggctcatcagttgcagtccagcaagctcaagtctgctgtttgtatgcagccttgatcacatagcaacctgatcagcaggtgtgcagcagccagagtcccccataaacacaactgtctactggggacaatgatctctaatgagatgaggctacaccatcactgtaatttaagtgggaaaattagcactagagaatgagtaccagttccaggggtcttgagtcatattgggagcagcacggagtctccattgctttctccccgtctctgtctttctctggaaacctcctcaccaaatggttttgcctctacactctgttctttacccaagaagctgctggtattgtttttgttgttgttgttgttgttgttgttgttgttgctgctgctgctgttctctgaataattaatgctggatagaagcatctttagaggcaataataaggactcattccagaaaggtcggaagagtatttcacactcttgactttttcttccagtttcaaaatattttctactttgatttttaaagtggaaaagtgttctttgggctggtgatgggtcctttttagtgggcatgctctctcaaatagcagagatcagcgaagatagtgtgaaaaacggttcttagtttattagactgcgtcatataaatcagtcatgaactttctgttggaaaaaaatggctccatgagttatgctgttattgtgtgagcttgttaaagtgcagttcttgggaagaggcttagtggagagcatttcctctgacatttctcctgtcctgcgctgctctgggtactgcttacactgagcttgatcttcatcactttggaaatagctcatacttaccaggttggcaaaaagcaagcccactgacaacctagagaccaagagggaaaatgatctagctatgtagctgactctcagggacaaatcccaactctaacttacatagaaacaagttagattctgagtctgtagagactatagaaacagatgttaaagtcctcaaaaaagagataacgtggagtgagaaagatgaatacttgttgaagtgggtcagcaggtttcttggcatttatctgcaggaatctactaacaaaagccagatacacacccagcataacggcacatccctttaatcccatcacctagaaggcagaggcaggtgagtctgtgtgagttcaaggccaacatggtctacatagtgagttccaggacagccagagctgtctgagaaaacacaaaacaacaggaataaaaagcaagttaaaggattctggtgtctctaacttcaataactttcattcattcatataccaaatatttattgagcacagaacttgcctagttgcatcactaatggaaataacactcatgtgtttttatcagtggtttattcatctgaaattattttaaatgtagtttaactcatacttggttaagaatcacgtaaggaatggaagtagttggaagcacacacataccaatttatttcaaaggagagaaattaaggcgtagtggaatgtggttagatagattagcaggcatttgattctaggaacttaagaatgttctcgcatataacctatcattgttcctgcatgtgtaagcaatgctacaaacactaataaaatgatgggtgtagtaatttccaatgagtttttctttttaattttatgataagattgtcttttggttctattaacagaactgagttgtagcattaaaagatacatatgcacattagaatgatattttctttatatacaagtaggccccatcatatacatctgtggttgactcatcagtaatgagaaggactgcctcagcaaacacacacacacatatcgaatgttttcaacttgatgctaccaccaagtttcaaatccaagccttgctatgtaccagctatgtcaaattaagaatgattatcttttctgtattcattttcctatctttgaaatgagtataatcattgtacctccctgtgcaaatgtatgtgaaatattttcaacaatgcctggggcactatccttacctcccaatacatgctatacttactaagtgttaattcagcaatgctataattaataaagtctctatagctggaagctcaagacagagtgtggtcaaagccctggtgagataagtctcattcttcactcaaccttgcccaaaatacttgcttccagagaggaatgggggaaaaatggggtggatataggaaagcggtatagaaagtaatggcaattgtcttctctttgtatgtcacaagggatgtgatgtacacagtcctcacactcccttgtgatatatatatatatatatatatatatatatatatatatatatatatatagtcacagaagggaatggggaaatgggaaggctatgtcactgggaaagtaagcaagtgggaaaaactcaggacagatctctgcacccgcactagtgactggaagccctcagcttcaacattcccaggggaagagcagctaatcacaaaccaaagagtgaaacctgaactctcttcttattctacccccgcctctaagctcctctatctagtctgtttggtttccttctgtttccatggttgcctactgagataaccaacattcagaggatgataattaattataaacattcaaaaataattctagcacttttcattaatgttaagacttttaggaaggtaataagtaattgctaatttagagtcctgtattttatcgatttattctgcctgcatttagaagtggcaacatagctactgaagaatgacctgaaacatcatcatactagactacagtgactatagaacagataacaggactcgggctgatgttatcctaatcccactatacatgtcttctgggtttaacatctaatttacacttagaagaaaaagatcagttaagcaaagcaggaagaacacttactattggccttgtaactggcaacaaaactcttttcctgactatgtcttcaaaatatagtcacagtaatgcaagaaataaagagagcggtgaaatattatccagcattctgcctttttttccacgagtttgtcattctcaagtgataagatcaaggctgcagaccctcttacctgacttccctacccacacacctccactggtcatttgttatagtccttttatatgggcaagatgttaagcgagatcatctgcagattcaactaacttctagaaaaagccagcgccaaacaagaaacaggacattttgtctggacaagagggcagactcacgatgttgacagaacattaagaaaacagatcaaaattcacaactgatgctgttccaaatatttttttggcttcttagccaggaccacagttgcttcctctccttttgattcaagcctatgtaagggtgcaggacccaactgctatgcattcaggctatgctcctcaactgcatggagcactgcttttgtaatgtaaatgccaggcacaaagtgtctctttgataatgtgcagtgagaagacagaaaaagcattcactgaaacagtaaaactaattcataaagctgaaagacaataggaaagcattatggatttttaaaagaaaaaaagtatcctagatcaatgtaattgtcacagtgtagtcaattgtcacatccctagtcaatgcacaaggcgaaaatgactgcaattttacttaaaatgagagaaaattttataggcaaaaaattaggttaaccagatatagttagttctgtttagttaacaaatttctccttacctccttagagctcaaacacatagctgggtttcgattttgacccctaattccttagcagaaaaggggaaaactctgaaattaaaaaaaaaaatacagagatttaatggttaaaagccatatggtagctttctcccttttctttaaagggagtagctctccatcacataccagagtttagctcaaggtcaacttatattaatgcattaaacttagctgtggaggaggcacacggctggaggaaaaaaaggataaaagaagttctgaaattgttctcccaacatattcagccaagccacagaacattgccctgataaggctgatattggacacttgccataattcctcctgttagatcggcccctctagtacccattcccataccttttaaagtatagcgtgtaagattttgcttgaaaattgcttctacctctattgctttgttatagctgttttgcagtttctgtatagaggcacttctgtgtcacaagaaattactaatctgaggcttgagaaggggcagtgtagccttccattatctcaccagagagctctgtacaggattattttcaaattttctgctgccattacaatgtgctgtttgagtgggcaaggcggtgagggaggggatgttattgaaacttggtttccagggcagataagataaagttcatcactgtcttggcatccacatttgcggccaggggtggacatttgatgaaaggagcccatttggttcaggatagcgttacgatataaggctggacattttccatctgggtatactgtagagtttctgtactttcctattgatgctcatctgaaaaggctgcttgattgtttaaatagataaattctcttccaaggtattgtaaacttgtaaatactagataactgccatctctgtgggagggtgtcccatgccaacctcaataaaaaaaaaagtagaattgcactaagaaaaattttctttagagaagtgccattttctttctgtcatctgctgttcctcgtggctagtgaaaatgacagttcagactaaactttaatatgagctatttctagggtgtttttttttttgccagatattctttattgcagttattcagggcacatacactggggatcattctgtgctttgataaagctataagacaaccattctctactaggtcatcattacaagtcactctgtgtacctagacatgtacaaaggacagaaatgtggtgggagtcaggctgctgattaaggaaatgacgatggtcatcttgtgaagtttctctcatcgctggggtcccatttctcaaagtgactagtttctcgtccgagtccagcttctcctctcttgccagggaaactagacagatgcaagcgcgcaggttgaatgccggaagggagggtccgatttgcccagacataatcagtgctttaaggctctcactcattcctgaggtgttaatgcagatcaaatgcacttcagacacaacccttgtagccaccgcgcgcacgcctagccctccctttgcaatcgttaattcttattgtaggatctagaggtaatttcatttgctctcttaatgcttcgcaggtctcccagtggcacttgcatctcccgtctcaaattcccatcttgatcaattgtttgcaaataattaagcttttaggagatagcgtcacaaggctaatgtacacagcaaaagctcggtctccctcactgtctattggatggtgatcaaatttacttggatatcccaaagtgattaagctgattggtacagcaggccagtactgtacaagaacccactgatctttcttcaaccagtgtccttgtcatttgcgtgcaataaggggcaggtgctcggggaggtggccaaaagaaacgtaagcctttattttcagtagtttggaatgaatcttctgttttctcctgaaaatggcgcatttcagggctcactcttgatgctttgcagcatggcttccgcccttgtctcatccacacggtgggtgagcgccttggggggctgtgcatgatgctaacagaagcttggaaggctaagcacgtgagggtggttggtttttgttttgtttttggttcagtttggttttggtcagtccagttttctatgtctacaaagacataactcatactatccataaacagtctaggtaattgagattcataggatttgagatatccaaactgctgggtttgtgtttagaagcctacttttctgccaatttttggctgagtgggtatcagctacatggagtcatagtgttcatgtagtttttgttgttgttgttttgtctttgggcaattatagtttttaaaaaaaggagttgagagcttgtaggacaccaagtccaaggccaagaaccataaaaagaaagaaaaacatagctgctttaccatagacaaagaatttgctggtaccccagtatgtacaaggacctggatgtcattccccagaatattcaatttaatacacaaacatatacacgcatgtgtgtgtnnnnnnnnnnnnnnnnnnnnnnnnnnnnnnnnnnnnnnnnnnnnnnnnnnnnnnnnnnnnnnnnnnnnnnnnnncataatatatacatacatatatatagatatatatatcctaccccttaccataccataccataccatatcccttattaataatgtccaaatcattgtgacatttaattttatccaggctcattcatatctacataaaaaatatttcccaaagagctgaaaattgcttaatggagacagagtgctgcgtctctatagcttggggctgcctagcaattatgctgcatgaaattagacacagtttgttccaattacttaaaatcagatcacatgaaaagtgacagaggagaagaaaaaaacctagccctttctcagttttgtgatatttaaattatgaaatcagaaactacatgatgtgaagaaaccagtggaatttgctgtggaattctggggcgggactgcttctctttggagctgtagtgattcaggtaattttaatgatccaaggagaatttttctgacaccatttgcataaataaaatgagaattgcatttgtcttctaaggatgtatgtaaagcttgctcacaaacaaccatgcaaaaatactcctgaaaaacacaagacaagaaaatcgctgtgacaactctcaattttcaaagtagctaaataggaatggcacaaatactaatttttccatctggttctggtcatagcattaggtcagccaataagacaaggcaagaaatggtgtaactcagttctaccgaagagtaagaatagccatatttattaattctcctgaaaaagaattgacagaaacttttgtagggactagaaaactaagtaaatagtattgtagaaagtgttatagaccagaatatgtctgtgtgcatgtttataattttatattcaaataatgtcaacaactaggtggtattgaggacttagggccagttagatggtaaaggctcctgctaatatgagttcaatctctgggcctcacttgatagaagaagagaaccaattctgcaggttgttctctgacctctacaagtgtgttgtgacaagcatctacataccacacctcctacaccacacactacacacacacacacacacacacacacacacacacacaggaacatatacccacatacatatatacacacatgcatatacacacatacacacatgcatacacacacatacatccccacacacaggaaggcaaggatgttttatttgggaaacttcacattatgtatctcaatcacactcactttccagtcctttctatgtccccctccaaaaaactatgacctcctccccaagaaagaaagaaagaaagaaagaaagaaagaaagaaagaaagaaagaaagaaagaaagaaagaaagaaaggaaggaaggaaggaaggaagaaagacagacattcagtttgtgctgtgcatgtactcactggaacatggtccaactcccagtggcctgccctttaaagaaagctgagtccttttccacctgtaccccggccagaagccatcagctgtggagagctacccttcagaatctttatcacagttttaaagagttctctttgctggtttccttcttagtctgttacttggggtggggggggtatcttggggagggtagtagttgccaaagaagccttctatgttgacaagaatttttttaaaaagaaaattgtatatttcaaattgtagtttgtaattcttattgggcactaccatttagagctactagttgagaggcctttaacttcaattgatgttagggctcagagtgacagaattgagggttataaaacttgctcatgttcaaaatcttataattagtaagtacaatatcatttataagctctaatagagtcatttgtattatactagtgtcatttgtatttgtattctagtttttcaactaatatagagatagaactgctatatataacattataattcagtattctgtttgtaagaagagattcatttgatgagaattgtgtggaatgcttttatacaatgggaattatgttttaagatcaggatgttgggtggtgtttagttctgtactagtcccaatacctgttttgtttttctttcttgagtgtggccctagctcattatagtgtaatctgtaagtcaatgccaccttaggattgaggcaaaggaaatattattgtgaatgcctacactttctatgagctctgaaagacactttattatccattttggtgttaaatctgatagatagtatctgtataaagtatcttagttatagttagtctccttgttcaaactagttgctaatttcccattacatactcatctagactttaagtttgatgaataatgaagcaaggaattttgaagtggtacttgaataagaagatactccaacaagaaaatacagaagaagaaaatgtcttgctatcagggaataaggaaaagattgatgtgataagatgtgtatgcatggtgtggtgtgatgtgtgtatatgtgtgggtgtgtgtatgtgtgtttctctgcatgcatgtgtctatgtatgtatctatgtgtgtctttatatgcatttgttgtcatgtttgtgtctgtgtgtctctgtatgcatgtgtgtatgtctctgtatgcatgtgtgtatgtgtgtgtctctgtatgcatgtgtgtgtatgtgtgtgtctctgtacgcatttgtgtgtctgtatgaatgtgtgtgtgtgtgtgtgtatgcgtgtgtgtgtgtgtgtgtgtgtatgtacctgaccttgagctgacccctgacagtgacactgagaagtgtagtaggtagactcttggggtgttcgaagagcagaaatgagaacagtgtagccgagtgagagcaaagctccaggtgagatcagtggtactgaaagggtggggcctggcaactggctctgcaggctgttcaaggaggtttgtgaagacttagagaggaggaactatagctataggccttccctttgcctgcctggtctcctcacatgcaaaccaagaaggatggttgttccattcgtgtcactcagagggatctaatggggattaattaccatcctgtctgaaatatacctcgagctctttagagaaaggcactctattccatgaaagcaaagcctcagtctaattgtgtatttattgattaagtggcaatcaaagacaatgcttatgggaaaaattactatatccctgctcttcacaagtatacccgatgtgtgtagcacatacttaaagttacatgtaaaagcactgatgtgatcattaacaatttcttaagcgcctgactagacattattaatgagattaaaagctatgttaattatcattcaatagaccagagtttagtttccatggcacacagagttaggttgagtcttgagggtgccctttctcatttataatggaactaagagtagaggaccatctgtcaggacaattttgtctcggaagaatttatggggaagcaaccttttaaggcagccagtgtctccataggtggaaaccacaaccccagctgcaacagatgaatgaacttagccattgattgctaagcagaaaatgtttccggaaataaaaatttctataaaattccaaatttatttcataatttaattatacaatctataatttttttgtattctcttcctcatgaggaacagagctgggcctgttcttagtaggtgaaatatgatgtcctttgagtttttattggcccttatgcagaattctagcatatgttgacctttaggtgtggaaacaaactttgtgcattgcttttcttatcactgtgagcaaacaaaacaaaaagaaaagaacagaaaagaaaagaaaagaaaagaaaagaaaagaaaagaaaagaaaaacaacaacaaagcctggcaaaagcagcttggggggggtgttgtcttggctcacactttgaagggataccgtccatcatagatagagaggaaggtgcagaaggaaaggcacagctgtgggagcctgggactaatatctacaccctcacatctccagagacaagaagtagaggcagccaaatgctaacactgagcaactttctctttctcccatttctttagcgcagttcctagttcacagggcagtgctgtctccattcaggatgggattttccctcaggtaatcctcttcatggagaagccatgcagaggtgtgtcccataaatgacccccaagtttgtcaaatgacagtgaaggtgacaccaattttggttgagttttgcttgtgggtgttttactcagcaagagttgaaacaagagtgacctaaataaagtgtacctagcttagttttaatattttaatccagcagcacagagttacagagggagagtgtaacacctgagtactggagacctcagctgagcgtatattaaatctcagagatattttttctagatagcaacacacacacacacacacacacacacacacacacacacacacacaccaatctgaccaaatacagtgaagatcacagtaaactttctagccttgcaacaaataaacttgttaaagagtaaactcaatatgaaggctctgcaagtatcttaaatagacatttctacacttcactaagctttgtaattggcttgtcttttactgccattaattagatgatgtagtattccattaataagagtgacacacctcagcatttttacctttaattatagacctcactagacacttaggttattgacaaaatggtataaacattgcctgctgtacacatacattttttgatctctttcagcacccttacccttctgaagaacagaaaaagcagttggcacaagatacaggactcaccatccttcaagtgaacaattggtgagtaacttggcttgagtttacacgcaatctgtttccccctctggcaacctacagttaatgtctggcatgaagaagccacacccagttgctgctgctttctctagtggcttgctggaactaaactggactgctgtggagaaatgttttctagcatggacaatagactgtattgccttccacctcctttatgactcaacaggtttcatgcacagggtgagtgcatactgggaaaatactctggctcactttcttcaggatgattgatagagttggtatcatactaatttccccgaaagaagaaaatataccattaccaaatagtggttgtaaattcaatgaaaaactaattcaattagattttgttaacattctgtgctcaaaaatggcatccagtattctcttatcatttaaatatgaaaagggaaaaatgagtatttgcggggttttttttttccctctgaaggtcttcaaagtctgatgttgctgaaggctgttcaatgatatttctaagtaaagtagaaatttctgctctggggtaaagctgcggtttacatactgagtcctaagctacatcattctgactacgtgtccagcaagattgcactgaggctttgagaaagtgtgattcatttccctctgtgactctgctaaagccatgtgaaggataatcacccaggcctactgtcatatttgaaggacattgaaatccaatctcccctaaaactgaggatatctaattaatcatcctaatattttcagatcagtgtttttgatggagaagtcttctattctttgaagtacaatccagaaaagcctccaaatcttgttggagaaagctgaggatggcagtttgtagacacaagtatttctttttgttcaataggcatcaaagattaatattacagaatctctgattatataacctaatccattttggtgaatacatttgtatttgatgtccattgtatttacattaacagacccttcactgttagagagcctcgctcgagcctttgggagatatttcagatatattaaaccccattacagaaaatgtaatttctgtcagtataatcccatgtgttcttcaacttagtattttagagataacaagctacttatggtatatttgcctttggaggattaatttacaagtacactatctgcaagacacagacagactcacacgagctttgcttgtaagggttatcaattcctacgaccttaccacagctttcagagatcaatgtttgcagccctcgtagtggatagggaaccaccaaagccatactgtatctaaatgtgttgaattctgttgcctctgaggttttgctgtttgcctatttttatctgctactgtttttgaaatcttcaagactgttaacactgcatatttgaagtcggcctttcagagaaatctggatgattccataagaaagacatagttttatatgtgcatgtacaatcgtggctttaggcttaaagtgatggtgaagtcctttaaagtcctaatgcagtgggagctgttgaaatgcgacatctccttgggaaatgttctttggtgaaggtaaaggagtggtaggctgagctctaattaaggagctctaaggagcactaaggagcactaaggagctggctgcctattgaacacaccatctcccttcatcctcaatgttgctagcaaagttactagaataaattcatcacactctgatgtgtacagaccactgttgggacattgtttgtgaatgcaggggcaaagaggtcttcctgtgatgccagcccatctatatacactatcatttctctggattctccacacaaggtctgcaggccctcattagtcattgaccactgtttaacttgttcacttctgtattagaggggagaaaaagcagactaggaattaggaagctaggaaacaattttcagagtgtgtgtagacctcaggctgaagcttcagttggcagctaggtgatttcaaaatcactgttactttttcaaaagggaccagaatatgtgtggtgtttcctttcgccttgtcccttccgttggtagaattggttcttccttgcacatcattgctttgaatttattgattcctctggcccctgttaacaacctttctggagagaatgtctctaaagcaatctaaaatatttgagatgggtttcttttcttgaagtgtgataaatatggtgtttatgtgtttggttcgagtataaaaatgttttgcaaaccgatggctgagcatggtggtgcatgcctttaatctcagcactcaggaagatatcagagttctaggccagcctggtctatagaatgagtttcagggaagccggagatattttgagaaactctctagaaaaaccaaactaaagcaaaccaaaccaaacagaagaactcaccaaacaataattctttagctttaggtaggaaagagcacacaaacaatggaggtccttttaaaacttgaagatggcattgaatcttaaacaatgcctgtttgaagactaaaaggcagcgaaagcagagtcagttttccttttactctactataaaacctcgccaagccccccccctgctttttttgagagcctgcaaataaatactttcactgcatagaaggacagcctatgatgttattttcttctagaaatcctaactttaaaatggtcattaatgtattaagacttcctctttacttcatttagttacaacttaaaaaaaatatcttcttggatttcttaaaacttgttaacacacatgtaaatttttgtatatgctatgagtcactgttgaagatgtttcataaaatgctgaagggcaggttgggtgtagatcagtcataattattggcaagaacataatgtattgacatgcacaatatgttaagtgagaactataaactcatgtctagttgctagcttgtcacaggaactttaactgaagcagcttcagtgaggcactgactagaaacagagacaagaacttcgggcactattccttcacaccaacactaaactcatcttgtatctttgtattgacataaaggatatactgtgcgtgttaggtgactaagacagaaatagatgggaaaatggggacgtgaaagagcttcactgcaaaacaataagagggatttgatgaagacaaaacagagataaaaatgtaattgcaaatacctatatttattctactggtcagaataataagagaggagggatcttatggaagctagcattgagtctgggatggaatgggtatttatcatacaagaggttatagaccagatctacgcaaacatcttttgttgatggcccacataaaatattgtaaatatgttgtttgattcacaaacaacatgcatggtttttctaagtgaacttctatgactgatgacttcagtgttgagagaggtttaaactgaagtatggtcagttgtgaggtagaacctgcactacacactttcatctcccttctctctgctcattcagtctcaagtataatctcactgagaaatggttaaaaataacactttgggactttctaactttggggtttttttttttcttttcattgttgtgagaaatacttctgagaacaatatccctatgttgagcagtttttcatttgaagtagaaatattgtaagttttggcagtagattgtttttcaggtctttaaatatttaagtatgtaagcaaagctttaaaaaatcatttcagtattcaactttttattggatgtctttttatttattgtttgagaatttcataagtgtgcacagcatgtttttaatctatcctcccactccttcttctaggcagatatctaaaggaagcataaacatacatgaacaagcacataaatgaacatgtacatgtatgtgcaaactcaaaaccaatatttggctctcttttctttttagtataccaacttttatatgttcaaagtgtgagtgtagaacgctcaaataaagactcacagttttaggccagtgttgcagaccaggggcttccctgtaatgaaaactgatgtcttatgctgtatagtactagctgagaatctcagacacaccctgtctctgcagagtactaccccacagtgcatggagtcaacttctagcttcttggctggttgcttttcattctcatactttcataaaaagtcctgattttaaacacttacccctttgtgctctgagaaggtgacactgttttgacatgtaaactatacattaaatatgaaatattatatatacatattatatatatatatatatatagagagagagagagagagagaaatgtatataggaagaaaaccctttttgtcaatgggtagtataaagttctaggcagcactctaacatttgataagccatcagaactactgtccttgatagattttaggttgagaatccatgctggacttcccaagtctttaactattgcccttaaaactgtcaagcattcaagcatcacttcctgtttcttacccatggggggaaggtagattcttacgctacaggcaggtaaaattggaagcttatttttagaaaatctgatctttactataatagctgcaacagttaaaggtcaagtttatttctgaattgttggagtaatgcagcaaatacttttagaagtaatcaaagattctataaatatagggacctgtttagatgtaaatgctaaaacattcacaaattatcctttcagcttctgtgatctaaaaatcaatagaggtcagcgggttccatagaactattctgcttttcttctgatgtaatttaataacacattttacagatgttgtttaaacattaggcgcagattgttttgtcaataaagctaaacagaggcatgacacaaagacaagggaaaaacagatgtttaaaaaaaaggagagagagagagagagagagaaaacaaaaccaaaaagccacagcagcgttcagtgcaggagtccctgggtcatttgtttgctactcaagtgcaaaatgaaagtgcaactgtgcagtgatttctcctggctggaagttacctagggatgaagcaactctctctctctctctctctctctctctctctctctgcacacacacacacacacacacacacacacacacaggagtcattttattatgcagctgcttctgctttccccttggagaattgcagagtaacctacatttaaagtggacttcctagctgatcagtgaagtaacaggtgcagtggggggtgctgagggggagagagagagagagagagggagggagagggagagggggagaggccnnnnnnnnnnnnnnnnnnnnnnnnnnnnnnnnnnnnnnnnnnnnnnnnnnnnnnnnnnnnnnnnnnnnnnnnnnnnnnnnnnnnnnnnnnnnnnnnnnnnnnnnnnnnnnnnnnnnnnnnnnnnnnnnnnnnnnnnnnnnnnnnnnnnnnnnnnnnnnnnnnnnataggtttgagggtgaagatctgtgaatttagaaacttccaggtactgccatgttggagagttttaggagttcaacggagaggagacactacttttctctgcagatttgagaaactaacaaagcaaataaacataaaaccaaaacaccacaaaactctctgtaaacaattctcttagagaagacttttgctctgacaatatggtagagtttgctgaagttttgaatcattggctttgtcagaattcctcccataaaattatatccttaatactgttgagaatgggcactttaaaaagggctagctaggcattgtttccctgtggtagatgaaagcttagactcctcccatcagggaagtccaaacaccacttcttgaaactgctgcttctcttcctaggcagcatcagaatttttaggctaagactatgtaaccctacctgaagctcagacttccagctgaggtagcattttgacacctatagggtgatcaagttagactcggagttgggggacccattctctgcgaagctggtatatctggatgtgtacagttgctttaacctagggaaggtatggcttggggtcgactttgaacaccatgcacaggctgtacttgtggccagacctcattacggcaggtttgccattttttgttctgtgtcaacatgagcctctagcaagagaaataggtgcccagagcaagggccacactgacttcagtgtatctgagtagagcatcaagaactcgtcatggaggatggctaaggtagaagagcttgtctctggaaacagcgaaagagccatgtgagaatataacagatagtgcaagtcatagagaaagaagaggatatccaagaagtgatagtgaatcaaatgtttaatcgtgcttctcattgctgaccaaggagatgtgtgcccttacttaggtcattttcccacagatatcagcttcctgtactttaaaatagacatgtaggactggttagtcagaactctagcccccggcagctctgtgttgtaggctgtgtaaagtgcatcaggaagcaaggtgaggctgatctaatcacagcctcacggtaggactcaaagggaaagcactgggaaagagacactcgagaaaattcattaaaaagtcactacttcctctcatcttaaagaagcaagttaaacactgtaaaaataaaaactagatgaaattaaacattattgcaagacatgaaaaacatgtgtgctgtcattctgaggatctgtaataaagataaatcagttgtttttagcagtgtgctatgtgtctgtgaagggcacgacagataataggtttggaatttctggagttattgtacagcaaaatttgtttttttcctcaggcattcaatcttttttctctagcaattttgtacatgacaaactttttagtggtcgcattagtaatatataagtaatgggttgtcaggtgtcagttagagattaaaagattgtttaagcattacccatttggttcttcgaatgagttttgtaggtcaggagaaataactttctgaattgtggttgtgtgtgtacactgcccctccccctttcatttggctccacgccaggtatatgtgaaagaatcatattacattacataaatcctgcatgtagcagcagatttgaaactcatattgtgtgagccaaggggacgaatgtctaggctgtcgtctgtaaatgtattcgaatttgtcaatgttattcctgatcttctcaaaggaactttgcaaggggaaagagactcagctcagaggggctgtgaagctttgcaaggcaagtcagttgtttcccagcaagtcaggcttaggtctcttcttgtcaaatctgccttgagtgtgtttacatatagtttgccttcctggtattttctgcttgcaccgacctgatctccacctattttgtgtcaacagttgctgagcctggtgttgggtgattaagcactaagcatccagccctgagctggctgagaccctctttccctcacttacatcactgtcttgcttcagggctgtgcctacagaaaacaaatggcatatttgagtggctaaaacatctgactaaaatattgaaaatgggggcaaatgttgcctctttgttatataatactttttttttcaagagtggagggggagcaaggggcccagaggaaggggaatgcttaagggtgaatacccaggacctggtctgtgctgttcctgtgtgaggatgccatggctctttgtggaggagcttagggttctaccagctacattaaaaaatacattctaaggacagaaaacacaacattcaaaaataaaaacatatggaatgcatgtctgtaattttgacaaatacagggttcaccatccaatggcaccatggtcattaaaaatggttctctccatttatttgcattcttgcaaagtttttaggttggcatactggtttggggaagtaattaactctgtcatgctagtaacacctcaacactaacaaataaacagcaaaaatacttaatatgtatgatatccttaaaggcactaattgttctttaccctcttaaataactggtgccttgcaagattagcccctatcttcaaagaagggaaaaactatttccttcctcaaatgcattaattcttccagactcgtagtgattatccatcttgggccctaaccgtaactttaaaaaaaaaaaaaaaaaaaaaaaaagaatttcctgtcattggagagatctggcttaatgctgataaagacatttaaaaaaaatcaaaaagaataatacattgcctatggatgaaataaaactatcctgattacataacatatattgaagtttttagtacttttactctagggtactgaatttttttttaaaagccgtatttttgcggactgctgtctgacagggggttttgctggtctatattacaaaaacatctgctctggttgactttgtttgatccctcatttgggtcagagttcatatatacttggaaatggttgagcttataagatgttgagaaagctaatggaaagagctgtattgtacagaaaccatgagatctccgccaccttgactggtcacctggcaggattgttcacagaaaggggagcaaacttggttgtgactagaattgccatcctcagaggttggaggactaaggaccaaaagagacatttgagaatcattctgagtgaatatagtgttgttgctgtctttaaagcatattgagaattaaacttgttttcagtcatgctgtttctttggaaagtacacacatgacttttgaagtattacacaagggatgagggactagaattctagaaagccaacggtacagggttcagcttcttggtagcaatttctgcatcatttgacaaatgaggctctgtgtgtgatgttgtgttgctagctgccagttaagaggcagagacaagaaggttcctcttccagctcttcttcaggccttctgttaagtgcttgttcttagtactttactagctatgatgtgcagatcatgccactcacccatttaacctgcatgacccagtgctacatccatggagctccgcaacagttcccactatcagttttaaaatattttgccactttaagagaaaccaggtgccatttagctactacctctcctcccatttcctgttctctgcttagcatctccaggaagccactactctactttctgtctctgcctttgcctgttctgggcatttcacacaagcatgcacatacatagtgctcatacaatatgtggtgatatgtaactagattcttctacgtaatgtttttttttgggggggggtcattgacattatagcacatattgtcatgcctcattccttgtcctggctgagcagtgagccactgtgtgaatagaagcacattcagtattcctggatcagttagttggtgaagatttggattgcttccagtttatgctgctaggactttttgtactcttataacttttgagacttataatggtgttaaaacaagaaactcctatactaggccttacaacttgcgaagtgtgtttcttcacatttagccactagatcactaggacagtacacccaaatgctgctctcatctcagaaccagtcagcggcgtgttcctgctccactcccaggttcttctcacgaggcccgggtttgagacctccctgccggtagcccagtgttttgaatgagataatagatggaaaaaaaggtttttaagaatagcaggtgaggatataactaggttggtagagtgtttacctggcatgcaggaagtcctgggttcagtctctagtaccatataataccaaacctgggaggaaacacaagccgtccgagcaacacctgaaggtggaagcagaaggtaccaggtcagcctcagctatatgaacaatttgaagactgtcagcctaagattcatggaactcttcagaagaaggaaataggggcaaggagaaaaagaggaggaagggaaaggaggaagggatggagggaaggaaggaagatgttaaagctgtgtttaattctagcactcactacgtagaggcaagcagatagatctttgtggggtcaagcctcatctgcatacatctgggccagttaaggcagcatagtgggaccctgcctcaaaaataagcaaacaaacacaaaagacagaagtaaagcaaagcactactggcatccagcaaccctacagtaaacacgcatccccaaaggctcactgacagtgtttggccagccaatttgtcacgttctaagaggaggccactttgtctccttcatttggatcatctatctcacggtgggggtgccttttggtgtttatggagccatgtgcatctctagggcttacacagtgtatattgtgacattacattgagtttgggtcttgttttatgggttgaaacagaggcttcactaactatttgaaagttcaacagaaacccccattcacaggttctgtagtgtgtgtgtgtgtgtgtgtgtgtgtgtgtgtgtgtgtgtgtgtgtgtatacattcagttttttagagtcaagagtttctctgtgtagccctggacattctggaactctccctgtagaccaggcttgactcaaactcaccgagatctgcctgcctctgcctcctaaatgctgggattgaaggtgcgtgccggtacttggctctgtaactaaatttggtgactaggcagatctgagtgacatggtaaattttgagacattttcccctggtatgagtgaagattgcaaggccagaaatttatggtcattgaatgtgcgggaagctgggacactccaagaggagactaagatttagtaattaatgtcttatgtagatggaggaagtcattctaacacaataggttttcaatatgtttatttaaggcagtggtcctcaaccttcctactgctgtgaccctttaatatggttcctcatgttgtggtgacccccaaccataaaataattttcattgctacttcataactttatgagttgtaatgtaaatatctgatattcaggatatcataagcaaccctagtgaaagggttgttcgacccccaagctgagaaacattgatttaaagcaacgttcttagaaaaaaaataatggccatccaatcgctaaagtggccatctctctgaatggcctgggtggctccagggtctgtgcctgttgctccatgtctgttccctctccgcagtgccctactctattggataaactgatttctcatctttatagtgggcactggcagggaaacaggatttaagccttgaatacatatatttatttagtaatatgttagagatgttcagttatatataactctattgactattttgtgaataagaaaattagtattttgggtgggcaggggagtgggggtgggtggatatgggggacttttggtatagcattggaaatgtaaatgagctaaatacctaataaaaaatggaaaaaaaaagaaaattagtatttaagttaaaaaaagaaaaaggttcagctctaaaatgaagagtgacctccattctgtcaatattttatagcttccaaagctatttccttactagagaaagtttaactatgtgtgagggtcagatcccttctgtggtgtgacaataaccacttaaaatgactataacttaagcaaactactattttccctttacattcatggtcatacaaacacaaattttcacatttaggtgggtatttcatgtgtccgtgtgttaccatagtcatgaggactccgctattctgtagcttgtttgtttaatttgtttttgtttttgtttttgttttgagacaaggtttctcctcatagccctggctatcctggaactctctctgtagaccaggctggactcaaactcatagagatctgcctgcatctgcttcccaagtgctgggattaaaggcgtgtatgccaccacctggctcctgtagctaaattttggaaagtcaattcaattcaactttagaaattcaattaaaaaaaaaaaaaccaaaaacaatggctccttaaatatgagtgtgtgtgtatgcacccatgtgcatgtacacacacttgggtggaaactggagattaatatcaggtgtctttctctactgcttttcattttatatttttgaaacaggctctctcactgaaactggagctgtctgattcccctaagactgactggccagtgagcctcacaggtccctcagcctcttccttccccagctgtaggttcacagatgcaaactgacacgccaggctgttttgttttgttttgttttgttttgttttgttttgcatgggttttggagttcacaaccaggtccttacttgaccaggtttcagtgacctggaaggcagcaaggagcaaccaagggtaagggttcaagttagaacaaaagacttaggaaggccatgaaggcgcttacagcccaagtgttaatatgaactttgtttacaaggggagttttctgttatgtgttcccatgcagcaatgagttatcccaccatcgtttcagttataagtccaaaacagcatctatattctttcattattttgcactgtcattgttgatttaaggatgacccttccaccagctgctctcaacaaaacaaaacaaaacaaacaacaaacaacaaacaaacaaaaattgcccataagtaacttctttgctcgagttagacagcatcagttctttctgtatttcttgcctctggctcttacactcggactgatggaattcctgtgattttagcaatctgacattatgattctggagtgggagtggagaagagcttgcctcctcctttccatgtctgtccaactcttctctgaagccattctccacccccagacaggagtgatgtattacagctcaccctgggagctgccggatcctggaggaggttaagaaactagaaagaggtgccaaaaatatgacttcacaaggttttgacttgagattgaatcaactttcttgagcatcttaaaatcatgttttacaaaattttatctcccaacaaaatgatttgtagaaaggatgaattctaaaaacttccagtttggggtcactaagtccaaaagtacatgtaaatctacaataatgtttttcagtagaagatttttttcatttaaattttttgcttaaaagaacaaggagttacttgggaggtgcctacaatttcctgtagtctttgtctataaagcatgccttaaaattataaggaaatgccaacttcttaaaaagtatataattttatttgactaaccctgacatggctgaaagagtgttatgttaaataaagatgctcatggtatagaaaataataacaatttgaaattctacaattatcttccaatttcaaatttttttatttaaacatttcattatgcttactccaagaattaaacaaaatctttagaaaatttcccaaatagattctatgttaattaaatgttaaatgtacatagtgattatttttaatagaataaagaatagtatatacagaaattgccagtcattaaattatactttgaagtacatgctatttatttttatttgaatatgtatggaactatttataatatagctattactaatcaattcattttcactaatactcccttctggtttagtgtgatcatttctacgtgtgtgttgtgtatttatatgagtgtgtgcatgttcaaatgtgtatgcaggctcacatgcatgtatgtgcaaaagtgtgcaaaggtcatattcaagtgtcattgcctctcctttttgagacagggtctttctctggggattagagcttaactgttaagtttggttgtctgttccacgccatcccccttcatcactgaaatcatttcctaattattgattattgtatcttcctgagcatttgagggtgttggaaaatggcatttttccatacatagaaggaactatatgttacagtaaacctaggttcaccccccccattctatttacttcttcttggttggtcaacaagatcgtaggcccaagagagaagtcgatcattgtttggaaatggaaacactttgactttgtgtgtgttactggcttggctgtagcatgccaaagtaactaaatgtaggctccctttaatgatgagctgcaagctgagcactgaacaccgaggaggagaactgaggaggggaatctggcaaatcgaatgggtgagcatcccttgctcttcatcactgttacagagatttagagaagggagcttaagctgtggacagggtcggctttggaactgggcagctctacctcgagtttgttcctaccacatgcccattaagctctgctgaccctccagctctgctctgtgaaaattcagtttaggaacaaagtttaggaccagggcaaaaagcagacaataaacaaaggataaaagcccatttcagaaagcagttccagcaacnnnnnnnnnnnnnnnnnnnnatggtggctcacaccatttgtaatggggatccaaagcactcttctggtgtgtgtctcaagagagctgcagtgtactcatatgaataaaaataaaaaaacccaaaaaaagtgaaaagaagtgaaagagaaaaaattaaaaaaaaaaacaaaccaaaattcagatacagtttgcaatctccttgtctgattcttataaaacacaaaaagtaaaattcaatttatagatgatcccaaatctctaatgctgggagactttcttttctgtcttagctccactcctccttataaggacactgagtcctaaacaaacaaccagggcagaaagaaatatatctctgtttatttggacatggagggagctgtaaggtcaaagtgctatattcctttccttggtaagacttggcctcaggaaaaagaattggctctcaatacaaattttgctctgtgctgcgcacacaaggagatgcagccttctttccttaattcagttgtttatcaccctcagaaaaggagttgagttcttcaaagcactttataattaaggtgtgtgtgtgtgtgtgtgtgtgtgtacagtaatatacaaaggcaaataaaacatttacaacctttaaagatcatttaactgaacaatttagtgtctttaaaaacctaaattgtagtatattttggctatattctattaagaaaaagtgtaaaactgcccattttagtgagtaagccaagctcacagtcacattcctgacatctacatttgaattatatctaaataccagttattttaaagacagacttctgtagccattggaaaatgttttcacattctatattctaatgtgtgcttactccacctccctctcacttcttcccagagacattactttttacttgatctaatttcagtatgtgtgtgtatgtatgtatatatatatatagtatttattttgatttctccgtaaataacagtgttttaagaaggaaaatatgttcatttatgctcacatctactctaacagcattttgctattttccaggcttagaaacttcttgataattttgtttctctcacaacgcaaagcaaagcattctgtcaccaacgcagggaggatgagtcccaggtcaaagggcactggagaaacaaacaccagggccagtttatttaaacagatcgtgagacaagggagctgacctcagtttgacttatagtgggaggagcgagaaggccattttattgctttgcccagaaggaaaaatctttttgtatctgaattcacccctgaagccttctaaatgctgcctctgccgtctgcagctaattctaaaaagcagtttcagtggaaaaatcctgggggcccctgtgatgctgagttgtaaaatcatgcacacagaaatgaagtatcattttagaaaatgaaatactttgctgtttaaccagctacttttaggtgaaggtgttcactgtgaccttaacccatgatgcaaattgttcataatagtatagagattatgatttaataatgttccaagaatttactatgtcccaaatatattgataatatttcattattttgaaatgcttttaaatgatggctttctgaaagaggaagttgggttgaaggtgtagatcagttggtactgcacagcacctactaggccctgagataagtctcacaaacctcatagactgggcatagttaaaaatgcctgtaatcgtagcattcaggatttcagggtcacccttctgagctgtatagcaagcttgaggccagcttgggctccatggagtcctgccttcaggcaagcaagaaagttctatgcagacctagtacacagctgtgcaattcaaagtggatgagttttacttgatccccagtgtttctgattgatattggttttaatgacaggattctcatcctggtgtccatagaatctatgagtctcttatatctggaagtcaatttaaaaacagttatcatcaatacaaaaagtagtaaatcttacctagtaccaacgggtgatgagttaaggggatgtggtaatgaatttgtcctttatgtggggaccaggacaggccccaagtaaatgtgaccagtaagtatatctctgccaacctccagagagatatagtctcagcaaactgaatagagaggcctgagtgataacaggctcaaaatatgagagggactcagctctaaaaagaaaacctttgaagaaccatggatgtttaacccagggggaaaaaaaaaaaaggaaagaagcctagaaaatatgattgctatgttcaaatgttgaatgagcttgttcaaattgtcctggaaagctgtaccaagaaatgattttagatgaagaatgggaacttcaggcagctcacattgttcaaagacagactcttagggaagatgtttagtgctgtgttggcttccaggagaggctatgcattgatttggtgggatgttctagacatccatgttaatggccaagctaaatgattaagcacttcctaaacgtgatttaccatttttggtgccacgggctgaatggtcatgaattggtgacctgagctggttattttgtgttggtctttggaagcctacgtgattcagtatggaggagacctatgtgggaatatggaaaacctgagttacagattttttttttttttgagcagcctcctctttacatacccaagctgggcagccatagacattctccatttttaaggtgttcgttgtcatgcttactccttgtctgaaactacgtgtgtggacacaaatggctgctgtagtcccaaccttagaaaggaaagaaatcatggccattccctaagttttgtgtcatcaacgaagtcttagcatctttttggtagcacatgcctggaaataagtcattcagtttcttgagccttgttaaaaattgtcctcattgtacacacctttaatcccagcacgtgggaggcagaggcaggtggatctcttgtgagttctaaaccagcacagtctacagagtgagttccaagacaaccagggctacacagagaaactctgtctcaacgaatcaaatcaaaacaacaacaaaaaaatcactttccctatccataaaatgtctttacaaagaattaaacagaaagtgagcagactaagtttctcctgtcagccgagattacataaagaactacgcagacggagaattctttggctgctcagtttgggtgtgtaatgatgaggctgctctcttacctgtaagttactatgaaaattacttttggtatatgcagaatattaatattaaataattttctaattggtcatgcagtacaggcagctaatgaaacggcagatttttttccattttaattggttatttcacatggtgtttgtgctacacctgtgcttataatgagagcggagaattagtctaaccttctgctcacatgattccaattttcatggcttatataagataacgataacctgatttgcaacacaatttgttgtagatcctgtgttttaaatatttttattagcagttcagggacttcattcgtagaaactggaacagtttatgtagcctctacaggtctgcacccacactgacccttttagtcagaaaccacttccgtcatttcccttaattgcttctcagaggggacacaagcaggtacaggatattgagaatcttaaaatgttatgaagcatgtannnnnnnnnnnnnnnnnnnntcttaaaatgttatgaagcatgtatttttattttaaagacacatctttgactgtttaatgatttggagtcccagaactgctttctttgctcaaatagacacatgtacaaactaaaatttatatcagactgtaaacccttcaattattaatagggtagtattgaactttttatcacatttctgatgtcctgctcagagttggattgagaactttagtaacccaacacatactctgcattttctggatttgacaaacaattcttataacccaggacaaaaagcttaagagctaaatatcttgtggagatggtttcagagttaacagggtttttaaaattttgttttattttgtttttatttgtttgttttgttttatttcagtgactttatattttttgaaggagctataaaacaacttgtaccaaacaatcttttaaattaatatagagtgactttaatatcttagtaagatgtttataaattttcagtagtagcggaagaaagcaaaattataaattcaattgctgtatagatgtgaccttgtcttgacttcggattttgcataaagagaaaaaaaagtcaccccaagaaatctctccaaggaatgaatttctttaaagtccccagaagtgtgagttaatagtgataaactccagacattctttcaattgatggtgtgctgccaaccgggctcgttatcttaggggtggacataaggatgaaactaggtttgcaaaaggtaggggaggtttggataaaacacactgtgaaaaagaagtcagaaagtgtaagattgaaatgtcagtaattgggagggagcagatgtcctcagagcttctcctctgtgtctcctccgactcccacccggccttttgaaaagagtggtggctagcattgtttcctgaaaactctgctaattcccccatgaaaagatgaaatggaagtgtccaactgtggtaaaacaggcaaacataaatcaactcagaaacccaagccttgtactcaaaggtcacggggttgtaggttttgccgcatgtgaagctgtccgcgagggagagaaaggaggctgggctgagcttgccagggccctgctcttctttctgtgattcatttcttcctctaccttttgtttatgtttttatgcaataatgatatgctttgctttcttggttacaggtttattaatgcccggagaagaatagtgcagcccatgatagaccagtccaaccgagcaggcaagtcccctctagtgactgtattcaagtcaggcaagcgaaaagcatcctcaagccattcaccaggagggctgctgcctggtaaatgaactgggagtgagtactacgagtgcctggctttagaaatgaaaccagtttggttttgtaaccacactaatcaatttaacatcattataaaatatttgaagaaggtagagaataaaaagccataggagaaaagtaactcttaaaccaccaagtgctcagctacaaccttctttgtaaacattcaatatattaatgttatttttcccccaagtttgcctacccagctttctgccactatgaccactccctggtgcatggcttggtgtggaattgctgtaaactttattacctgtcaaaagggcaaaggggtcgggatcacttgtgggactcagtaaagttcaaagacattcagtgaggtagagcttttgtgtgctttaataacccaaggcagctcacttctgaaacagcttttcatgtacagttaaaacacaggatttggttagtgatataaatacacggctcttattctcatgcctcgctcattagtatctgtcttctggtgctcgcagtttaaaaaaaaataacaccttttcgtgtttgtttgtttttcagtcatgagccctaggatttgttttgtattataacatggtagcaaaggcagcgaccaaattatacctggggtgatgctgcagggttgaaccctgcctctgaaataccactctgctctcagctccatcaaagctctgttggcaccacactgggcccatacccagttagtcaggttccagtgtcttcttttcttaaaatgcccatgatggaaccagcagacaaacctccccaccatgaatttcgtggctagcctgttccttgaacacagataacacttgaaactgtagtctcccaggtatatagaactggcctgagagaaagaattaactttggttaaaaaaaaaaacaaaacaacaacaataacaacaacaacaaaaaaaccacatgtaatctgcttggtatgttctctgtgccccctcccctctcctagctctctcccctcccccgttattaagaagttgtgctgtgtacttttgtagtcagccaagggacaccttataaccctgatggacagccaatgggaggttttgtaatggacggtcagcagcacatgggcatcagagcgccaggtaagactttttttttttttggtatggtactttttcacgtttaactccagaagtgttaccctccccaagtccctgtcagggcaggtaaagaagtccaccctctgctttctccagctgcctgcctcgccttgcctaccatctgtgcatctaagacctcaaaggggaagccaggacctttatgtgtgcaatatcttactgcctctcagccacctagaacctgtggtttttttaaagggtcttttggcactatctgttgactttgctcatcttctggcctcttcttggatttttatctcccttctaggacctatgagtggaatgggcatgaatatgggcatggaggggcagtggcactacatgtaaccttcatctagttaaccaatcgaaagccagggggaagtaagtacaaacggggcctttgtcttcactttgtcctaggaacattctccttctgcgtcctctcatgttctccttgcccatagcttcatgcttctttcttcctttccattaaagccttatttcttgctcctttcattttttttctctcgttggttttgatcaaggttttaggctgataaattctgtgtatgatatacatttatcctgtgtgttgctattgtacagtactgaccacatgacaaaacaagaaacagtcaggaggtgggggagtgggttgtcatagcaacagactgatttgcaaaatgtaagcagtctgcagcagtgcaaggagaggaaagagcatgtccccaaagtgccataaatctgtctaaccgcagttgatgcatgagttacatttctacactaacctgcaagacaccaaaaagccaaacagagaacttcttttaggtaaaataaacacagctttacttagggtaagtaaaggcatattttgagcttcagacaactaaactttgatttttttttcccttagtttgttcctttgtctgtccatcataatgggattacgtgtggcaatggaaaaagggagaatacaaaatagaggtgtgcacagcaggcttcagggcttagcccaggctaattgactatatccaaattaagtatgccatcacttgcagtgtgacaaatggatttgacttattcagtatacaaaaatagagatcattaatgcaatcttcagtggcaggcctagtgcagtgagcctaggaaaactgtcccagattctcactctgtcattttctctcctaaaaggacaccccagaaatttgagttcaaacaagcaaaactgttttgaactccaaagccctagttcatttcctaaattgcccttaacagcatctctctagcgttcctttttggaattaagagccatgatttcagagtcttggatgtgcccctgattatattaacacactatttaaaattcttgctgaggccaagggtaacacatgctggtcttcttctgtgggtgggagtccaatataagtttaacaattcactctgaaagcattccattgagcttggaaatcaacagtcttattacctcatcatggaattctctagcttagttaatttaaatattgtttcttagtttctgggtcaattaaatttaaatgatgtattttatgcttcgtgaccaattaaattaataggttattacaaaaaatattatcatcttttttgattaaagagctgtgggtacagtatattttataagcaattttcattagtttaaaaatgttcctttaggctagattaagcagccattcattgccagagcctggagaccttattcgaaggtgttcatcgcattcacagtgtgctattacttagaactaaagccaattgaacatacttagcaatggcgttctgcctttcacccttgatgatgatggagcttatggctctcagaaacaatacgcccgtcactttccatcaactagagcaatccatgcagaagacaagaggcccctcaaagcaagaggagtattgttttaggtccaatttttcttattgttctcaaaatcattgtaaggtagacagagttctgtgaagcctttcttcccctccagctctaagaggccatgtggaaggaatttattgataactgttttgatccccccctccaaaggtacaggatttgctaagtaatcattgtcactgagcttgccttgttctgcttcgtgtgaaatgtttagtgaccagagctctcgatagaacaaaaatgcttctttaaatcagaaaccaatgtgtttttgtttaaaactagacttggtaggactggtccaatggccctgcaagggaaacagttctgattccagcttgacatccttatccttttattttcttccacatgaatcaaaataatgtctcacaaggccccagtcccttccttcatcacaatgttccctggctttcataggattgccatagtcagaaccacactgttgcctttctgtaattttttgttttttttttttgtttctttcttttgaatttctacagggctgcaaagtatgccaggggagtatgtagcccggggtggcccaatgggtgtgagtatgggacagccgagttatacccaagcccagatgcccccccatcctgctcagctgcgtcatgggccccccatgcatacgtacattcctggacaccctcaccaccccgcagtgatgatgcatggaggacagccccaccctggaatgccaatgtcagcctcaagcccctcggttcttaacacaggagacccgacaatgagtgcacaagtcatggacattcacgctcagtagcttaagggaatatgcgttgtctgcaatggtgactgatctcgaatcaggtcttttcctgcaaggactatggagttccattcttgacatctactttggaccaaggagcatccctagttcttcatagggactcttaaaatgcaggagaaccatccgaagtcaactcgggggacatgcaaaaataactatataagacattaaaagaacaaagagtgaaatattgtaaatgctattatactgttatccatattacgttgtttcttatagattttttaaaaaaaatgtgaaatttttccacactatgtgtgttgtttccatagctgttcacttcctccagaagcctccttacattaaaaagccttacagttatcctgcaagggacaggaaggtctgatttgcaggatttttagagcattaaaataactatcaggcagaagaatctttcttcttgcctaggatttcagccatgtgcgtgcgctctctctctctctctctctctctctctctctctctctctctctctctctctctctctctctctctcttctcctctctctccctctttctagcctggggcttgaatttgcatgtctaattcatttactcaccatatttgaattggcctgaacagatgtaaatcgggaaggatgggaaaaactgcagtcaccaacaatgattaatcagctgttgcaggcagtgtcttaaggagactggtaggaggaggcatggaaacccaaaggccgtgtgtgtttagaagcctaactgtcacatcaagcatcatcgtccccatgcaacaacaaccatcaccttatacatcacttcctgttttatgcagctcaaaaaacatagactgaagatttattttttaatatgttgactttgtttctcagcaaagcattggtcatgtgtgtatttttccatagtcccaccttggagcatttatgtagacattgtaaataaattttgtgcaaaaaggactggaaagatgaactgtattattgcatttattattattttttttgtgaaagtagcagattagtgcgaggtggcatgcatataaggttaaccgagtggggtacgctaattatactttttgttgtggataaagaaatgcttgtcaatagcctttttctatcaagaaaacaaggagctaattattaataacagtcatggcacactgtgtcctatcttagcatttaaaagtatgcaaactccaggtccagcttcagtcattgagtgcagtcatgacgtcagactccagaatgaaaaggttattttttgtcattctgactttactgcttacaagatgtgtccctcaaacttttaatgattagtacagcatttttaatgataacaaacaattagctccctgggccatatgtatttgaaaattgtaaccactgagtaaattatttaacaataactactggattaagatgacttaacgaattggtaataccaacaaaattaagggttaaagtcactaagctagctgtagcctcagacttcattcagtattagtcgcctacatgatcagtaaaatcctgctgtgacagagctgaagcccacagtcagccttttgccagggatgttatctagggccagcagtacatgtttattaagaaattaactatataaaattgaagagaccagacttcaaaatctaatttttataaatatgctctatgttctcattggataaaactggttattaaccaattttccagaacagctgtacagaatttctgcatggcagccagctaaatggttcaaaataacatgtttaagctgcaatagcttataatttcacttaaataaaatcgctgctctaaaaagtgcttcataaagctaagggaaatatacaaatattttaatgaaggcaaattaatttttaaagaaaacagccttttggttgctttgggaacaaaggatgagtcagaagccttaaactctagcctgacattcagacccttgtcaccttataaactgcccacagcaatcctgttttctatttggaaagagaaaccagctgtgggttggctctactcagtaatggtaatggtgagtcactgcctcacctgcaggagcagaggtgtgcactctcaccttttgtttatgggggccttgtttctgacacgtgggtgtgcagaagagagagggggtgggggagggagggaggagagagagagagagagagagagagagagagagagagagagagagagagagaacacgagagagaggttgcctggtctcagagctgttgcccacctcgcccccctcgcccccccaaagatgggactgtttaactttcctattttggccccgagacaattctacgactgcataagagtccatattagtgaaatcattttctttgatgggtggttagttgcagttaacaaccatttatttacttttaaaaataataataaactttataaactaaccgtccttttacttctgcctccccagtacaagcccggtgagtcagcctttattatcctggaggctctagcctagttggggtaggagggggcggggtggggagaaagccggggaggggggaggagggggaaaggagagggtggtgaaaagaacagggggagaggctgggggtggaggggaagagtgagcgcaagcaaaggggggctggggaatgtggagattaaaaagaatcatgatcattaatgtctaggaattagaaaaaaataaagcaagcttttgtgccatggtttcccccctcggagtgaggattgtgtgaaccttgctcctcaggtctctctgctcctgcccctgacaccctcccgtttaattctgttttagcttttcctcttgtaaatttcagagccagctttgaggttattgacgacacttatcggaaggaggaaaataatagaggtgtggagagtggttttgatgtttcttaaaggacaaaaacaaaacgccctcccctaaacagggcacacaattatacaggcttcttttttgggggtgggggtgggggggtggggggagtcccgctggctgaatgagactagtatgactaagtttcttttacaaaaaattttaaaatgttacccgatcatatttaatcaaatgtaattataacacattcaaaatgaataatatgccttggaagtatttttattgttattgttcattgcacgatgttcgactgctttagaagcacaggaaagaagcaaacgcgctacaaatggggaattaccctcgtttagcattaaaattcatttagataaaattgccacaaacatttaaatgggaagattagttccccctcacgccttattgcactcgctcaatggttccgttaagaacattttacacgttggaaattccgtcttctcagacggcttgctgtttcctagttacacacattcaaagcaaaggctgcagccgcggcagccgcagcagcggcagcagggggaaaaaagtttggcaactggtctgcaattcatccgctgcgcccctagtttccctccaccctccccagttcccccccattaacagcccccccccccgacttatgtgttcgaagagcccggcctcgaggagccaaggttggttgtacagtattgacaatattaaactacaaagaaatggaaagaagccggtgggtccctctctgcgtctcccgcttttgtacgaggctgagggttgagtgcaaatgtgccgagtcgcccgcaccccgaccccagggccgccgggcgcgccgccgtggcccgagacgtctccaggaaattcgccactgctctcgctagcgcggtggtggaaacgtgttaaaggctcagcttgcaaagtcctggcaccgtccagtccctcctggnnnnnnnnnnnnnnnnnnnnagcccctcacccctgtcctttcttttgagccgcaggaaaagaggaaagtcgtcttctactgccaccttttggggatttggaaaaacgacgcagtaggagaccggagggaggcggagcgcggcagtgtgttttgagggggcggggggggggggggggaagaaacccccttatgatcatgcgtcggaactggcgcccttaatctgatgcttaaatatttgatgtggaaaaattacccataaaattagttactaacaatttcaaattgaaatcacttatcgaattataagcgcattaaagctgtatggatggtattaggagttcctttggaggctgtctcctctcggggaacccggcccacgagttttaccgcggggagaggcgtgctaggtggagccctggggagaccaaacgacaaggacagcagttggggtgccgggtcctagcgggcctagagaagatggatctgggtatggggatcgcattccgggcagaagcgcatactgagtaactccagggacaaagtccgaacgttgtgaaaggggaaaactgctcttttacgctggaattccgagccttcagtgatgctttcagctccccctgtgtaggcgggaggggggtgttgggggtgggctgagaggagttttgagatgtctctaatgagaccgccgcggccggctcacccagctccagccgcgtctcagactccctttagtttccctctgcacgacatcggggctggggctggggctggagctggtacgtgggcgggtgggtctcagttgtgatcccacactactccgaggtactcggggtctgcagaagagtcctatgcttgcccccatccccacctccgccatctgaaagtcaaagttaagaagtattaactgtctcagtagcctgggtgtccatgagttagcgcaaaagcatattcagagacttcttcggctcactctgggctccgtcaattggaacccctcagagtggtttgtagttgccagaatgctttcacaggacttttccagacggagccccggcttccgaatcccagggcgctcatgggagcatgtcggcgagagcttgggccctggaggctgccttgaacagtcaggctgggcaagagggtgagcttccagagtgtataacactccggtagaatggagaagaatagtgtcacagtgtgttgggcagaagctccttcaagtttccttaaaagtcctagaaacttcccccactttggatcccacaggccctcggcccttgggaaggcagttaaagcagaaattggtgatataggttctcaacgggtgtttggaccgtaagcagggaggtgtgggtttgtgtgtggggcgcccagtttgagtcatcatttttcctggtctcttctgtgctacccagcaccccctggccctttggcaaaccataccatcaagggtaggcgcagcattagaggctaagagctctctggttgggggaaaagatctgggcgggagagttgggggtcttcctgggagactgaagccaagaaataatgggaagggtagggttctctttcacatcgaaccagcctcccgccgccccccccaaaaagtttaaaacattctcttccaaggcggaactgaaagaaaacacaaacaatatattgggcaatccgctagacgtttgcgttgtagagtctttgccctaaaaatgataccctagggttttaatagggagatgggaggcacttttaggggcttggtttagctggtgaagaagtaactcctgtgctgctcacgcgctcagtccacctcagggaattccgactctgaaactctggatttagttttaatccagtcttcctttgatcaactgtataattcctagccctgaccacctctaccccacactgtgttcattaggaccagtgactttattctctgggaggaaaactactcccaggtcctagcccattaggaaagcagagagtagagtcacctgcttcatacacctacgggtcctctccccggcgtcgtttttctggcttggcaccctagcttcaggcagagtgtaccggagagttcaggatcccactgtctgctttctctgggttggagacatgactgaaagacaggatggccaactctctggctccccttctctcctccctttcttgcttttctgcctaggcctccctcacacctcagcacttttctcttccaccaccctaaaagtgacaggttctccgaattcacctgaagacccgaggctctaacctctcccagtccccgcaggcattgggggtgggggtgggggtgagcggcgagcgccgaaatcgctgcaaaacccttctgccaacctcacccacttttctggatttgagtaggtgactgcgcatagagatcccccttgaagacgttattgagcatggtctaggctttcaaagagccggattcctccctttcgggagatcgagggtcactgataacgtcacctctaaaaaacctaggaaggcagcaaagaccccaagtaaccggctcctaccactgctgcctcccggctcagagcagagaccagacactagcaaagtcccttttctggcagatccgtgaggcgccactgtgccccggagactcagtttcttctggggggtggggggagggaggtgggtgggtggtaaacagcgtgtgcaaatcaaatccgatttttgagacgtgcattttcaggtgttctaaaatgcgaatggcaaggtttgtgtgcccgtctagtgggggtggactaaggggaggagtctcccactgcttgcttcagtctttaatgtctgaaataacgaaatgtctgtgtggcagctgctgctagagccaaaactaactctttggaagacggaaaagagtgaaaggcaaagaaagactgttcattttattttttcctttggtgccgtttgggatgtcatctgtttccttggcgactgtgttcagcccccggagcccctgggctccaggattgttagggggggaagcatgctatttctgcaccgtcatttatcactgtcacagcataatgattccccttgcagccccttattgatgtttgtaattgcattatctcataaaggaagatgatcaatgaaaccaagccgtgcattctggggtcagaggaagccaaagtactgtttgtcccctttaatacaacaagtactcattatctttaggtctgcattcgaaaaatgatctgatctggggctgaccctgccggacatcccaacactttctaaaacgcggtttgtgtaaccttttgcttaaatgctaaatcaagtacctgtcttgcatttcaacgaaaggaatgctgaaagagaatgagaaaagcatctcttccttttttttcccctctccgcctgtattttgttttgtttttccccggggcgggagacgcatgatcttccccaagacccgtgagattttccactgtaactcctaagagctgtactgtaggaaaggccccatcaaaaagggatctaatgaatgagaggaattgggagtgaagggaagcgaagccgccagaagcttcgaacaaggtcggtataaaaagtgcagaataaaaccacatccggtttaattaataagagcaataaactgaaataattccccatgattctgtgcttgcttctgccttttacagagctacaactctcctctttagataaatgatgtgtgtgtctgtttgattctcaacagtaaccaaatcagtggcatactctgtttccaaacccacctacaaactttagcaaataaaaaagttcatttgtccattaaggcagtatttagttgagtagcaatgtcccactaatactgaatggagtacatgtaatcccatgaaaatcaagtcatctcgttgtactggagtaaataaaaaaaaaatacaaaggaggaaagatccaagtgtaatttcaaactaaatgcattattgggctgtcagagtgaaaacctgattgtttggggtggaaaggagaatatcaactcagctcacatttaacttaaaggttcgaggaaggaggtgtgagctctagatttggttgttcttgtaatttgtaggaagaggagaggcttagacaactctaaatcgtttaacgacagagttaaggggaaaaaagcttattcttaagcatttctatgctgaaatggagtgccctctcttatgttaataagatcaccaaaataaataaataaataactaggaagggagggagggagaaaataggaaaagaacagaaagaataaatgttttcttttttttttaaagtggtaaaactctaaattaagaagttaatgttctaaatgaaaaaccaaaatggaaaactttcagcatagttaacaaaaagaatacttaaagtttgtttgaataacctgacaccttgacatacaagcttacactgaatgatcataaaacagagagataagatatcccttcgtggaaaaaatataacattattaagctaaaaaagttttaatgtattgtccaccaaatttttcttcccaagaagaaacatttataaaatattacccagaaattgtccaggtactttgaaatggggttctgtgttatttatatattctggcattttcctgccttgaaaatgctcacactgaaatggatgcggaagccacacatatctttagaataaattgtgcattgttaacataaaatattaaaggaaaataaactttgggctgtggagagaggatttttagcacaaatactttgattttcaaaacacacaagtgaaacctcttggtttttaaacaattgtttcaagggtttctctttctgggttgggcatgtggcattatgcacattttctatgtttaatatttagtgttatagctcacggttaaaataatgaaaaattagtctcgtttcagaaattatttatttatggactgaacatgattaaaacataaacacacaaactgcagctgcaacagaaaaaccttgatttacggttattaaatctttggtggccgcgttaatgtttctttttctacctttcatttgcattttaatctatcgaatctttacaattttgctgcttcctatttcaatgattgattacagatctgatataagggagagagacacacaaaacaaggttagcttttcttcttcctttccgcgctttctttttctccacccccctcccccgcccccccttccccaggctgaatttcggaaactttctctcaatgctaatgtagacagaacaaattaattctgctcttttaaatgtcaggggtataaataaaaaatgttttctaccccaaacgtgaatattttcccagacgattttcgagttctaaaagatcaccccagcaaaacgcaattaacaaggatggacacatcacaccacacacacacacacacacacacacacacacacacacacacacacacacacacacagaacctggattaaagaaaggtgagaagttcaccatctttgcagcctctctctctctctctctctctctctctctctctctctctctctctctctttctctctctccctctctctctctccatgggttctggttttatcagtgatctaagtctcacacataagaaccttgtttggtggggggttagatgtttgaacctgctgctgcgagggacgtctcctttctttcctccccatgcggtaactgtccatttgcctctaatctcccgctcccgcaccctcctcacaggacaccccagctccgagggacgctcgaagtcctttcctcccggtgcgcgtcatttttggagctgcagggagaacaagtatgactgtgctttgaaaaagcgccggcgggtcggtggctcagctccttgcccccagggtggagggctcctggggctattcggggctccggcgaggactggacttggcctcacgcgcggcggcgagtagctgctaggtctgcaaccgagaaaccagcacgagttcccagggagctcaggtgtgaacgcagccagcagtcgagggaaacgcccctcctatgccctgtgtctccccccccccccacttcccgcccaagcctaggtgcaggactaggggtgtcgcgggtgccggggaagcgcggtgtggcgaggtccgatttcccaggactgtccaggctgccggcgttcgtgtccacgcgtggcgcactgtgcctgcgtggagcgccagccagaaagtggaaagagtgggattcccaagatcagccaccccgccatacgggagaattactctgggcaaactccccttttgcctggtactgtatttgctcagaccttctcgctgcgaccgaacttgagtgcatccttcctcccagagcccccatgggtggctgcgacccggggagggcggggatgtctcattaatgggacgcacaacgtaattaaaataagagaggggaaaagaaaaggatatttgatccggcctggccgactctttgtgctgaagcagattaagcagccgggaataggaaaaacagcaagtcttagacaggaaaaattattgtgttcacgaaatataaaaatgatccgagagagcttcaccctcaaggggtgaagatagatccttgtaaaagagtgaaaagacaagactggaagatttaaagggaaggaagcgacagattattaagaaagtaatagtaaggtgtcccacacagtacagttttattgttgggtagtaactacccgacttatttattgctggggccatataatagaggtaatgaccgcaaactcaagataaattcttaggcgccccgccggtcaattcttttttatttaggggagagagcctgaaaggtgagcgtcgtcgcctcccctcctagaagatccgtcttgctttctactgcattataagcatgacatgcaaataaataaacgccgccggctttgcgtggggaggcctgcaggatttattctagacgaaggaggaacatacacggaatatgaatttccgcaggagcttcggagtgattccttctcgcttgctttccgccgccctctgctcttggtttccctcccttcccgtgggagcagagagtccccagataaaaacattaatatgtcatgtctcaactccttattccttgacatatatgtctgggaggaatagggggtattgcagaatgcaaagtgggtccccaaagcaggatgcttagagggattgagtttgacaaaagagaaggtggctcgtaattacaatgtacagtggaaggaaatggtatcaggagtatgctggtgtcattttgaaatattcaaaatggtccggaagtttgcagtcctgaatgtggggcaggccttcatcagctgcatctctctaagggagtctcctgactctttgggactt

SEQ ID NO: 2672 - DNA, 3248 bp, Mus musculus
aatccacctctccgcctgtgcaacacacactttacacacgcacggcgactgcaagcgggcagcatcgatcgtggctcctttaagacaaactcagacagacatttttttaaccctcctctctaatctcccttcagtgcagcagttgcaaagagggagagagaaagagaaagagagcgagagaagagagaaactgattaggaattaggactgattcaaggaaagcgggcgctagggctttgtgcatttgaatattaacatttgaggtgttctgaccagaagaagacagaacggacgatcattcattcaccacgttgacaacctcgcctgtgattgacagctggagtggcagaaagccatgagatttggtagttgggtctgaggggcgctcttttttttttttctttttcttttcttttctttctttttttttaaactgatttttttgggggggagagaagatctgctttttttttcccctcccactgctgtcttggtggaaccagagcgcttttatgctcagcgacgcgggcgccttgcttcaggtccggtagaccgaagatctgggaccagtaattcacactgctggagacgcaaagggatttttttttgttattgttgtgctttatttttttttccgggggagtttgcatatttgtttcttttcacactggccttaaagaggatatattagaagttgaagtaggaagggagccagagaggccgatggcgcaaaggtacgacgacctaccccattatgggggtatggatggagtaggcatcccctccacgatgtatggggacccgcatgcagccaggtccatgcaaccggtccaccacctgaaccacgggcctcctctgcactcgcatcagtacccgcacacagctcacaccaacgccatggcccccagcatgggttcctcggtcaatgacgctttaaagagagataaagatgccatttatggacaccccctcttccctctcttagcactgatttttgagaaatgtgaattagctacttgtaccccccgcgagccgggggtggcgggcggggacgtctgctcgtcagagtcattcaatgaagatatagcggtgttcgccaaacaggtacacgaattatgtgacaatttctgccaccggtatattagctgtttgaaagggaaaatgcctatcgatttggtgatagatgatagagaaggaggatcaaaatcagacagtgaagatgtaacaagatcagcaaatctaactgaccagccctcttggaatagagaccatgatgacacggcatccactcgttcaggaggaaccccgggcccttccagcggtggccatacttcacacagtggggataacagcagtgagcaaggtaggagaggtgatggcttggacaacagtgtagcttcccccagcacaggtgacgatgatgaccctgataaggacaaaaagcgtcacaaaaagcgtggcatctttcccaaagtagccaccaatatcatgagggcgtggctgttccagcatctaacacacccttacccttctgaagaacagaaaaagcagttggcacaagatacaggactcaccatccttcaagtgaacaattggtttattaatgcccggagaagaatagtgcagcccatgatagaccagtccaaccgagcaggcaaccaagggacaccttataaccctgatggacagccaatgggaggttttgtaatggacggtcagcagcacatgggcatcagagcgccagggctgcaaagtatgccaggggagtatgtagcccggggtggcccaatgggtgtgagtatgggacagccgagttatacccaagcccagatgcccccccatcctgctcagctgcgtcatgggccccccatgcatacgtacattcctggacaccctcaccaccccgcagtgatgatgcatggaggacagccccaccctggaatgccaatgtcagcctcaagcccctcggttcttaacacaggagacccgacaatgagtgcacaagtcatggacattcacgctcagtagcttaagggaatatgcgttgtctgcaatggtgactgatctcgaatcaggtcttttcctgcaaggactatggagttccattcttgacatctactttggaccaaggagcatccctagttcttcatagggactcttaaaatgcaggagaaccatccgaagtcaactcgggggacatgcaaaaataactatataagacattaaaagaacaaagagtgaaatattgtaaatgctattatactgttatccatattacgttgtttcttatagattttttaaaaaaaatgtgaaatttttccacactatgtgtgttgtttccatagctgttcacttcctccagaagcctccttacattaaaaagccttacagttatcctgcaagggacaggaaggtctgatttgcaggatttttagagcattaaaataactatcaggcagaagaatctttcttcttgcctaggatttcagccatgtgcgtgcgctctctctctctctctctctctctctctctctctctctctctctctctctctctctctctctctctcttctcctctctctccctctttctagcctggggcttgaatttgcatgtctaattcatttactcaccatatttgaattggcctgaacagatgtaaatcgggaaggatgggaaaaactgcagtcaccaacaatgattaatcagctgttgcaggcagtgtcttaaggagactggtaggaggaggcatggaaacccaaaggccgtgtgtgtttagaagcctaactgtcacatcaagcatcatcgtccccatgcaacaacaaccatcaccttatacatcacttcctgttttatgcagctcaaaaaacatagactgaagatttattttttaatatgttgactttgtttctcagcaaagcattggtcatgtgtgtatttttccatagtcccaccttggagcatttatgtagacattgtaaataaattttgtgcaaaaaggactggaaagatgaactgtattattgcatttattattattttttttgtgaaagtagcagattagtgcgaggtggcatgcatataaggttaaccgagtggggtacgctaattatactttttgttgtggataaagaaatgcttgtcaatagcctttttctatcaagaaaacaaggagctaattattaataacagtcatggcacactgtgtcctatcttagcatttaaaagtatgcaaactccaggtccag

SEQ ID NO: 2673 - protein, 430 aa, Mus musculus
MAQRYDDLPHYGGMDGVGIPSTMYGDPHAARSMQPVHHLNHGPPLHSHQYPHTAHTNAMAPSMGSSVNDALKRDKDAIYGHPLFPLLALIFEKCELATCTPREPGVAGGDVCSSESFNEDIAVFAKQVHELCDNFCHRYISCLKGKMPIDLVIDDREGGSKSDSEDVTRSANLTDQPSWNRDHDDTASTRSGGTPGPSSGGHTSHSGDNSSEQGRRGDGLDNSVDSTGDDDDPDKDKKRHKKRGIFPKVATNIMRAWLFQHLTHPYPSEEQKKQLAQDTGLTILQVNNWFINARRRIVQPMIDQSNRAGNQGTPYNPDGQPMGGFVMDGQQHMGIRAPGLQSMPGEYVRGPMGVSMGQPSYTQAQMPPHPAQLRHGPPMHTYIPGHPHHPAVMMHGGQPHPGMPMSASSPSVLNTGDPTMSAQVMDIHAQ

SEQ ID NO: 2674 - DNA, 157640 bp, Homo sapiens
tctgacttttggtcttcgtaggaaataagaagagtaaaaaatgtttcttccgtagttgtgatgtttttcgtagttcagggtgtgtgtgtgtgtgtatgtatgtgtgtgtgtgtgtgtgtgtgtgtgtataaaaccatcttgaggcatacagaaaagaaaaggagagaagaaattggatacttcacttaacctatctgggtctcagcttgcttatctgtgcaatggaaaagtagaactaaatgccttgatttaacacccttatctacggtggggaaggagctgtgaaaagtggtccctaggcagagtaatcacagccccctacccagtggatgatgactcccactgcctagagcaggacagtcatttacgggatcacctaagggacattttgaaagaggatgtgtttgcctctggcctcaattgtcaccggaacgcgcgcgcgcgcgcgcgcacacacacacacacacacacacattttccccacagggattgtttgcctatgtgaacaagtggaagcagaaatcgctcttccgaattatttaggaaagccaacacgcaattatgcaaaagtgtagataaggttctccgaagcagaaagcagcagcgcgggacgcgggtttccccttctctggcgagtaccagtgctgggaggctgtttatctgtgtcctggtgctgggacaggacgcaatccaattccagctctcggtcggttctgccgctctgtccccggttctgcagcgcactctcttactccctctctcagtagtgtccccggctgtctcctttcctccgtctcccggtcctctcccagcgtcacccctcactacctatacccccgcgccctacccccacctggggcgctgggttccacgcctcctcaagaggtgtgagcgcccgcgctgggcgcccgtagcgcggccctcctgtgtccccacttccacccggcggccgctggaagccgggagaaggaacggcaccaatcccctcacgcttctcccaggacgtctgatcccattagcgcacctgaaatcacaaccttggccacaaatgcgcgcttgttgcgacccctccgagtgggccgccgtgccgcaggagccactctggggccggggtccccaacctctcccccctgcaagtcctaaaaggaatcgtagagcaattgatctcggaggagatgagcgcaccccggggctcattgctgcccctgaggaagagccgtccaggaacggaggcgagaagcttccagaattaggccaagaggcaggtggcggggtgatccggcgtccccgagtccagctggggagaaaggcgccctcggatgctcagccccaaagcagcagaagacagaagccggtgcgccatcgtcgctgcgccccagtccgcgggtcctcgcgctcctgctccggctcccgggctgccacccaccgctgcccaagcctgaccaactcccaactccctccggcacaggctgaggcgacccccaaagagaaaaataggatcgcagtcaaaactggcggggatggggcacactggtgggagaggggaccttttcaccttttgctcttcccaggggacacagtcccccaaacctacgtccctgcgccaaaccaggtgcgagcaaactccgcggaccccgcagctggaagtgcatcctgccgggacccccacccgacccagggagtcagcgcgccccagggtgcaggcaggcacagggctctgggtggctcagggcacggggaccggatcgcgctgcagaacaccgccgggacccggcacccggacgcgcaagggcgacagggcagccctgctgtaaggactgtgccatgagaggatctcattcggtaaacagtggccctcccagaagtggccgccgacctgccagtcaatgaagttatcctccgggagctgggaagaaggggcgcctcgcggggctgtgggctcggttgcgaaccgatgtgtttgtggcttataagtttatttctcccactagttaccagtgttcaaattggccctttctcgcataaatcgcctggaaaaaaaaaatgatgtttagctagcatagccatattctgacgttaatttttttaaaaggacaaagaaagatgatatttgtttttcatttttaaataagggcacagaaaagcacgttttcagatattcacaagtgaataactactcagcaggcgtccttcagcttcctcttgttctttgctcctttatgtttttgacgctgctagaattctttctgcgccgcaggaagccttcgatgttttccttattcattagatagctcaatgaaatgttaaaatatttatttttgaataatcagtaagatttttgcctgaaggttttcacaaaatatgcccctttatccagtcgaacatggatgctaagcatggccagtgtgactcatcctgttgcttcaaaggtaaatgtttgctattagtgactagagcacgttcgccagacctcttccagcactcagtacttcaactattagtttagaatatatcaaacgtgtatgcacttgtgattagttcctggaagaattttctacattttcaagctattgttatgaggatttttttttctttttggttggttttctgatctagaccaaacagcatctcaaaaaatgactccaaacagcatctcataaaataataacctttcacagttcagtggtttatactaaagtttaaaagacacccaccaccaacacctccatttatatagaacaactgaggctctaatacagcagtgcaagcaatctcgctgctttaagtagccaatgtcagttcagattctcttgatgtatctatatttaatccaatattttaaagtcattctgacatagtgccacatcgaaatgtatattgaagtagatcattgaaatatatttatgcacaataaaatgtcctaaagctgtctccttttcactattaggtttttattaaaagacgccctaatacctagtcaagtgctggcaagttttattaaaatgcgataaggagttttaacttcagaaaagcacatgaacaattttaaaagtgcttgcaccaaagtctatgtctcttggacaaaatcagcttgacttctccatgtatgtgtatgtgtgtgtgtgtgtgtctatacacacatagatacatatacagatatatatttggggggcattgggcttatttgtttcttaaatcacaaaatcacttctctatggtaacagtgattacttcagaaactgtcactgtcgaacagaggtcaaagttagcttcatgcttttttttttttttttttacaaagcttccacaatgctagagatctataaatgttttcttttttaaatcacaaccaaaatgtgcacaatgtttcttaatgtttaagagaacatcaaatggtctctgccatatgaagttgtctgactgtgaatttcacccacactttctaacacttgtgctctccaagtgaaaacactgaagttttacattttcatcccaaattgccaaaagggaactgcactaaaacttttataattaccagtgtcatttcccctctcctaaagggttttttttcttgattaccaatgtcactttccaaattccaagaactgatttgtacatgctagattatcgaggcagtagatagatttaacttgactgtcaagcaaattcatcctcagtgtcaagcaaccactactgttttttgttttttgtttttgtttttgttttcagagttgttgaatctgtcctatcttcctttcttttcccaggctgtcttcccaagtttaggcatatgggtacacacacatgcacagctgtattcaatgtaggttttagccttgtgccttaatcaagtgtttgagctatacacctatgattgatatcatatcctatctttggatttgaaaaacatggttagaccccaagacctgtcctatgagtctaagttgggtactgtggttttctcttgttagttaccagcaccaaatcatacccccaaccaccacctcccacccccgtaaaacaagattaaagtttgtcatcaaggctgcagtttttctattgtccagtagacggcacaaaagatcaagccttcaaatgctaaacaattcaccaaggctgctgtggtttgaagtgtatgtgtgtgatcttctttaaaatagctaaccagccagcattgtatctgtgaagcagtgaagtacctgaaaacttaagataactcactaaaagttttgaaacgtaatgatataaaaaggttttgcatatgtcaacaaaatgttgcttcagaaaatacacttttaaataacttcagagaaaaatgttatttagaaatttatcatttaaaagttatctttatagaaattaaagtgagagaaattacagggcattttatttttaattaaaaataaagaaagtatttgcaccgtgagacttgaagattctatagcggaactttgcatgatgcatctatgttttttactacatttaacatacaactcagtccacaaaattgaaggttgtatttcaaatgcacttacacataaatgcatatataataggtacttgggaaggggaataaattctcttgatgaagttttgtgggatagcttttgggggatattggagaatgaggccagtagaaacaacagttgggactttgcctctttcagagcaatgcatgactttggctaatatttatattttactaaaaggcttctatttccttttcattctgcagacactccttatgtagcagtttgggggggagggtaaagtgtgggctaataactcatttcccagttaattttattaagaatttatagcactgtttagaaagttttaagacaaccataaattttattaggaatactttattaagccctccatttaattaataaaagacctctataacttctgaaaatgtcagagctagtaattatgttaaccagtgtagttttttcccccctagagaccaaagcattttaatgatttgaaatagaatagtaaggaaagcacctccctctcaccccccattttttttccctaatttttgcatcatccagtcagaatatagtaacttaggtattttccctgcaacccttggagagcctaagctgacctctaattgacttctgaactggacccagacattctttgttttctgaagcaaaatgcagtaaacaaatctttcagtccttatagcctgtaatgctttagagcacttgattaacatcctccctaatcctctcagttaaccccctttgatatcacctaaccaggtttccccctttaatagatctctcaatagtttatttcacttttctcacagccattcattagctttgacttcttggtgcctttctcatatcacctccaggctcttatctccagcattcctctattatctgtactagatttcgaatctattttctttaaactatctttccctccctcctcttatttctgtttttttgaaatgtcaatgctagtgagggggagagatgcagaggatgaatgtttttgaaatacaaacgccaagcctccacaccacaggacaacctaaaaaccaatcacagcattttaagggacatcttaaagtttggtggcaaatgataaacccttatcattttgtgaacacagctgccaaactcgattgattaacaggcttttgtttattctgggctggcaaatacacacacgttttaccttaagaggtgcctctttagtttctaagggttttggagctgactcatcagtgtgaccttttgggacaaaagcctaatttaggatatagatctttccagaagcacaattccttatagaacataaagtcaggggagttctccgagacgactttaccagcagctcagaggagcactgagggcttgaaatgcctccatacaggagggtgtaaacaatagagaccaagggcccagtctgcctccttttgtcaccgttctctatctctggaaagatgctctgagataagaaggatgagaagagaacggaaggcctgaatcgcaagagctagggccaagtgccagaagttttcaccaggccaagtttttgcaaaataaaagtgctattgccttaaaaaagcaagtatctgaaataagttaggaataggggctgtcaaaaaatgggcataaatattgacagtagtttactaagatacctagacctgtcccttcatttgtttccttttaatagatgattaattgctgccctgctaaaggagtttttttttttttatggctactatattgcaactctagacatcctctgtgcaatttctctcagcaagccccaactgtaataactgtttgctaattgtaaaatccttatccagaatgaggtttgggcaaacaatttgtactactgtaattacattgtaaaagtgtttagtcccttgattgttcagaattaattgtataaaggcctagaagttatattaggttcacagtttaaaatggaaagactgtggggggggaggggcacttttcaaaactactgagttgattttaagtccgcaaactcaaactatctcattctttaaggaaaatttgtgtgtaggtaatttaaagtacatttttaaggtaatctggcacatcatggttaaagcatgcagtcgtctagtcttcctcctgctttgaagattttggttatgtttgcaaagggtgacttacctgaaccttcttttctcatctgtgctagaaaacaaaagaaaaagattaccggaaagcaacaatacaaaataaatcctgttgtcaaatatatatatatatatatatactgaccttttccaaatttgaaaacgtggccgcagagttgtggtaaatccaagccccgttacctctttgccgaagaacccctgaggctgttaaagaccacagtcctctaagcgtatttcgcaataaatttctctcagttaaattatacttacacaatttccctcgcagttcatttaaggatcataaacgtaggtgtgccctgtcggtgtttggtttgacccccacctcccacccacgcatctccctcctacccccgagtcgcgcagatgcctggcgggcctgatgcggggacgatgatcacacccccgcgagcagccatcggaaggcgctcaggtataccccgaagtcggctggggttccgggaaggggtcgcagactgccggcccagcttagtcctttccctaatcggaaaaggagcgtgctgcctggcccagccagcgcagcctcccaaggattaaacagaaatcgccttcctgagacggggaggttccatcttggcctgaaattctgcttccaagttcatgttgtggggccggggagcgacggtgaggcgtggggtgggggggtggggggatggggggaggccgggaagtgtaggcagaggcataaaggcgctggtaatgcacctggctgcccacccactccgtccccagcttttactcgcgggcctgtcttaacctcccaagtgatgtttcagggcgtttgtaccagaaaacctacacatgtatgtgatggaaaaaaactaaaagatcctgaaacttaagcgtcagaaaaaagacagggagaaacagagagaaaaaggagagaggaagcaaatgataagggatcctggagatggtttaaacacacacacacacacacacacacacacacacacacacacacacacacacacacgagggagagctctttcaaggcaaagcgcttctgaaggttttgggagaacgtgtgtcagcccttcaggcacacagggtgccagtacggagttgggggcggggaagggtgcagtgcaggcggctgggaaggctcatctgctcggctttatggaaacgctccactgttgggggcaaccaaccccgcgttgactcctgcgaagtgctaaaggaagcgatagatgtcgcctaaggagactacggacgctcggtggaacctcattccagacctatgttctcatgctcgccctgtgtctcctgctcctcggaagcccactctatagaatcttcagtcctacctcgcagacggacgcaaattatcttttactttgcgcttaagagttggcttcaatacattttagagctcctaacctttcccaaacaatcttcggatgaagggatacccccaatcttgctcaaaactctttccctacctacacccccttgagggtgagggttcagtccgcagctggcgagtgggacgtgggtgggggcgatggaggcgcgggcgggctgcttggagggagtcagccttttggccaccttcagggcgggaatagggactggcagttcgcattccccgcagatcgaagctccctgctgatcgattatttgataattgattttccccgcagccaatgcgcggcggcctgggcgggggcgcctcctgattggccgagcactcctccacggctgcctaccgagatttgggtgagctcattttccagtcgaccgcagggggagttttctgcgaggtttcagctggagggagggggaaaaatcctctcggagccgagcgagctgcgagccctgcttgtggatgtgaggtttccagccactggtagagctgctgcggctgagccatctcggcagatcagagcccagcggacagaaatataaatacgaaaataacgccactaaatataatcacaagggagaagcttagagcgggagaataaagagaaggggtgagggggaattaaagcccaggcaataggtgttaaagttaaaaacaaaacaaaacaaaaaacagtggttggttggagcctccgagttgtaggtacaggcagcttttgtctgaaatctcagcttccgaagcggatttctttttctctggcactgggaggtttcgccgagccgggttggggacgggaaagaggagcgcggggaaggatgtctggggtggtgagggcagggcttcgctggagaaagagctagtggggcgcgaggttcttacaggcccgggagaggtcgaggctggagcccctcggcgcctctaagacaaaggcagcggtggctgcagccggagcctagcactccggcagcgtcgcgccgcgccgcgccgcgccctgggcgcacggccgcctcaccccgagcgggtcggagaaagagcctccctcccagcggctccccggccccggctccgcccgcgaggtctgggctgctgcgagcccgcgccgggtttcgctttccgacgatcataaatagcttggtgtttgtaaacaggcgctgggggcacattccccgcgctcagctcattgttccctcccttcctctctacttcgcgcaggacgcctgggctggggctgggagccgccggggctaggaggtgggggagtccagacccgaagtgacaaaatgctagcattttctttcccccggccgggcgtccacctctaacagcaaagaaacctctaagctgggtctgcagaaagcccgagccacctcaaccccatgttctcaggactccttagcagaggctttcccaacctggcttctccctccttttcctccacgatcccgctttgacttttctccttgcagtgtttagttctgagaattcagtactttgcgcatcaccccctgccccgaaaaacactggcagaccccaataatttcgaggaaagtcatgaagtctatgcgcggagccctgtgcaaaataactcccgctgctgcctgcccggcgttgattcccaatttatttcaagagagtcggctttggggagagagtctgcagggggagggagagaaaagaatactgaaaataaagctggcggccgcgggctactgcctgcgtttgtgtgcgtgtgccctgggtgtgtggtgtttgtgcctgggcgtgcgatttaatggagcgcctctctgcctctccagtgcggccagagctcgcttcgcgcacccacccctgccgaggagcctacttgctgcagcccaatgcattgtgtaagacgcgacctgttatggccaccactacttccgggttctagcattctggtcggaatccacctctccgcctgtgcaacacacactttacacacgcacggggactgcaagcgggcagcatcgatcgtggctcctttaagacaaactcagacagacattttttttaaccctccttctctaatctccttccagtgcagcacttgcaaagagggagagagagggagagaaagaaagagagagagagaagagagaaactgattaggaattaggactgattcaagggaagcgagcgctagggctttgtgcatttgaatattaacatttgaggtgttctgaccagaagaagacagagcggatgatcattcattcaccacgttgacaacctcgcctgtgattgacagctggagtggcagaaagccatgagatttggtagttgggtctgaggggcgctcttttttttccttttctttctttctttctttttttttttttaaactgatttttgggggagagaagatctgcttttttttgcccccgctgctgtcttggaaacggagcgcttttatgctcagtgactcgggcgctttgcttcaggtcccgtagaccgaagatctgggaccagtagctcacgttgctggagacgttaagggatttttcgtcgtgcttttttttttttttttttttttttccgggggagtttgaatatttgtttcttttcacactggccttaaagaggatatattagaagttgaagtaggaagggagccagagaggccgatggcgcaaagggtacgtattaaaaaacaattgtggaactcaaatgtgagattaaattgaaacgtggccgaaagacactgctaaaaagtttcctttttttctctctctcttttaaaaaatgaggctcctaaagccgtggcctaagcgagaggatttattcaatgcatttgtagacttatgtatgttacttggagttgttaattaaaggaatctatttatctatagattcctaaccagcagctatataaataaaaatgcaagctcaaacaatcatctgggtttttttttaaaaaagctagatacctaaagctgtaatttgaacattcagagatcagaagtttaaagttatgtttaaactaaaatatgcagctggaaacttctgatatgttattgattatgctcatctttaatatcactagaagtattcagctttttaaaggaaataactttgtcatagtatagccaattttttggtcagaaaacattcatctttttatagtaatttcaatttgtatagacttgtatacaaggcaatattttgcaagtttctcttagataagccctctactaattgaatactaagcacacagttactcactttaaaaatgcaatactaatttccccatattcctttttcaatggaaatgcagtgagagtaaagtgagacaatgacaacccaactgaggtagtttcttaaaagaaagggggtctacaaaaagccttccttgcataatttgtgtcctggccctcaaagccctgtttgcaaaagaaagttactaggctgacacagttttctttactcctttggttcaggcaaatgtcagcgttcttccaaactcttttcacacctctggctttaaggagatgaaagtggcaattcctcctttctttgaaaatcatttcactctcagcgcctccaaatcttgggaaaataactgcctggaatgaaccaattagaaaaacctaaatagctaaatttcacacacacaaaataatgacaatcaatatgaaagtagtttttttttttttttttctggaagaggaagatggaaagttgtgcatttgcttttgaatttgctttaaacctggtgagtaacatttgcctccttgacttctagtctggaaacaaagttcataagagtaaataagaaaatagaatattagctgcttcaactatagattttctttaactttgggggtggggaattgcccaattctaaattcagctctgatgttcaggaaaagctaccctcctttgagtttcacttataaggggtcagttagttttgtataatttagcagagtttgtcttggaaagcaaaagaaatgcagtgtcttgtaggactgcctaacctcacgctggcagggaaataaaatgagaagcctgtctaaattcacgtgctttgcgtagctgttcccatcgtaacttttttttttttttttaattccccctgatgtgaaggggctgtgaaactaggcgggtttgctgcagtgtcctggcacgttttattattgtgattttgaatttcttcctccagagacatgcccgtttcaccttctaccctcgggagaatgcttctctttctctctttctttcttctttccttcttgccaaaggagcctgaatttctaaactagttgatagggacacaagttagggcaagatcattcatcccagacgagtctcgctgagaattctgtattttttacttaaagctttaattttaaaataagaaaaactcagctttatagatgcaaggccaccgaattccgggtggaaggacccagctgtattgaccttatataagctcggtgccttgccgttctcccatttgcccgcctggcctcctgaaccttctttctctcctgtttgtcatgcagtacgacgatctaccccattacgggggcatggatggagtaggcatcccctccacgatgtatggggacccgcatgcagccaggtccatgcagccggtccaccacctgaaccacgggcctcctctgcactcgcatcagtacccgcacacagctcataccaacgccatggcccccagcatgggctcctctgtcaatgacgctttaaagagagataaagatgccatttatgggtaggtacaatgggcagcaggttaagtagttgagactcaacgcttccctctttctctgtgcccttggtaagaggaaagtcagagttctctggattggaggtacatctttggtgacttttcattcacatttcatggataatttggggaggtggcctgccatccctgaagccctacatccccatacacactctgtgcacatccagtgccctgctccaccatggcagtgcccgcaagggggtcccagatgagaagaagctggctaaagggcccttgtcccctctcagactccttcagcgggctggagtcctccctcgctcgatttcgcccgagagcgttaggggtttctaaatgcaggcgcctttgtgttgtaacgaaacttttagtttaagggaaaatctcttttaagccactgattgttctgacttgctgagtttactcagcagccttatgctggctctgccactgcacaataaaaccaaagcaggacagttgcaggtcaagcaagggggaacatgttttgcatttagggagtttgaccactgaagtcaaggagaggagcttgctctgaattgttacacacattaagaaacttctagatgttttagcactttgtgctcaaaggcgaaacctgcaggatttagaaataagtaaattcggggtgctcttcctcggaggttgttttctggctgcggtttatactgctttctcctccgccattcgattagaccctgggctagtagaatcctttgaaactcacttgtgcctactgtgtgccgatgaatttgggaacctctttttactttgcagaaacttttatttctatttatttatttttaaaaaatcaggacacactgaccctccctcgctggaaaaaaaaatatatataatctttttattttattttctgatcccttgtgcgatgggcttgtttaattcccaccgttctgtccgcagagttaactacaagtggtttaggctctgggacagaacatttggggaagctttgtaaaggaccccaaactgttaaattcccagctgagctgtgagagctaataaaagacttgagatacctccttgggcattagaagaagcttttctttctttcttcttcttcttcttttttttttttttttcttttttatgggctgagacaagcgacatctaggcccctcgcaatactagctgctttgccacttcgcagagacaaaatgaaaggctctactgcaggaacatttgaaggaactttctttggggggcggtgggggctatcagcgaagggaggggaatgtgcgtggagctgaggaggagcctcccggctctccgagggccttggggttgggatccctaggtgcagcccgttgacagtcggccccacggccatggacgtcctttccccaagttagctgagcgcctgccaccgagatcccccgagcctgggcttcgcgcggccgcctaggaggaacccgcaggaaccagccctccccaactctccgcccggcgcctttctcctccaccggatcctggatgtgcagtggaggggacgagggcttgtcgggtgggaaacttaattcaaaatggctgctggaaacgcttgggttttattcgtagcaaatgttgccaatttctccggccagatacgctaaaccgatcctcagataccgtccatggctcagggcctccgacttcagggctccaggaggaaggggaggtgagcggtcacctgggtctgggggagggggaggaaaaggaaaaaagtagatgacacaatcggagagggggtctgttcctcttgctcctccagctgtttttcttgggcacctttttccattgactggggactaaccattatgttgtttgtgactgttgtattttcttgcagacaccccctcttccctctcttagcactgatttttgagaaatgtgaattagctacttgtaccccccgcgagccgggggtggcgggcggggacgtctgctcgtcagagtcattcaatgaagatatagccgtgttcgccaaacaggtcagcaaaatagatgttaaaaagtaaaagaaacaaaaagagagcccccccttcgccaacacacacgcgcgcgcgcgcgcgcgaacacacacacacacacacacacacacacacacacacacggcacactttcaaaagtagccagcacgtagtcggccttaagccatgcatgttacctccaacctcagattttctctctgtctgagtgtctgtttgcagataacttaaaatcacccatctgcatccccactcaccctccagaaagcaaacgtggagagctcactctgcagaataaaatcaagaacaccacggttgtagctgctgtggactcggcggtctgagcagcctccccgagagccgtagttgctagtagaagtaagattgagctctgggcttgttttcagcttatttaattcacactgaaatgtttctgcgcgggacgaactcggtgtcaccgggtccctcccggagggttacttcctgcccccgacagtgtaatgaggcaagaaactaggaaggcgaccagatttcaaatttttctttcttttttctctcccctccctctcccctctccttctcacttgtatttagattcgcgcagaaaaacctctattttcttctaatccagaactggataacttggtaagagcggacccctatttccctcccccgcccccgaccccctacctcccacctccaacgccctcagctttgctttgagagccctgagatttctagaccggtcttcccgtgcctgcaggttggctgcaaatgtttctgtacacggacaactggtccgggacaagatcccggggaaataaattcatctcgagaggggccgggcgagccagcgcggggaaacgcgagcttttgttttttatgacagccgggctgcgcagctctaatcagcgcggggatttatctcccggcctgtcagcatgtgtgcttaaactttgcggacttcctagccctctaagtcccatcacgagggcagccaccggacaagagcccccaaacaaccagtttgcctgaaaggtgtaaggaaggcagcagaaactttgcaatgggaaaagccacagtttgagggccatttggaatatttttctgtccactccttccaaggacacatgtagtccagtgttgtggcccttttggggtggggtggggccagtgggactgagaaaggggagagccatgggggaggagagtgtttatgatcctcacttagatgctgtgttgttgttttagctagttttttttttcttaagaaatataaacctctagatggtacccagttgctgctattaagttttagtgttattgccataaatcaaaataactctatttactggtgggagggggtgggctggagatggtagagctgtggcagccagttttctgcaagccaggaatggggtgcttattgtttttgtatctttgcagatgattcaagccatacaagtattaaggtttcatctattggaattagagaaggtaatttctctagcctcttttccttttacttaccccttacccccaaacacacaggggggagggttccgaatggctgaagttcagccttctgatacatttgcataaatgtctttctttctggtaattagtgtcaaggccaatcttagcgtccatttctcttcgcagtttaattacaatttcagccactaaaactgggatcacaaacgccctagccttgtgttcattcttaataacttgctggctttgtgtaaatagttgcaattctgtgcatcccagctgatgtttcgaatgctgctctgaggttgtttcacaagttcatacctctgttgtctcttctcatcctcttccttctcttctttgctacctctgagggagaaaaaagttttattcagttgtagtgagtttctggaagacagtcttgagagcaagggcagatcagacacaggggagaggcagaaggggagaaggaggaggagcgggaaggagtctggaggaggtggtggggaggcacattaaacgttttgcagagacaaagcagagttgatagttgtgtcaatttcttgaatctgtgaatcctgcacacactccaccttcacactcaagaaagggtgtgggataacatgattttgctagctgttctataaatctcagcaataaaaacttaatgcattgtaattcaaactaacattaaattgcaagcacactggggtttcttgtgaatttttgcatgtcagtgatgcctgggacctctaggaaacctctgcacttacacttaaatattttgaggcattccttctcctttttgtaaaaaaaaaaaaaaaaaaaaaaaatcaatttgatatgtttttgtgtggctgtatgttttcccatatcaggagtactggcaacttgatttccttccatttttttttcaaagaaagttttctaaaatataccccttagagataaaaaccttcattacaaatataataaggacttgggttgtcaggcatttatcctatgccaccacagtacaggttctttggagaatatatatgtgcatatatacacacgtatacatttttttcttagacacattagaaagggatttatgataaagtcactggatgaaattaaatagtttaccttaaatgtcacctacgcaggtcacctctctaatgaccacagccccaggagcagatgaatttaacacgggtgttgaatatgttgtagcctgtgaatcatcttgtcactgtcaattttctgggatatctctattttgcaagaaaagaaagttattcctaattctggatgcgtctgggggtctctggaggacaattgccctgtgtttcccctatttggaagtttggatctcacaaggggggtggattgcacttgtcaatgtcatttatgcactcctgattatattcccatttttttatttctgtcataatgtaggtacacgaattatgtgacaatttctgccaccggtatattagctgtttgaaagggaaaatgcctatcgatttggtgatagacgatagagaaggaggatcaaaatcagacagtgaagatataacaagatcagcaaatctaactgaccaggtatgcgcttttcaatttcaacatccctgggaaaaaaaaaaatctgtatgcatattgcttgctgggtcactaccacctccttttattatttgcatatgattaagtcccttttagatacatttccatcgaaatgaaaatttttgaataatgtggctattattgcttcattaaggctggctctgggattcgacctgaagagatgagcttgtaaaagctttgctagcaaacttgacctgtttcttgtcgcttttaatttttgtctttattttatttaccctctataataatgggagtgttaactgccagtgaccgcctctgattgtaggggctttgttccggagcatttttcccccttctatcttcaagaaaagacaagtgtagggtctgcttatttcttattttattaggaataaatccaagataggtggtctaagaaagacagcgagagtttgaaatctagcaaatgctggctattttctccctgtctgtacggttcattagcctgtcttgtcagttttcctcggccgaacgcttctagacctcactgaacattgctttgtgtggtgttcactgcaagctcacccattttattgtacttaatagaaaaaataagaccaggccgaggttataaaaacagataaatatggacttttctcctccttctttccactcatcctccagctggtatgtgctctgggccctctgggttggcagcttgtggacatatcagcatcaggggcaccccggcggctccctgggtaaggagtgtgggggacctcgcaccgcctttgctctaaactgagggccttggcttgctgcaccctctcctctcctgtcttccctccaggcccttcttccgatgcgttactaagtggggacgacttttatttggaattgctgtggggatttctctctctctgtcaccccaacaccaccgtttgctcccagggtgcctctctctctcctgtggctgtatctctggattggtccaaaggagttgcaaaaatgcaatgaaagtgaaaacgtgtagagtgagtgagatgaaacagggctcagaacagttccgttgcgaattgttgcaaggcgtctagagatttgggtagctggcctgctctgcaccctcccacccttcccccctatataagtgaagtcccagtgttgtttctctttctgactcggcacgtgagtccagatttgggggaagagatcagcctgcctttgttaagccaaaggccagctactctgcaagctctgccatgatctctgttggccagtggctgtcttgtacagtccttgtcgagcgcctgacgcctggttcttagtgtcatcttatggttttcttctctcaacatcatcctcttaaaatacattctcagcttgattttctctgggcaatccccgcgacatgggctgaattcctcttttgcccatggggagcgagaaacaggcagagcagagatttaaaagtgccaatgcgccgggtccgcactgtgatctggagagttggaaactttcggcagtgtagtccattgcacagaacacgcagcgtgcgcaatcccagtgcggccccacagaagtgggaaaactgcaggcggctcccagccttggcccccgcgggcggcccgggcctcacgtctggttcagcccgccagccctggcccgggagctgttgagtgcagattctgctgaggaaccctcgagtagctgctgtggaataaaaattgcaatccaacaagcctaactggaaaatgggattctaaaagctccggagtgctgggtacataaagctatttgagcaaattacaagaatcgcttaggggcatgaatgaaatcaacactttaattgcctccaaaatgaagatttataccccattttctcaaggaatcattattttattaaagtcaaagataaaagaccaaagttatgggaattttttggaggggggagagagaatacaaaaattaatataatatcatggagctccccccttctccttccctaaacttttgttacccaattcccttcagatatgcaaatattggtatgcaattgtatcggataaaacttctcattttattgtcttctacctctaaaatgagaatctgacttctggtccccgctggttaagagtgggcttcgaagctttggctgagctcgtggcgctgttggcctatgcgcctgggctcgcttgtgtgaccccctggggctcacccaagtttcagctggtcggaggacagcaaacccaaggtccggtttggagaggggagcgcaaagcgctggacgcatgcggtacagtgccacggccgccggtgggctccactgccctggggagctgaggcgcgacgaatgaagcaccagggcgcctggtgggcgccagttctccggtctggagcctgctggcctgtccctccggggcgctgaacccctagtgcggcgtcctgggggccgggcaggaaggatggcctctccacctgtctgcgaatgcagcccagccagtttgagcctccgcagagggtgcgctccgggactgggcgcttctcgtgctgtgagaacgctgggccttgttagctcattaacccctctgtctctagggcccgttggcggcacggtttattttattttacctgttttcctcggagggcgcgaagactgccacccgcgcggggacctgggatcgacgactttgatactaggcggtatcccggagggctaagtcggcggaaatccacttgaccttgtagcgttagtcctttcttttcctttcctttcctttttctttcttctctctttcctatttatttatttattttaaaaataggattaagacaccagtagaagctgtaatcccgttccttcccccactcccagtcttccgggccgcctggaggtccctgccggagagagccactttggcgggcgcaagcctcctgggcgccctctcctgaccgccgcgctctcggctcggcttggctgttccgggctcccagaggctaggggaagcgaggggcgccaggggcttcccggcctcagcgtggggcgaggtcccggctgcgaccccggagcagagggagaggggggccatgatgctaggcgtcgaggcgagggttgagcctgtttggcttcagagaacgatgcgggttcgaccggaagcggggcgcgtgttctaggggcccttgggtggattagggggcgccaagaggggttaggcgaggagaggcctggccacccagttgctagactttaggccgcactccaggaaggagcagtcggcttccttcctaggccgcttctattgcgcgccactccttgaatctaagcattttccactccaagaacgcgttgggagagaggggagagcggagcagagtctctaggcccccagggccgcctcccggggtggccacgcctgccggtagcgagccgagattagctaggtctgtgctcgggcctcagcggtggccctggctcttcccataagcagcgggaggcagagaaatggtccctttggattacagtttttattcaacagcagctctccggggggtcctcgtctgaatctgcatttagcagctcctgggcgaaggctgtcgggctgcacaggacgccctgttgcatgttaatccagatttgtctctgacgtctggggagaagtaatatggcttgcagttatggaaccagagcgccacgctcgccaggcaggttaaatgccaagtgctgccgagctcccgggggacggccgccggggctgtgcagcccagactggagagcgcagggccgccaggcctctgggatctggggcaggccgggcccggtgcgctttggttcccaagtggtcctgggaactctgatggcgattgttttatttcaaaagttcacaatgttgtttctgaagcagagtttggcttaaaatcctttaaactgaggtagaactttgacagaaaacgccctcctccgaagaagcgggggaaattcttgcaagggagatttaagctttctctttaagggaggtgtcacagtcagggatgaggcagggagggcaagaaacaacctaatgtcctgcatggatgggatctgctgctttagaagcaaatagatagggccagcgaatatttacgaatactagaaatgtccgcaattccttgtcatccaataagaaaagtggacacaaacagcgggaggcagaaaaatggtccctttgtcaggtagtttgtttttaaatgcttccatttgtatacatcttatttaaattataaatgcttcgtaggttcccacttaatgccttaatcctgaaacctctcagtccacaggacttgcaagtgataaagtcttagcatcacctaactttacatttgattgtgttgtgggtcatgtgatatagtcttaattccttttaaaatatatgtcaaatggaaattatggcaagattctctttaatgattaaataataaggtgttgactgcttgtcactacactggctaattgggatgttcattctaggccctttattacatagcaccctttgaattaaaagttagttgtttactgggtatatttttattgttactttctgattggcttttagtgtgtatttatgtgtgagtttcagagtagggatgtattgattcttaatagggacacttttaaaacattctagaaaaaacaaggggaaaaaagtacaccatagatgcagataggttgagatcacttacattggtaaatgtctctaagtctaaacgctaatactacaaaaaatcctttgcgtagcttccctctctctctgtctccctctttctctttcaatctctctctcagtggaagtccccagtgcaagttgcatgaataatggaaagcaatgatactaatgctactttgtacaaagtaaagcctcataacagtaactattgttcagtgatttaactagctccatggcagtaggtcattcaaatagcaattcttcccccaccagaatgactccattgctcaccattctgaaatatatagagtagttgttttatatagctattggtcctaacttagagacttgtattagaaaacatggagaatcttaaataatagaggaagaagagaagagaagggagaaaaatgtattaaaatgtgggccgggctttcaaaaaagtaactgaaatatcatgctagaattgtccaactttgaaaatatataaattttaaatcattatgttttcaaacactcatatgtttaagtttttaaatgtttgtcatagtcccaaaagatttaaaacacagctgtggctgggtgacaagaaaagaaaatatccagtaaaattctatactcttaaaaaacaaagactatttgtgctcccatagtagaaacttatgtttattaaggccaagtagatagactaaagtattaccatgaggcctactgtcctaaaactagcttaccttccctagcgtacctcacaggtggagttggagaaactgtgaataatgcataacaaattatattaagacacttgccataaatgaaaatactgtcaacatgaatttaaatgaagtattctcatattggtaatgttatgctttccattgcaacaacaatattttcttatgaaacataaatatgtcaaacaaatgtgaaatgctaaagttttaataaatgatcatttaatcatcaaacaaaacccaagtatgtatacaaaaacttttaaaggaaagtcggcatacagccaaattgctatagggactagcagggaaatgatcaaaaaatgaacatgaaataagacttcctgtaagaaggtctataattcaaaattatttgactccactgtcagggaaatagttgaaggatagtaaactgatacagctctcagtcatttttgttacacagtcttaaatgtttgcaactgtagcattttacatggccttttgtggattatgatatctgtcatatttgaatcaaagtactactttaatttatgacataatcgaaacaaaattttttgccatttctcctgagtgcaaaaaaatttaagaattaaataaaaattatgggaaagtattcttttacaaatgaagaaaaatagaatgcatgtgacacagtttatctgacagttgtgcggatgttattatagatttaaagattttccagatcccaagtaaaacaacactgctctaaatcccgttgggcttgctcttcttactaaccaggaaatatcagaatgtaatacctgtataaaaagttctgggctaaaacatataaaatacagtctcccaatttaagttttaataataattacaaaatttgatttttggcatcctgtagaattttgaatattttgccatccttaatgtatacgaataaaccatgggtgtctaaaatcaattttgaaaagttcaagcaaatgagtgtgtccatgtagtgtaaaagataaaagaacatcttcactgtatctttaatttaacatgccatgatttcaagattataggaatttagagaagctttttggagtcttaaacagactctccaggaagtatacctacattggccaattgctggaatccctacacttgtaaattggacatttgaataaatggtataaaggatactatgtgaaataagtgagaatatattcactaaaatatttgtcactagaatccaattatgatcaatgtaatgcattcaagtgcacagaattaaagcaattggcaacaatttactagactttcttcaaacactcttgctaaatagcatttcttaatctagaaaatatgttcttgttaaaggaaaatacaagagtgcaaatattttccaattattttatattcttgacttcttggttcagagtttctaaaactgactaaaacatactatcaagggttgattctctgatggaaaaagggcttatttatacacatattgaattatacacctgttgtttattggtgtcatgagtatatacaatcaaatacaaattacagctggagttgtatagctgtatatcaatacaattgaagtttataatgaaattgacacaaattatagctatatatgttttaagatataaagtaaccatattatggtttttccatgacatatggaccaatttatgtggcatacgctaatggaggacaaataagttgagcaaagaagttttaccttatttgtaattctcaaaaatacatttctacagtggattcttcccttgtacttcataattctatttacaattaatagaatttatactcacgaagtaaacaaccttgagtgtgtaatgttatgcttctttaaaaaactcaaataaaatcctggcatgcacttatagtctcagctaatccagaggctgaggcaggaggatcacttgtgctgacgagctgccagcttgggcaatataacaagaccctgtctcaaaaacaagaccaaaaaatccttaaatgaaatcatattattcaaaaaaaataaaatgcctgttattattaataagtttacgaagtgaaattttaaaaatggccacaaccttatgagtttaacaaatattagcaactgttatagttgtgctgctgcttttacgttttaaccaaatacaaagtcttacattttacaatggacttaaatatacattattttaactcatttagaagatatcagtaaataacatttttgagtgatattagaattactctaatatcaatatatgacaacattctagtatcaataccttgccacataagctagcttagaatgaattgttgcttgtgaatttccatttctatagaattttccttacactttacaatatggtagcatgtttattatccattaactttaaatttctgggttgttggttattatttagaaagatagaactatatctctttctttttctgatcacttttttttctgccctttggaaaccttctatgcctgagatttgaacttgagctagtttgctaggtctcattttcctattgtagtgccttgtgggttattacccatatgtgggtttgttttcgtgagaaaatgaagaatgttactcacttcaaaacaggaatgaatagaggccaaagtcatcaaatattcccaacctgtgctttacaattaggtgaaaaactgaaaactgtgattcttatttgtcttccctagagctgtgaacacttggtataaagattaatattagcccctttgtgttcttcctctaaaagcctaaatgtttattttcagcaactgtattcttaactgattgtccatacttggtcccagacctccataatttacattttattctgaatttgcattcatatcacatcccatagaaactctttaaagtgaagtgtgtttatgactattatgaaactctggaaaatgaagtttataatgaaattgacacagccgtcaaaaggacagtgaagagagcaatttgactgtacatccagagtttccttatcccatctcaacttgtaaaaggcttatttctcttcttttaaaaatattagaagctgaatgaataagaatttctttgacaataaacctcctcttaatgtctccaaaactatttggatgtgttttcgaatattaacttaatttgatagacaagatataattaactgtgacctatagtgttttctggtattcagagattattccttagcaatttgaaaacttaatttcaaactacatgatgtataatttctgaaattctaaaggcatacttacactatttacgtgaagtggagtgtttgtctacagagcttcaaaatggagatactttagaggtggaggaacaatttttacatacaaagtcttggcaaactagctagtgcaggtgggctatttttggaaacttttcaatatatagccttcctatatatttactgcaatattaaaatttttcttcctgaaggaaaaaaaaagctctgtgtttcatacagaaactcgtatatgacattttaaaccttcacatttcattgatcataaaatccagccaatatatatatagaaaatttgaaatagcagcaaataggtaagatgctatttgctattatgctacaatcagaacagaaactttagcagtacaattaattaggcattttgggtttagttgcaacatttacttgaaagttcccaccagatctggagttgttttataatccacgcttgagaatattttagtgtaaaaaatttgtgataaatcaccattgaacattacttttatttcaaattgctccttcctaagagatgtagtgtcaggagtaaccaccctgcccttcactcttgaacatataaatgtattatttatttacattctatcatatacattatttatgggaattatactataactctacagagcatatggaattcatcttcatgagataagggtggcatctctgccaatgtggtatagccctaagtagataattaaggattaccctcagactacagataaatattatctcttatagagtcattacatgtttatatttcatagctccagatgcaaatgtagtttgccattttcattttaattgtcatagttttcttggctctagcttctaacaaagagaaacaggaattttacatttggaattgatcttgatgataaattaatatgttcaagaaaaagaaagatattcagttgcagaattatttaacccccttcctttctttcagcctgctttccctgtccttaatgtgttccaaaattttctgaagaatgttgttcataaagtttgtagcactgtttgtgtatttggtggcttggcctattgtttcattatattttgggtttttaaaagctgtgtttaataacaaaataagcaagaaaaacatctgagttattatgtcccgtacttctttgcacaaaataacagagagatacagaatatgcttgttctgtgcatatgaagtgtattgctagtgttcaatttttttattctaataattattcaaaggcagtaacaatctgcatttaagtgagtataaacatttttattctggaatttggaatttgcagcaactcaattttattttccaaattaccctgccatttcaattaggtgcattgttcttcactctactgttgcgacattctaaaggtttgcttgccatcctaatagtgaattgtttgagtgtttaatatttattgagggcatgtaaagaacatgccaatagaaaaataggagaacaaaacattgacaaatcaattatgtggcttttctttgctcgtggtatactttcaataatccaaatactctgtaactgttaaatagtatgaataatctctagaataatagccttgggtatggctgaagaatgacattctgattaactggaattccttaaaaagtgcacagtgcaactcagcatcttacttctggaattcacagttgctttggctgatctcttagttaagtatcttgaaatatagaaaacttgaccgttgtaggaaccagaaactcaaattaaatctcaagatgctttgagaaaggcctccctgattattttacccaagataaataatgaaggaagggaataatcttttcccaactccaaatttaacgttgtcagtgggcttaaagatgcagacattcttgaggaatgagagacacttaaaacacaaaatgttgtaaaaaatataaaaaatcagaagtgcttctaaagaaaccatagggaaattagaagataccctattaataattattagtggaaatcagcggtaaatataaatttctgtgattctgttattcaaagtataatgctatgaggtagtagaacaaaacaagactatatcttggctgaatttttttttcttcttatgtctcaattgtgtgttctctggctcgagagtttagaagtagaaaagagaaaacttcagaaacacttgagactaaacagttaagtgtattgcttgtcatttttagttacacatcctttcaggaaggtggtgttctaatgaacaatatacaatttagagccagagcacttatatttgaatctagactttgctctgagagggcaagtcactgcaccttgacgggccttagtttaataatctgtaaaatggggatagtaacagtacccactttattgagttactgtaagaactaaataaaagtgcatctaaaacatttagagtagtaaatccccaatgagcacttcattacattatattttatcttcttgcttgtattctgcctaaccttcaaaaacaggaattgggtttatggaggaaggattgggtgctggttgatggggctgttgttttatagagtattttatcatcgtagagtttaagaaaaatatcttaattcttattatgaggggtcaattttattctgatttcagcatagtgtaaaaggagactgaactcagatattttactgagatagtatagtgaatcactgcagactcactcctagggtaaaattcaaataacagttatgtaaggaccctgtgctaagtactttttccccacatttctgaatacaaatacttcatgctgaggtcttgttgctttcgggatgttattatctacttttactcattatacaatgttttctgcattattggatttttcattttttaaattttttttgctaggagccttgcctagaaagtttgtggttgaagttgttttatataaaacacttttaagtttattttatcttaatttgtttgcagaacaaggagcactgatactaagttacggatgtaaaataaaacactgggaagcaaacagtcttataaagaggattttataacatcaggtatactggcatgtaatttactgattcttctcccactgctaagtagaaataatagaaaatgatcagagttcagcagaaaactctcaaaagataaatgaataaaacagattgaagtatttaggtatacttatttggaaatatagtggtatcagtggattagggtttttttcagccaaacatttaactctatgaactacaatttataggtatgatttcaagaagcacctggagtcattaaagtcagtaaatataagaatttatttttattaatagcatgccagttataatacaatggcatagaaaaagaaaaggttatcaaaacatagatacttttactaagaattttagcatattgaggctttatcttctctcttcttaagatttttctctacaagaaactggtaagtagaatttgaacattcagggcacttgaataatttctattacttaccagttttgagaaattggcatttatggtcaattgccctttggttgtaattattccttttctttgtaatttggctgaatgtaccacatgtagaaatctatattatcttcttagaccacagtagggtcaccatgggatgatgttagcattgattgtcaaagttaaagaattgggcaaaaagtatcagtgctgtcttgatttcatcaggaaagcctttggaatattctgagtgttgttttacatctgtagacctctgcttagcatagttgattcacttgtaatttattgggtaaattaattcaactgtgcaggttaataaattcctgaaaatgttagagtggagacctaaaagacaccaggctgttgaaaactagggttttaagcagcattgggaaagtgttctgtggtattcagtcctggcttcctaaggtccccaccctcactgcctgccatagcagcccagcgcctgagtattgagaggagaatgaagcatgctgattgcaggacagtgggcaaaatctttaagggatagcagattttaaaaatatatcttacagccaggctgctttaaattccattacaatgtaattaaaaaaccattagattcattttttaacattcttttgccttatgccttacgtatgtgataggtgtgtgttgcggtgtgtgcatgtgaacccatgtgcacactcatgtctgaacccaggctttagtgatttctgaagcttgaagaatcacctggtagaaaacttttcacttaaagatgaaattactccttggagaattttcaccaaaggcaagaaagcacaaaaattcttttcctcctctctacatgcctcattacacagagatagaggattcaatgtttgaaaaattatcatttttgtaggttttatttgtggtacgtgagaactgggaaatatggaactctatttaacagatgctatgtctacctatacaaactacccacagtgactatcatatgatttttatacacacacacacacacacacacacacacacacacacgtttatttgcaagcaattcaccagagtcgcttagctgttaaggtcttagaaatctgcctcatttgatgctgaagtgtacacacttatgctgtgtataaaaatactggctggcaccaatgtagtgagtgcaagacgtaagagatgattacataaccaagatgcatttctagattaaaagttcacaatggcaaatatgacagggctggaactgtgagaagaggcagtgtggtgtgttggtgaaagccacagattctgaagagggatgctggatttccattgtcttaccgctaatttaccatctgccctgagtcaccagaattacccttcaggcctctattaagtggagtcataagcacattttatcacagcattaaaaaagggttcaacaagaaccctggcagggcttacagacttggcaaaggtaagcgagtgagggaggggcagagaaggaaatgagcaaaaggagagttggtggagaaagtggataaagtgtgtgagggaggtagccttttaaaaagttggcctctctgccaaagatgagtgtgggcctccatcagggagtgcctcaggcacctaccactattttcccagaaccagcaattgcctctctgcattttatccacttttcagcagtgcacagtgtggacttagaaaaggtttctctaaagtatgctatttcacgtccatatcattcctcacaacactttaatgtggcccctgaatccacagcacgtgtgcacagtgaaatattcatttgtgaatgtttatggcatttcaaaacatctaaatgctcaaaaggtaagagcagttttcctgtgttaagaaaaaaaaaaggcaaaacaaaacatactgcctaaacttgttgtggttaaatgaattttgcttagtgatttctagggatttttttttttttttttagaaatccacataactttttttccagaattacctgaatttgaaattgagtagatgtagccccaaaggagtatgttttgagaggagcaggctgtatctagcaaattataggtgctcaatacatggtagttgagtgggttgaatgattatatgctatgttttggttatcaagcagatacaaatgtgagccaccaagcatttcagtacgagtttcagtatgacaagactttaaatactcagacataaaaagccttctcagcatccccattccccagcttcaggtacacacaggtaaatgtgtattgtttctcacagcagctcctgtgccccttctcttctcctcatttctctgcatatggatctctctctgatccctttcctcagatggtatcattgattgaggagtgtataagaaatgatatttgctgaagtcatgcacctttaaggatcccgaaaaacactgtttagacagaggggaaaagtcaaggggagccgggctaattagatgcacccccccagacagtgtgggatgctgacatacagcgatcccattcactgtgcttcatggaagagcacaggtgtgcacatgggcacatacatacggacatgggcaagcctgccagtgtgagtgtgcgtgtgtatgcctgagtaccatgcacactggtgccttctccatgcggacctggagactgtcctcacctggagataataaattgttcacttttggagacaagccagctctttcaggccactagagattacttactaaagagaccctggtgatttgagagagtaaatgtacctccccaaagagaaagccgcctattgacaggtgcagactgacttcgaattttgtacactgattatttcatcagtttctacgtagctgctaactgacaccttcacagtaaagatcatcagactctcaattatccacctttttgaatgggaccagtagtgtagaagttttgaagaaaaaaaaactctatttttggttcgaaaaaaatgattctggcatcatactgatgtggtgaatgactgactgggaagatgtgtcaagatgctttgtatactgtaaagtgatttataaatattaggcatcgaattaaacttgatgaggtggggaggaacaaaccacctgtaaaaatcatgttattccaaggtgaaaataagatcagtttgcattccctgagcacacagcagctgggagatagcacaaagcataccaagctgtgcacgaagccagctcaggttaaccattctttccagaaggtctatacactgaatatacctgtatgtagataccccaaggttggcttaggtcaacttatgttgttacattaagaactatagaagctgccatttattgagtgcttgctgcatgcttgacaatttacatatgttatgtctgcaagggagtactttttatcctcatttacagatgaggacattaaggtttcaagaggttatgacttacttaagaccatgtaagtggcccaatcaagtttccaacaggactagctttaaattttctttcttttgactgttatgctacaactgagtattaatctatttttatagtggtgtgtgtttgtgtaagtgcaagtatgtgaggtatatttaaattgtactactcttttttagatattttgtgatgtctctcatatgggagaacacaatgccaggtgacaatttaacaaagattccatatgtattacttaagttattcattcaaaaatatatttgtatctaatataatatcaacattttcctaggatggaggatataagcataaataagatgtaggccaggatttcaaaacattcatagtgtagaattgtagacaggcacagcaggtcatcacaaagcaaagagtgaaaggctagaagtgtgcatgagatggtctgagctctcagagcagcagagcctcactcatccaggggttgatgtgtatcagggaaggttttctaggtaaggtggtatctgggctgtgccttaaatagcaagaaggagataatcaggggctggggtcaggcagggcagagcaaggcactgcaggcagaggagaaggatgagcatgggcctggagcaataagcagcagagtatttgtgagaaatcatgtgcaatgggatgttgcaggagcaaaagaaacaaggagaggaatggtcccttggggagattatgaagggctttgtataccagggtaaggacctcagattgtattctgtaggcagtgaggagcagtccattcattcaacaaatgtttcctgtgtgccagccaactgctgggcactgtgattgatagtcaggatgcaatggtgagcaaaactgacaccatgtctgacctcacagagcgtatgatctggtggaatggaactcttttaaaggttgggagtgatgagggccttaacaagaacagcagtcatgaatatggaatgggggagatttatttcagaactatttgggggtcaaaaatagacaagatttggtgactgattgaatggggaggtggagagagagagatagagagagagcgtatgaatggctctcaggtttataccacaggtggaggatgtgatacctactaggacacggaataaaaaggaatgagtaggaagtttggtggagacaaagagtttagctttggacttgctgagttgaaacaagtccactttcggacttcttgaggtggatgtctttgcatggagatggtttcgcaggtagttggacatacaagtctaaagaccaaagaagaaattcagacacacacgtctggtagcatataggaaatcaaaccactgtggaggagggaattatccaaggaatacctggaaagtgataagaggtcctgacctctgtccaaatttaaggcatagattgaaaaagagtgaatggtagaagaaaaaaaagtcaccagtggtaactttattcaggaagccaagatagtttttgaagttgcagtttgtttgttgggatgttggtggcatagtgactaatgaacaattcagattcattccctaagcacttggtgcctgctgaacatgagccatgcattgtgctgagctaggaaaggagaagacagagaagattaagataccattctcactcatggaggagtcaggggagctcattctttctattttactaccagatgccagtaagattgccttagagattgaaaataccatacatggaatcagaaaaaaccccaaacaacttattttgaagtgttcttaagaaacgatagaagaaaatgggagtgttctagctgtcaaagagagaagatatgaggagaatcatagcttgcttcaaatattttaaatggctgtctcttggggccctagaactagaaaaaacatgagcaaaaattaagttagtttatatattatatatcgatcaagaagaacttactgatggagtgcagtttctagctgcctgcctccatttatgacaatagaaatagtgtctggaggacactggctgtcaataacaagttagagtgtacattcagtgatctttcaggtctttccagcaaaagatttttttttcccaacaacttctttgttgttgttgttgttgttgttgttgttcttgttgttttgtctagccctgtgaacatctcctagagcagtggttctcaaattttgagagcactgtatacctgtttgagaatctgataaaaagttttgaaccctatcctttgggaaaaatatgcaagtatccacataaacccaaatattattccaacaagaccaccctaaaatcttccataggtgattctggacctcaggttaagacctcttgtcttactggatttccaataaatgagaacgcagccattgcttactctgaaattatatacattgaagaaaaaagcctctttgggacttaatttaaaaccatgactaaggttttttatttatctaatgccatgcattcttgattttattctgtcagccttacattacaagtggccccaagcaactcacaacttcacagatatgtatgcataatcagatgcacatattttattttaaaaataataatgatgttgtttggtgtaaccgcatatagtcacagagataggttattgtaactgaacttctctgtccatggatttggggggagttcgttctgattagggctgtcttacatatttatactagaagagttcatgagctatttctgatacttagactttaatcatgcttaatgaactgaactaagcataattcttgttctgtttttgtaactttgtggatttcttctaatgctcagtttcatgtgactactcattcttaaatgctaatacacaaaaatgctaattcaagaaaggagcacaaaagttagatttcacttcagagaagtgcattcagtattcataggccttctggaggagcaaggctgtgagaagaatgatattaggtgaaaaatattggctcctacctttggtgaacacacaaatttaaacatataggttgcacaaaatttggataaactgaggtggaatccaacatttcttgcatgaattcctgtataatgtggcgatagctgtgagaaaagaggagcccagcatctaaggcccaacacaatgaaaatgcaatgaatcggaatgcctcacagatcatagcggaatcagaatttccagcaaggaaaatcttttcatggtgaattaagtggtggatgaagaaaaatggtgatgaaaaaaggtaggcacagatcacaaacactgggctcagggctcactgctgaagatttaagaaccttagctaaagctatgcagaatagaatgtggaaaattgaatttactaaacaattaagcattgaattaatctacatcctgcacagtagaaaagtgggggagggagcagagcagagctgaataaatcagtggagctcattaaaagatagtgaatatatcaggtctgttgtagcataaaggaggacagcttcctgtataacaaggaataattctttggttctaagtcacctttttggagtcctagtcttaatcagattaacaaacatgcttctgatgaggttggtctgtggctctgtattttagcttgttatcgctagcttttctattaattaccagtcagatcaccagtcaacaatagtagtgagggacaacataaataaaatgagagtgcccaggagatgtcactcgcaggatctcatgcatcctgaaactcccacgggttcctgcagcctcccacatgtcttgctggtcttttgttcaattacagttaatgcaatagtttgccattttctctttctaattatattttcaagtgggatttgtagcacatagaaaaacatccttttacatgtcgaggcaccggggttttgtgcctggcattgtctgtcccctgggtgctgtaccattctttctgcagagctctgaataaacaagtcccccttttagagctgcagttgtacaaactgaaaatttatgcattaactgtttgcattctgagcgtgtgttccagattacgtcttacagcattcttctggtatgctgcagaatgcgtgtgtgcaaaaagcacttctttcacagttcacatatctttcaatctcagaatcagcagatcaattagcactgtttttgagaatatgcataatgggtcatattatacatgagtcaaacatacaaatggcatatctttctatgactttattttcatttttcaggctgcattaatcttctggccaagattatagaataagtgacagtgatgcatcttgttcagaaacagtgactctttccctttgattcctatacagcatgcctcttagatgggatctttacttttctctccctgggtgtctgagacattttgatctcctcagcccttcttatcttctccagggtaggaacatagttttctagaaataagcaaagagctctttgatttcgctaggcatacttaatgatattggaagggtcagcaaactctactactatatagtcatgaagcctgaccttatatgattgaaatgatgtatacatattttacatacgagatgatcctgttttcccactaataatcttgaagataaatatcacttcctagtgaaggaccagctttgtattttgcatcattcctactgtgcaggatgaccagtgactcatgaggctgtttttgaaagctagcactaaaagctaattaaaatcttttctggtgataaagagagatttgggagaggtgtcgccatgattgttttcctcaagaatttattttacagccaatttttcctatctgaatgttactttcaaatgcacccagtgataagaagcaacatctgttttccgttcaatagtacaagaaggctctgcatggggctgagtgtacacagtccatgtgaatctattgttattctcattccttttttgtgcctatgcctggtccatttgccatgtaccatccggcaaacagctgacacatactagctattatggacccaggcctaattgtgaggtcttaaaagctctgccatgtttgtcttctaggatgaatcagaggcccctataaaccacagtgttatagaccaccactctcattttgcatttccagagtagcagactgttgtgccagagggtttgttgatgttgaaaatatagtcagaatcagtggcggcattttgttttcctctttgcctggaatgtttttgttttccttagtaataaagcatgcaattacttacagaataactatttgtagatattattttagcttggaagcagaaactggcaaattataaatgtgccaatgcagctctgagctggaaccatggttgaagggggatgggaaaggtggcatggttatgtgctccagccctccatggctttgtcattatgccatgggatcctaccaataagggttcacagatgcctcttatttgggtttctgatttgtgcccccacagccctcttggaacagagatcatgatgacacggcatctactcgttcaggaggaaccccaggcccttccagcggtggccacacgtcacacagtggggacaacagcagtgagcaaggtaggagagatgttattctcttttgctacttgtttcatttttaaggattgaaaaatcagaaatgtctagtgagttactaagtatacagtttttcctagaagataaaccccctttaacttgagaatcagctcatcttattttattctctgaccctgctcttctgtgctattccagctgcttaactgtctgtcacctggccagcttcataaaacagggtagtgaattgactcagggcaagattagagaagtagcttagaagtttgaatgtgaataaatagtatgccattcataccctgctatacaaataaaaagtattattactacttgccctcagaggcttttcaagagctcatgaagaaacatccactaggattccaagttaatgatgtcttaggatgcttataaggctgtgagccctttagtagcacatgctcggcttccctctccactgggttgaagtcatttttttctggttttacttatctgaatctcctaagtgcttgacttcattgcaaagccagactaaataaaatttaggaagacatggaaagataacaggttaatttgtgttgtcctgtgaatgcacatacctatgtgtatgtgagtgtccatggattatgcatgtttgactataactagtaggaaataaagtttaaacatcaagctagtcttcagcaaaagggcgaattgagtattcaaatgtctgtactgcttttcatgagagcccgctgtgtggattttgtgttccattaatgcaattaaagtttaaaagagaattctttatctgaatataaaaaggctgttttattgaagttgactctgagcccacagtaggtacatactttaaaatctggttttatgatcatgtttcactggagtgctgttagacaacaaaggaattttgttgtctaacttagttgggctctaccaattaaaattgcaaagtctacaatgaatttagtgtgattaatttgaaaacaaaaacaggaaagttaatttttttgaggcacatatatgctgtttgtactgggaataacttcaacaaatataattttaaacatttgagacattttattgttcaaagaaaagttgctgacttcatcacaactataagcctagtaaaaacggagcccagaatagtaaactggttcagagctgagaggtaacctctgacctctgacttttactggaaaatgatatgcagcataaatccaaggggccttttttctttcaagtgtgtgtatgtatgtgttatggcgttgctgttcagagtgctatagttaaggtggtgtcagcactttcaatataaagccctactttcataactctacttacactatgagttttcaaaaaggtgtaaatggaatataaattctttttcctgtagcccaaaattgctacatggggtcgcagcctagtgtttggcttgtttctttttctttttcatttcttgcttttcaaaacttatatcatctgagaataggtagatagttcagctgctgcattgaaggcttgcaaactgctgaaatgcacttgaatttaaaattgtaatgcatctgttttctcaaacatagtatgataagaggattttcagatagcaaatgcccaataccagttcttcccctctgacatgctgtaacaaggaattaggagtgttgtatgctgcttcttccttcaacaagtgttctccaaaggcctatttaataatttgattgtaactaggaactacatattattcacattactttctacttataatgtttcttcctatattttttctttttatgttttatatttgagtccaatacctagttgtttttagggcagtttcacataaattatcttatttgaatgatctcagctgaatcatttaaaaacaatcctgggtagcagagtaagtgggtctatccccacttgacagaggagaagaataaggtacaaagaagctgagtgatttgttgaggtcccagtggagtgtcagacctaaacttccagtttcccaattacttaaataaggttcttctcatcagaccctctttcctcatctctctactaaaaaactacagtgaataacttccactgtcatcaaatagaaactttctgtgctggtttcccctaccccacctttctgtgcttgataacagaagctgttgggagccccaccttcagtcttatttgtccttccttgtgggttttctttggcagttgaatttattcctgctaaatgcagaatgatgcctgaaagtgttgctgcaacaacttatgcacacttccatgccaaccgtcacccttctaaacctttttttcatccctgagaactgcagagcttggtctttgtgcagccttcggattaactgtgcacagtggcttttccatgttttccctgtttgccttttctggcaggcatggatgtgtaagctgtgccagcatttggcctgtagtacatgtcctaaatagttatttacacagtttgagtccattttagtcaactgggtaaataacagccctcttcaaaagatttataaatccataaatatgtctttatacatacccaatagacagaaataactcaatctgtcaagaacatatccaaagaggtgtttcccccacagacaggagtaatacatattttaaaactttctctgacatattatttttactgcatttcttttttcctcattccttttccatttttaccacttcattatggcacctgtggttaaaaaaaaaaaaaagaaaagaaagaaagaaaggaaagaaaagaaaacaaaaaagaaatcccctaggctttagccctctgttaaataaccttatctgctacacagtggaggcatgtaacaggctatatatatatacatctcaactgagtcctattcttttgaacttccaaagtagataaaatgaaataagttatgcaggagattttaaatgttctaagatttcaaaatacagtaagagtttctggttagagcttcagcaatttggggaattttgaatgactgataatttgctgaattagtagctgttgtgatcagtgaaagagttttagtacacatttttacctaaacattaaaaaaagaaatacaaaatccatggctgggagcagtggctcacgcctgtaatcccagcagtttaggaggccgaggtaggggggggtcacaaggtcaggagttcaagaccagcctggcccacatggtgaaatcccatctctactaaaaatacaaaagttagccagacgtggtggtgggcgcctataatcccagctactcgggaggctgagccaggagaatcgcttgaacccaggaggcggaggttgcagtgagccgagatcatgccacagcactccagcctgggtgacagagcaagactcccatctaggaaaagaaaaaaaaaaatccaatcgtgggcattctaaagagaatgtacataagatgtgtaattacaaaaatatcaaggtactattattcagggatttaatgtttattcgcgatttacacaatatatctttccctcaattcaaattatttatcatgatgaccctttttatgatatctacttccattcaatattaatacttgtggccccttgcaggagattgattctttaatagtaaagtccttttcaattggcatttaagagggagggcctcacatctgtgtttggttggggattctgttgctgttgctacaacattgatttttgtttactccataacttcctcaaagtacttccaaagataccagattgaatccttattttatccctggcaattacttgctttattttcccatttcacaggagatagaagtaatagctcagaaatattgaagagtaactctcaaagtcagcttcaggatcttggtctcttggctttgtagctgctttaggatggggtgtctgtttccagggctgccaagtagtgtctcataggtacgggaggtacatgatggcagagacgtgtggctttcgtgtgtcttttgcatcctactgtgcatggctgcccgcctaaccataatcagagcctactctaggaactgtgtgttttggagtgggagaacttcaagcaaattgggtgcctcttcccctagatttttactgtttccccaaaggcctgccacagccactctatgcctcttaagcagcttcagctacgattgaccacatttttgagtctggacaggtctctgtttttgctttaaagttaagagagctaaataaatgatggtaaaaagataataaaatagaacatgaagggctgtcagtcagtgtaggtatttccatcccctcacttttcaagtgaggtcacggaggctcagagcgataaggagacttgtccaaggccacacaccggctggtgctcaagccgggacttgaacccacgcagtctgactctagagcccaagctcctaactatgacatcctatttgatacactgttttactggagaaacagatcatttgacagacattctttctgttagcaatttgacaactctttccccagttgtctgtactgaacctggcgctgtgctccgtaatggtgacctagctgtgaataagatagaatcaccttaaactcagaggggtaatgttctgttggggagggagaacctagttttgcatgctaagtagaatgatgaatgaagtatttacaaagggagcatgatgactgatatgattcattggtattatgtattaagagcctatatcatttcactcattcaaagacttagtgaattaagaatagaagcatgggaacaagtaaagatattgctcttgcagaacattttccactgaaagctcatcatattttcctcttttgtgaggataaagaaaaagtattatttctacatggaaatttgatgtaatacatttcaaccctaaaggcttttaatgattgctggaatctctaaaacccacttatgaacttctcctttaggaggcaggactcagaataacaatagtaccacttaaaaaaaaaaaagcaaaaccagcatgccaggatgtttctttaaagaagattaatgctaagcactgcatttctctatcataatgtatcaatagttgcagtgcctcccactgccccatccccctccacaccagcttttgtgtgagtccaggcaacctataggcagaaggcaattccatttattattgaggggactctccaggcagttgttccagacctgtgaagccagcaggcagagcggcctgagagggggtggggagcaccgggcgagggaggtggggaagggccacattatgttccagatgactgagtaacgatttatatatcactcgccttttttacatgaagaagaaaagtaataacagcccaaacccaggcatttgaaacagtcagctgtccgatgaataatgggataggtgggaaggagcgctctgattggatgtcttaatgagcacatttcgcacagagtttgggctgcagttccccttgacctttgccctttattgaccaaactgacacttcatttttcacatacttccaattatggctcggcttaagtgttgccctccctcctttatttctttcctatggacaacttgagagtggttgaggccacagaagatattttaatttgaaaaactaccgtagcgactcaggttcaggatgtaatctgaaactgctgtcactgcagcttttcagctgaaaacacaaagttaatactgcttgtttctagacaattttctttaaaaaaaaaacacgaaaaaatctaacatattttacaaacgaaatgataacctaagaaccttgaaaatgaaggaaaatggttacaaacggtaatttttattttttgttgtttcatttgtctgttggtcacagtgacttgaatgatctctatttgttcacacttgcttcttaagcctgtacctctccagggacttctggtatttcaatggcactgtaatgattttgactaatacacttttgggaggagagaaaagtaaaatataattgtgaccacaggccttagagcatcgcagccctgtgtgttcctttggttatatttaatgttgacctgcaaattaaagtgtggcctttgcatgcagtggcaggcagaataggaaaatgatttcctggtgggaaaagtcaggtgtaaaaaagaaagaggaagttattatgctccacaaatggccgttatcaaaaagtctatattattaacttatcaaacatgttgaatgagatgtagagacagagaactgttttcccaagaacaccctgtaatatactcacctttccttttattgactcatcaaatgtgagtaacagtgttctggtttccacctgcttgacttctagcatcatgaaatcaggtcatcttaaagaaaaataacttcatcatctaaaagtagtaactatatttaggggcacgaacttggccataagcattttcatagaaagtgcctcttctcattattaggcaacatcaccagtaaacttgaggtcattgtttttcatcttaaacaaccgaaaagtgcatttgaaattatttacagccgagtagagatattcttcgaacacagaagtatttatctgaaaagtggatgaagtgttatctactttattatgtagccctctagcatatctgtggcatatttttactgtaatatggtaataaaagaatatgtaaaagacagacaaatgttctgtctttttctgtaaggtgacctctgttaccaagtaactgctttacttatgagcttattaaaaactcaaaaaatgagcttttcatagttcacaggcattgatgtgaaaatgagctgtcctgtgagtagttttcttgatcacttttagaacaattgattagccaaagagctcctgtcattagttgacattgactgatagcaatttgtcacaagctctgaaggtcagctagacagttggagtttcagcttgtctttgattgacctttactgattccatcctcatgtgattgggtttgaatagttctgaccctcaattggaaaagacagggcattagtcaacagagtcatttcttatattttctgttgattgctcatttttatttatgtgtgaattcatggtctggatttcttatcaaattttgaactctcatttttgaaatttaaaaggtgcgatatttattgtgtgacctgtaagtcacaattctgctttccctttggtttgcacacttgatttgtgatgtcaatgacgtctgtctactggccactgttacctgtgcaggtactggagttttgttgcaagtgatggattaaaattttgttgttgctgtcattttttaagaaataccaactccggtgtgacttgtagcacatctaaaattatacaccaattcttttattttcctagaattgactacttttgtctcccaagactcatgcaatattttaaaataagaaataagtagtaaggaagtatatgaataatgatgttgtgtcagttcatcatttagctctgcagccagaggcatgaaaactttttaaaaagtatcttcttttcagtttcactcagttggctgtaaattagagaaagctcccctagctagaagggcattcgcttttcagtgatagtggaatatattttctgttttcatggacctggaagttaattgttcataatattcagttctttcttttcaaaactgtaaatattttccaaaaatacatcacatatagagaaatatgttccacatcatattaataccatgcattgtattgttttatgtaaacgatgaaaatggagatattagctttaaaaacccaggtcttaatctgtaattatttaattcagtttttatgtaaggccttttcattctcttatcctttctcaccttcccttcttctcttgagtctgcattgggttttaaactataagcaataacttgtttttcaggccagatctcccaggcattccagggccaccacacacagcctggcacagctcaaacatgtgtttcagtttctacccaaggaaataaataaggagagaattcattgtttcaggtggtagattcttcacatggtgtcattcttggcaaggcagaagtgaggaagttaattttagggaagcatccatttaatgtagcccaaggagataaaaagagtttagaattataatctctcctgcagatgagccaaaatattatcatgagttgtgtttaagcgggggatgggaatgtaaatttatacattctagtcaagtcatcaaaaatagattaagcacttactgtgtgccaggtactctgtgtgagctataaaaatgagtaggtcatagtatttgcccttaggaagttcctgtgtgctaccaagaacatcaagcatatcaaagtaaaatatttgctaaatattggatattcttagggagccgtgagtgtatttatttcacaacatgccaatgacccagacatggtgaactccgtggtcaggcctgctggatgaaacacagcgtggtgggtattaggttcaaattgcagagggacagcactaccttggtaggtgtagacgttcagcatctatggggccctgttaggtggacttggctccagagcccactcttggaaacttggtccagtccttccacactgccatgagccagccagtgcctctgctgtctgaaccattggggtcatcattgtgttcaccgccattagtcacctggctgctgactcagattgatcttcttcaagggaatcttgacattttgaggaggagaggacccctttggcagtctggtgaagccaatggataccttatcagagtaatatatttattaatgtatcaaataaaacccacaggactacaagggcagtgaattgtattaaaattcaatcttctaaatattttttaaagccaagttgtaatatagtaatataaggccgggcgcggtggctcatgcctgtaatcccagcactttgggacgccaaggtgggcggatcacctgaggtcaggagttcaaaaccagcctgaccaacattgagaaaccccatctctactaaaaatacaaaattagccgggtatagtggtgcgtgcctgtaatcccagctagttgggaggctgaggcaggagaatcgcttgaatctggaaggcagaggttgcggtgagccgagattgtgccattgcactccagcctgggtaacaagagtgagactccatgtcaaaaaaaaaaaaaaaaaaaatatatatatatatatatatagtaatataagtgctctgttaaataggcttaaataacaagatctactagtaattctgttgtctgctgaatttttgaagtagtgataaatgtaagtcatgttttaagatatttataacaactatattgtgatatgcaaatatgatttccgttgggaacaaagttacaggtcctgctaatagttctgtggtttgttacttacttacatacaagcatgaaggaaatgctaattctaattgaagttattgataataaaaatgtaattttttccccttctcaagtacatatatcccctgaattctaaccatggatctcccttgaggaggtgtctatatagcccaggttaacaacttctaaacttaagtgtcagaagttaaataaatgggtttggggatgtatagccatcccttggtatcccccagggattggttccaggaccctctcccctcaaccccgcagacaacaaaatcttcagatgctcaattccctgctattaaatggcatagtatttgcatataacctatgcacatcctcccatatactttaaataatctctagattacttataatacctggtacaatgtacatgctttgcaaatagttgttatactgtattgtttagaaaataatgacaagaaaaaagtctgtacatgttcagtacatatgcaatcatccattttttttttcaaataccttctatcctcagttggttgaatacgtggatgtagaacacatgcatatggaggtcttgaccttaaatcatgccatccacctaatcacttgttctccgtactcctaccctgggacatcaccctctgccccgcagtgagcatctaacagaagatgggtggatgccaggagcagcatctgaggatcttttgagggattatagggctgaggtgagactgaattctgagacaggaccctgtagcaagggtaactatgctaccctgggaggatgtttttatgtcctatgcccttcccagtagcagccatgattctacctgccctgggctgtgatatttagctctccccctgatgttatttctctttatcatgggtgatagcactaattaagaatagtagtagaggctttggctgttggcctagcaaaaactaacccaaacagtaaatttatgccaagcattttcctcaggaaaaaaaaaatgtaggcatggtctacctgttgtattgattagtcccagaaatgtagttggtaaagttgggttttgctcaagtgtctggctttgtggattagctcagtcttgcatatagttttccataattgcttaacctaaaagcattctatttgattagtacaattagtttggctttctccctcttaccaatatcaattcatatgcattccctcctaacgttgctcactttattttgtaacaaagaatgaagacagcagaacttcctgttacttatttccatattagaagaaaaggagaatatgaccttacgtagcaaagcttacatttttaaaaaatgtatatttttaagaaaaagagaactacagagtgaatgcagaaaatattgaatttgccaatgggcttgttgctaggttattagcatttactgttgtagtttgactctttccttgagtgcccctactacttatgacagccaggacagctagcaccttgacacccttttatactttaataccttgggagaaaaggatatattgattttaaaatgcatatatatatacacatatatatatataaatatatgaatataaatatcatttataaatataaaatataaatatgcacacctatataaataaatatgtatatttataaaaatatttataaatatgttatttataaaataaatatataatatattatatataaaaatataaaataaatttatatatttatttaataaataacatatttatatattgtatatatttatatatgcataaatataaatatgtatatatattctccctctcattctaagaaaggatttaaggaaattaataaaagtttatagtatacaataggataaaaaatgtgtagatgaacgaattagaatgaaagcaaaataaacaaaaagccaagaaataagggtagtaccaagcaatataaattataagatcatgtacaatgactagaaataggtattaatttggccctgagcttcctagcagctaaaacaaagactgaaatataattaattacaagatttacaacatccatggaagttgctcagaagaatcgatttgaccagcattaagatctgaaagaaattctcctcgtatcctcacacagggagtccagggagatggcagaggctggcatccttgacagcatctgtaggactcctcttacattccccagctcctagaacaatgctgcagttataataattgttgatacatatttgattgattggactaggtatctgtaatcatattcatccttttgtttctttaactcattggaatctgagtcttgattttcatggttgaaatgaatgacagcctattttgatgtgagccaaggtgctgagtatttggtgatgccatgaggcctttcttctcttgtctgtctccttcttctgaccattctctggtgggttcgcctcattctccagtcttttctccctccatctgaagtcaggaatggggttgaggatgctgttgttactctggttattatccccaggaacagggttaatggaaccagagagattcaggtaaacaatggttagaatggagatgctgagaggctaagatgggatgccagaatggaaggttctgatgctgcagtccttaaaaatgaaagttctgagggaatatgacttcagcctataaagctggagggggctgagtgttatgaatatttggcttacctcatcctggcaccaaaaacatcccctcaggtaaaaggaatacatttactacaaataaaagtattgcttgatgtacattttaagcatatgagaggattactcccaaagatagaagtgaaaagagaaatattcccatttattaactgaattaattaaatgtccactgcataccggtcctctgctaaatgtgggaattcagagtgaaagaggtcatttctggaatcaagaaactgacagtctggtggaggaacagacagtttagtatatcataggttaagtctccctagtgagcaggttctgagtaatttggaagtagaggaatggtacctaacaaactggcacaggggcagcacctgcctggcatcggatgggcctctctctagcctttccatggtggccatttttaatggatcacagcacccttgtcacggggcctgaaaggagtgcagatgcaggtccttctccacacagtgctccagcaaccactacctcgtcccccggagttagccctagaagaaattggttttctatttctgatctcccactcagtctcctaagagagcaagtctatgatggaaacttgggagagatggagaagaggggcatgtaaggaaaaaaaaaattagcttgtgtaaaggtaggaaggagagagagcatgccactttggggactttgtgtgtgcttcagcatgagtagagagtgggtgtgagagaggaagagtctgaggtaaggcccaagaggtaacaggggcaagaccacagagggtcatatttgtcatcttaagcccatatttgtcattctggcattggtttagcaggcagtagggagtcattggaaatgtgagggttgtggcgtggttggatggaagtgaaggaggaattggagcagggggaggctggagtcagcatgatagttattcagaaatgttgcagaactttacttaggcagagggaggaggctagagagagtagctttgaggaggaagactggactggacagagaaacagtggacgcagagggtagtggagtgcaaaggctctgggatgatgccaaggtttcagaagactgactacacagactacaggtcccactggcatgctctttctttgtcttcttttgaatgtagctttgccactctagatgggagaaaatgcagctggtcattgatggctgtggcttttctcctacacccttgctgggcagaggtgatgcttttcccacctgttcctgaggatggcttgcagaaatcctgctaattctctctgctgcactgctttccctcaaagaaggctccggctccgtggagaccaggggctgggtggaaaggaagaggccagccaagctgtcatgggaatttggtgactcatttcatcagtttactgctctgaaaatgaggtgacttccccctttgcttgacaactgattgatgaacatttcctgagtatttgcagaatagatgttttgcctcatgggccttcatgtttatgtgctcccagtggattctaatcctggtgtgcttcagcctttcccacttctcagctgctaatttttctttctatgtagagtcttcagattacctgcccaagacttaatagaatgcaggattagaaacagtataccgttatgcctgctgatacaactctggttacgttgactttttgccagaatgttaaagaatgaaggatacctttttacactgaaacagtatttatttggctaaaaacactgtcacctggtacttagtgtgtctacattgaaagctgtctttcaaagtagcgtacttcattttgtgtgtctagaatttcttgttttgtttttagtttttactttcttccccaagatgtgggtttatgtgtttttagaagaattagctttactttgtttccatttttcctgatgctcttgatagtgaaggaatcagctttggaaaacattaattgctccactaaataatggaatcttaatacaagttacatagcgagaagtggaagcattgcttttaggccccaagaatagaccttaggctcattttccataactgaaatggaagcaataggtttgcattatgtggatcagagtcatcatcttagacactagccatagtccgtagatttaattttcatatttcaaatggaggctgtaagtttaacatgtcttactttgcagctggaacagattctatttttaatccgtaagttgcatatggcatggagccatgtgctgcccagatccaaatgcataactcctgttgatatcagtgagcttcatgatgaattggaaagaactatgtggtctttgttccaaacatctatctgactttttaggattaaacgtgctaaacaaattctagcacttttcaagttcaaatggagtgtttttgaatgtagcaaccatgctggcttaaaggaataatgcaacaattccaaatagacacacgcacacataaccgtagaattggttttcaggcagagaaaggcaactgggctcaggaacctggctggcatagtaaaggacatggttgtattgagctacacaaaattgcctttaaatagaaaagataagaggagaaagccttttctttggatggtactctgctcatcagggtacacattattgttggtgagtaactctagcaagagccctcttgtacttcctcattcttatgaccgcaatggtgggaattgtctggcaatattcattcagaactgacagatgtttgcatctataaataaatgtactcaaatcataattgttataacaagattgtttgattacctggcaatggccttgtgctgagatagcttttggatcacctgttctttgggaacatttgacagacctcatgtttattacccaattggatgtcagtagcaattgcagctaaagaaaaaacaaaaatgcaagtacttgttgaccttgacttttttccacaagagattggacttgatggctctattgcagttgagctgataagggctataaacagtagtttaaagaaaatgttttattcccagaggaaaacaccctatttgctgtgggaaatggcaatagacatatacgccttttgccagattttcttaatttacctttatttgggctgtgggaaaaggatatgctggaaaagctttttatggctttaatgtacatttgcatagattgttataatttgtgaatggtgtagttagtatattgaatacaatttaaaagaagccaatgatgtttctatgatttatgataatatgatttttttgaaactgtcatgttagtataagattgtgtttcagagatgaagatcttataaaaatgcaatagacttatggtgccaaaatgctctttttgattttaattaaaaacataaaagtgtcattggttaatatgatctcactaggagcaaagaaagaaaattgatccagtgaatatttacatgggacattccagaaatgcactgggggataaggcaatcagcacttttctttaggcacaaagtcttaagctccagatttgaatcaagaagccccgggccatgaaggattccccatttcttggtgagacagtaaggctcggtaacctgccctatttgctctttaaaaatctcactgcattttccttcagaggagaggtgctttggctcaatgccactgacttcaacttttgctcttaaaatgttgttttgatgcatagtgtagtgatggctgaattgatttctgtgcataaacggtggcctagattcttgccctgtggaaatccatggaattaagaactctaggttcctggagtgataagaggtaagcaaatgattagatatgcatgcagggaaaaaattcaaatgctcatagaatagaaataagggtctatataatttgcaagtttaatgtaaatgcaagccactaatacaaccaataatttaatgctaatatgtgaggataagtaaatgttattctaattatttcctatttggtgtgttctcaaagagttctgagcaaaaaatatactgcattgaaatatttccctggctactcaggatgaaaatgtggtctactaacagctgtggccataatgaaacctctgggatactagtgactaaaatttctctttagatagaagtttgggacaatttgagatggcagaatctaagccagagtttctttcaaggagatttagcacactgggatattatgtgatttatccaatgaaggtacaggctgagatctagctcaatatgcccttttaagtagtcactagaattatttaataatgcagaatatatttttggtaaaaagatttgatctttttgtctgtttttcaaagtgcaaatttcctcctgaagatagacaagtcttgggtacgtttttgtgagaacagaccctttgaatgaaattttaaaaccatcagaaagtcataacatgtataatcaatagggaatttcttgctgtctaagaaaacgataggaaagaagagttccactctctccagtcttctttgctaagtctcatttctctacttgtgcatttctttggagaataactgcttgctgacttctactttcctatgaaacttttgtgaagaatggtggaaatctttgcaatgacagatgccattgcagattattatgatgtccattacttggagaatgaaattaggaagagtttatttctgacatggcacatacccttccctgcaacagaaagactgtagcctagaatctctgttaaaaaaaaaaacaaaaaaacaaaaaaacacatcctcaggatttctggtgattctctggttgatgtggtagaaatgagcagagaggcaagtctgctgcctcaggcatcctgatcccctgcagcaggagggcacccaggacatgtaagctcaggttccttttggctgcatgagcagggaaagtggaaggcagggtatcctacattcttcctactactcactgaaggatgtggcaagggcatgaattgtttgtggttggctctctattctggtgctaggaaagacttctgtgtttatctgcatctttctaagcccccattgctatgtagccagctcccaggccactttgtgggaaagctttctttgtgatggatgacgtggcatttcttgtcacttcctcaaattccttcctgctgcctatcagcattgctctggacttatctgggttgagcttcagccagctaaagctaatccaggttcctatttcagaggagcaaaatgacagcaatgacgctgccattcttttggtttgtgacctaggatgctggggagaaagagcaaaaagaggagggttgcaagagttggggcctgttggcttgatttttcaatcctggtaccttgagcatctctttattctcatgagtcttgcctctccataaggctgacagtattatttattttcatgtgcagttggatgtaacttttccaactctgacctgaagtggcatttacctgagattggttttattccatctactgaagttggcgctgacaattttgagcctcttaaatgaagtcttatgaaatggagtttagaggatcagagacttgtggctctttaggtctgatatttctttttttttttttttttttttttgagacggagtcttgctctgttgccaggccggagtgcggtggcgtgatctcggcttactgcaacctccgccttccagtttcaagtgattctcctgcctcagcctcccgagtagctgggattacaggtgcacaccaccacacaccacacccagctaatttttgtgtttttagtagagacggggtttcaccatgttggccaggatggtctcaatctcttgaccttgtgatctgcctacgtcggcctcccaaagtggtgggattgcaggtgtgagccaccatgcccagtgatattccattatttaataaatatatttactgaaaatctactatgtgccaggtacaatgctaggtgggaaatttttcaaacaaataactcatttttcatgcattcagattctgaaatgtgcccaccctcgttcatttgtgagcctcacaccaccacccttatggtggagcagagatttgtgtctctatttcataggtgagaataacctaaggcctgacagggtgtgagtgagaaaacaacaggacctaagtcagtcaggtttctcaattgcaacaattttcttttttaccaggttaagaagtaacctagtaactgatatctttttggttcatttatttttgaaatgtgtctaccagttctctctctctgtctctcgttagaaagagagaatacagaatgacatatgaggaaggatctttagaagaaagtgatcaggcactgcttagcattatatttcttgcattcatttattcattcacggagacccttctgtatagagggcattgtgctaagctctgggatgacagaaatgagtaagaccaatccctgtcctcaaggaattggtagtccagtgtttgtttctccctttacccctgaattgagaactgtctggaacacacatatttcccaatgttgctctctttaggagttacctgctgtctcattcaatattcctgatgccatctagtgatattcaggcatgagggggcttcagtgtaggatcagaatggaagcaacccaatattggtctctactcatggagaacaggcttttaataaatcagatttctacgtgagatggtttgacttttttggacacaggaacagcctaaactcacccataaaatggaagtagtattagtacctacttataggactgctgagaacattaaacaagttaatatatagaattttgaaccatacctggcaatggtaagcattatgtatgtgttagctgctgtcattaccacatcatcattatcagctgattaatttttctctgtggaaaaagagattctgcttaggactggtgtccatttctaaggggagttatgcttatttttttttttttgtcttttttttttttgtctttttgtggagaacggggtctcgctatattgcccaggcaggtctcgaactcctgagctcaagctatcctcctgcctcttgcctccctgagagctgggattacaggcgtgagccaccgcgcccggctggactggtgtccatttctaaatgtgagtgatgccttccaagaaattgagaatctagtattattcccaaatatatatttattttacaacgaagactgtttggctgcccttttgtgtcaggacagagggcattgtaaacttggtgggccatcaagattttcactcttataggactcccttccactgtccatcactctgaaatgttccacaggtctgctacttttacctgaggaggcagtgatgaggaagtgaatggttgagaagggacgcagactgataaaattcttaccacaaggccttgggtctactggattccttttaaacaactgcttatgttccttctataccacacattaaagtgtctgtgagaaaatgaagtttgtggtgtcagttaagattacaggttgaatggcatacctcttcttgatggtcagattgggttaaggttgagtgtccttgggggtcctaggtggaatttcctcacaggagccaagttaggatggggaatatatttggccactaacaaagtttcttcttgtgtctctggtctcatctggtcacaataacctttggtttttgatgaagctattgggtagtctggcctttgaatttcagtacatcaatgttactggtaaatcttaagatatggaaagataatccttagcattatggataaactttaccaagtattccagatatcttgagaactaggtttgtgacaattgcagttggtaaaataaggtttaaaatacctcttgcctattaattgcgactagaaaagtttgattctggtaagttatggggaagcaaaactagatttatagggagggttttatttgtttataagaaatcaactttaccacttttttcatctaccaaatgactcgaaggtgctgactacccgctcaccctctctgcctcatctggttatgtctttttctcttttttatgtgtacagtgttgtagcatagttatgatgagagcacagagagcccatttcctattttgactatcttcctttatttttctattcattctctcatgacatagcaaagtgcttaaattttttatattagctgcaagcccatttatcccttctcaagggattataggtggttttctaacaatcaaacatgatcccattccttttttacaaaaggaattttctttctttctttctttcttttatttatttattttttttgagatggagtttcacttttgtggcccaggctggagtgcaatggcacaattttggctcactgcaacctctccctcctgggttcaagcaattctcctgcctcagcctcccaaatagctgggattataggaatgcaccaccacacctggctaattttttttatttttggtagagacaagattttgccatgttggttaggctggtctcgaactcctgacctctggtgatccaccagccttggcctgccaaagtgctgggattacaggcatgagccactgcgcctggccaaaaagggaatttctaatacttgtggtgatgactctgttctgttggggcaccatacagtgaaaatgtccaaagatcctcatactacagcctaggatggtacatagaaaatttaaaatataggacgagattttttttggggggaagttttatgtaacttactctatacaggtgtgagatgatttttttgttgttgtttaaccattttttctttattgttggcttatatatatatacacatatgattttttattaatatactttaagttctgggatacatgtgcagaacctgcgggtttgttacataggtatacatgtcccatggtggtttgctgcacccatcaacccatcaacccatcatctacattaggtatttctcctaacactatccctccccttgcaccccaccccgacaggccccactgtgtgatatttccctccctgtgcccatatgttctcattgttcacctcccacttatgagtgagaacatgtggtgtttagttttctgttcctgtgttagtttgctgacaatgatggtttccagcttcatccatgtccctgcgaaggacatgaactcatccttttttatggatgcatagtattccatggtgtgtatgtgccacattttctttatcctacattgatgggcatttgggttggttccaagtctttgctattgtgaatagtgctgcagtaaacatgtgtgtgcatgtgtctttatagtagaatgatttataatcctttgggaatatacccagtaatgggattgctggatcaaatggtatttctagttctagatccttgaggaatcaccacactgtcttccacaatggttgaattagtttacagtcctaccaacagtgtaaaatcattcctatttctctacatcctctccagcacctgttgtttcctgactttttaatgattggcattctaactggtgtgaggtggtatctcactgtggttttgatttgcattcctctaatgaccagtgatgatgagcttttttcatatgtttgttggccacataaatgtcctcttttgaaaagtgtctgttcatatccttcacccactttttcatgggattgtgtttttttcttgtaaatttgtttaagttccttctagattctggatattagccctttgtcagatggatagattgcaaaaatcttctcccattctgtaggttgtcttttcactctgaggatagtttcttttgctgtacagaagctcttcagtttaattagatcccatttgtctattttggcttttgttgccattgcttttggtgttttagtcagaaactctttgcccatgccagtgtcctgaatgttatcgcctaggttttcttctagggtttttatggttttaggtcctatgtttaaatctttaatccatctggagtaaatttttgtataaggtgtaaggaagggatccagtttcagttttctgcatatgggtagccagttttcccaacaccatttattaaatagggacttctttccccactgcttgtttttgtcaggtttgtcaaagatcagatggttgtagaggtgtggtgttatttctgaggcctctgttctgttccattggtctatatatctgctttggtaccagtaccatgctgttttggttactgtagccttgtagcatagtttgaagtcaggtagtgtgatgcctccagctttgttctttttgcctaggattgtcttggctatacaggctcttttttggttccatatgaaatttaaaatagttttcttctaattctgtgaagaaagtcaatggtagcttgatgggaatagcattgaatctataaattactttgggcagtatggccatattcacgatattgattcttcctatccgtgagcatggaatgtttttccatttgtttgtgtcctttcttattttcttgagcagtggtttgtagttctccttgaagaggtccttcacatcccttgtaagttgtatttctaggtattttattctttttgtagcagttgtgaatgggagtttgctcatgatttgggtctctgtctattattggtgtatatgaatgcttatgattttgcacattgactttgtatcctgagactttgctgaagttgcttatcagcttaaggagtttttaggctgagacgatggggttttctaaatatacaatcatgtcatctgcaaacagagataatttgacttcctctgttcctatttgaataccctttatttctttctcttgcctgattgtcctggccagaacttccaatactgtgttgaataggagtggtgagagagggcatccttgaaaaataggacaagatttgtgaagcattgcattgacattcttttctacatatcattttttagcatttccgcaattttttattatgaatgttttcatacacgcagaaaaatagaacaagttgtacaataaacacctgtaactcaccattccgtttcaacaattgttaacattttgccatgtttctttgtctatatacatggatacacacacatatatgtatatattaccatgtgttcttcatcagtgaaaaaagaatatttaggaatccatggatttctgaggagatagatatttcagctatacctatattccccatcaaactgtttaaccacttattttggtgtcttggaaacaaatactgaaacatttgcattcagaatacagttgtgtttgactctatgcaaagatcagctcgtggtgatcagtgtctattttaagtaattggttatgtgtatttcattctgggaactcctgagtgtccttctaagaggacctgtggccaactttgaagacttgctgtccttgaaatacaggttgtatccctacttcgtaacttacaagccatgtgctctagcttgtaaataaagtaaattgagctaggtgattgaatgtttcccgtcacttctaaacgactgaaattctaagaaccaagttgaaagtttgcttacaaacctagctagaatgaagaacctttcagaaacattttacatatagattgaagtatgctgaaggtcagttaagttccacataatttcatggtcaatgagaagaaattctgaatctaggacttagcgtcagtaatagccatcaaaaagtacaaaaccttaatacccgagtttcctgaatatctgggtgcaaagtggtattacagatttgattcttttgcatacaaatatggctgaaaagttccaaatgcatatcagcttttttgttagactttggatatgtaagtgctttatttggttattactaaaatttcccagtgatttgtgtatttaactatttgtcttctgctttttttctccagtatactttatctatgctgatggaagagtgtgggtcaggaattactggtataaacagattaatatgtcccatcaaaagaaagaccattttagttatatcatgtatgaggtcaccttacatggtttgtgaagggttttcatgtttttctccttggatgaaatatatacttctgagaataatatgactacatcaaataaacaatgagctggctaggtgcagtggctcaagcctgtaatcccagcactttgggaggctgaggcaggcggatcacaaggtcaggagatcaagaccatcctggccaacacagtgaaaccctgtctctactaaaaatacaaaaaattagccgggcatggtggtgggcgcctgtagtcccagctactcgggaggctgaggcaggagaatggcatgaacccgggaggcagagcttgcagtgagccgagatcgcgccactgcactccagcctaggcgacaaagcgagactccatctcaaaaaaagaaaaaaatctattggtaaaaagcagctgacaatatcagcatttgtttattatcttggatttaatctgttgataacaaggtgaatatatctgtcccagcacacaaggataagagaaaacttcagtctgatattggctagtgaaaatttcagcaaaatccttttagtataacatctgccttaataaatggcattaaaagcggggaggtaaagaggatggaggcattctctcttccaaatgtaaatatactgctgcttacctgtcaatcttatgttttctaagttaattcttcctaaagttttttgtttttaactatttgatgagaagattacactgctacaggccaactaaatgggatgtattatttgaacctcttccattgtttttaaaatcattgtttgtgttgtaatcctttcaaagagccagccagtagctgctttcctgtttaaagagtaagctctttccattggcagatcaccttcatttaatcctctgaaagtgcacacttaattcttagcaacaatgcatttttagcaccaaggacatattaccaagaaaaactgaatatggcaaacaagtagaaaaatacgccttagttgtctaagaaggtaattgtgtcttgcttttggagtcttataaatatccctcttggtacaattagcctctgtaaatatttgaactcctttgtagttgaaacactctatatttcaacaggcagatgaaggacagtttttcaggttgattcttaatatagtagacttacattttattgttggccacactttaggattttattgcattaaaatgtatctgtgattgttaatataaaacttcaatcaacttgcttaaatattggaagctctcaggatgtggaataagcatggcattgtggagaatatcaccctggcccgagtcaagtgcacagtgctgcaaaagcattgtgctaattttagcttacaaagaggatgaagataaactgcctactgctagtttgccatatgctatcctggtgataatattcaagtgcaaaatattccatagagagccttattgtttcagcaagggaagcctggataagagttaagcaaatttctcctcagtaagtttataagaaataatgaagtaaaacaattctcaaatgcaggtagatgaaatctgctaaatttattttggctttattgactttcatgggagttgacagaattagttttggtttatatttgattcaattttatctatttttcacatgtaaatcttaaaaatcaatctgaataaatattgatctctttcagagaggcaaaaatatagtttggattgcataaaactgcttaaaagacagcatcccttgaagttcaataaaggaataaagcaatctgttcaactggttttaaaataacactttaaaaagcctttttaaaaatgaaaaagtcaaaatccattacatttccatatttggcaaattcagcgtctacagtttcaccgaagagtgtttgacctatttatttgtcactgagaccacttcacagtgaagggattgttagttcctgcaaaactgagaaaaatccaatgtgcatagcgcatttgcagatggaaacagactgtgtagccggatttggagggtgggttggctggaagctttgtgttaacaactggtgaaaagcttgacctttgcgtgacctaggtcaaacaaacccccaactcaagagctctcctttgacatggatacctgtttggggaaggggccaaaaaagggaatggagataaaattatgttatggacttgcaagcttactttttaaaaagttctagttaacttgactgtttggggacatggtggccattttagggtgttataaaggaccacaaatctgtttgtaagtgtcaaagggaaagggtgatagggagacctttctttttttctttctttcaatgattcaagccatgcataggttttttcccccattgcaatatgatctgggttgtgattcacagagttgaatgaatgggctgaactccactgatgaaaacatttgataatgtgtaaaataaaagccctggcaaggaggagatggcaaagcttccattgtttgtccccacactttgtttttataggggattctcacaggaacaaataaattggagtaaataaaagcaaaatagcactgttagtccatatcgggactttgcacatgctcacaagtcaactttggcaggaaactagcaaaggtctgttccctaccatttgcgttgcatctttatctctccggttcattgtttgccactgagtgcttaaacctcaacttcccaagtaaaagcttcctgttgcttgcttttaaatatagttttgttacaacaacaagaaaaaaaaaatggagaaatgtattaaggaagccaaccaatggaaaaaaaaaagagaataaaacaggcctagtccaatgcaactacaaaccttcagggctcaaagcacacactgctgggtactcttgatgcaataatagtccccttttaggtataaacctataggaaccatctctatgcccccacaataggtcaaaagtgaagcagaaccatgaaaatgtccagtgtttctcacattggccctttggctgtatttggtttcacttagttttcactttgcagtgttgtctgtggatggaattttctgccctttcaattgcaggttaaaggaaatcccattctttattaattgtgctcttgctttgagatcctttaatgtcagtatatctgaaaaatggtatccattcctatagaaaatatggttcttattccaccttaatgggtgggggctactctgatacttcctgcaatttcagaggaaagtgcagcagttttctcaggccttggatataaacaacattgtttacgctgtttccactctcttcatcctctgtttgtacaggccctaaaacaagtgggtctgttttgcatttaaaaaaattagtgtatgttttcagaatcaatctatcaagtgaggccaagaaatgccataagaacacatgggtgggggttagcaaattctggctttcaaaactgacttgacagccatttaaaatgctggctctacattcacagagtgtgtggggcttcgtacactcccttaattccacaatggagacagttgatttgggtccctcttccctgcttattgcatgatataaggacagctgcacccagaaaattattagcaccgtccaaatgattcttttcaaagggaacttctgttgtgctaaaatacacacagcattgtgaaagtacagtttattgtagatatttaataaggaatctgttatcaatcactggtagtacagggaattaaaatttatggaacagtagctaattaaaacaggaaaagtgtgagcgttcacttgtgtgtgtgtgtgtgtgtgtctgcttgcatgtgtgggtgtgagcgaggaattcctagtggaggggggctagagggggttcctctattacatgcatactggagagtcttcatgaacacccttgcagtcctacaagaacagatgagacagacagctgaccaggcagccatgaacctttccgtctgtgtgaactgtcaccgtgcttatagacacaactccacatgttccgtagaagttggaaaatagaatgtgcctgcagattgtttgggcctgtgagtacaggattcaaacctccttagcagattgctagattgagactctgggtggatgctgaggtctcaagtctcagttcagcttggtttgctgcactgaactcagcacacacatggtcgataactctttcacttggctgccctctctaccctgcactggagaaactgcctcctgggcaactaagctaagaaagctgttgctctcatctggctggtttcagaaggagaaggatgtcaggagtatgcaaaagcttgtttctttgtgcaagtcttcagctgattctgagttgagtattcagcttgttctttcttggagactcctacagcagaggcccctgagaagtccttggttgtttgtgcagatctggctgttccattctgatgcacaggtattccacatgggtgctaggaaaaagtgtggttacaaagtggctctgggtcatttggaataaatcagttggacaactctttttttgttgttttattcaggacactggaagtttgtctcattgctttaatgagagttgcatcttcttagttatgctgttgaacacatctggggcctgttactgcacccttactcttagataaattgtagcacccatgcccacacaggtagacctcctaccttcataaagggaagtcagaggaagctgataccccactcaggtggcctttaaatttgaggggcggactttgggaccatgttgcttggcaacaaataacatatagcaaaaacaaacacataaagatatgacccatgatattcaaactttaaattctataacactagtttgcttaagatatcagctgctatacggtaaagtttttaaggcagctgtaatttgcggaaatgctggcatttactttttccatagtcttatcttgaaggcataaattggaactaaatctgggttcaagccccttctcatttctctggtactcttccagtaatatagttaacatttggataaggacgcatattatgattctatctatagttatttaccctctcccagtttaacatgaagccttgctagcttcctaactataatatttccaccttattttttagttatgtgttggaccctgagttgtcttaaggactgaggaatttaagactcattaatatttttattagtgttatttccttataaatgaattatccctttcagctaactatatctttagaaaatgatcttggttttcttccatcatcatatcaataataataaaattagctaagaagttgtaattactcttcctatattctctgtgatgtgcttaaatagaatatccacttattatgatgttaatttccatttattacaaatgagcaggaacaaaatgttcctaactgtctgactccaccttttcctgcacattatgactcccctataagtaaaccacacagcccactatcgtatgttctctaatgtactttctaataaataaagccagcttaaaaaaagatgttattcattacatgtaaaatgatcatttgaattgcttttactctgagtgacccatgcatcacttaatcagacccatttaaacagagagagaaagagaatatgagaactgagtgatctgtctgtatttcatttggtggcaatatgggcagaatttagtctaagaatgattctttagccatctaattgtttcctgaaaaaaaagtcttatcttcagcatatataggtggtggtatgatgggctgtatagaaatataagtttaatctgactagtgaagatcatacttcatcagttcacttgtgacaaaaaaagagtggcatgatctcaaagttgttctcagccttctcactcctttcaatcagttgaatcaacaaatcgatcacttgttccatatgtaatagctctccccgtgtagaaatgaagagttagcaaacctctagaatgcaagaccaaattctttgttaaagttttcttataatgaattctgtctattccgcatatatggaaaaactcagggtaagacacttaactttttttctgtagagaaacgaaagctgtaaaggcaaaggtatttttctactgcctccccttcccacaaaccactgtattactctaaagaaatttattatctcaatctgctattcatctaacaaactccaactgcctgctagtaccaggccctgaggaaatacaatactgaacaagactcatttactatgctcaaagagcttatagtctggtaggaatgctgcatataaacaggccgtgtaaaggtggtgtaatatcagctataattcgcacatggaaaatgcacctacctctgtattggaggatcccggaggaagttctcccatagtcagggaatgttttacagtacttcatgttttcccaagaactttcacatatatgatctcgcttgttcctcataacacccctttgaattagccagttccttatcaccatcacgtctttgtgggtagaagaaggaaggctcagcaaattgagtcacttcatgaagagtacccagaccgacctgagactgaggacccaggttctgaccttaaggttagtcatgaatgcatatgtttggggaagtaggggaacttggaaagacgagaaatagtggcccggtgttgcgaaattactgtttgaccatctggaaatttgcccctggttcacagccaggtttcagaagacatggaacaatcattccacattcacatagcctaagcacagattcagaatgcccactttccctcttctgatcttttttttttttttttttttttttttttaaactaaggaaaagaagcaagtctagaagacaggcaattagcatgatcactcaggccagtttttataattttggttttcatccaaactagtcacatttcatacttttaaagtttttaggcttttctgctggagatcatcttcctcacactgtgattcttaaaggttatgtattttttttaccctgatcatacttacgtcttttgacaagagagaagacggacatccagctttgggtctgcagtgatccatcattcaacttccggtctttttcatcatattagattgtgctagtacttgctctttccttaagctatctccattacaggagggggaacttattgccccaaatataacagagatgcctgacttatggagagttacttcagagatgtttctggaagaaagagttctttgggtataaatgagaaacaaggggacagttgtgtttcccacaccatattttggtatctagcatgtaaattatactctcatagaccacctggatctgaatggctgcgatctggggccctttcccagttttgcatggcagatgaggaaaatgcaggaaatgctgaggctttgaagatgtgctagaacctcagcaacacagagccactgagcagcaagaggaggctgagacagggcagaaacacccccactgttaagagtgatgagggtttggagcacctaatctggatctagaaattggccgctgtgcaggcagctgggtggttcaagatctagcacccaaagagtgtagcaagttcaggcctgggcatttcggcataaccagtctggtaggtggggccagcaagaaggaattctaggccacaggccaattcagaagtcaggcaggcctacgattggtattcggagatctgtttgggaagagatgatcatccctccagctggcagcacaggagagcagtattcagttctggggaaagaaagggctgggccaggggaggggaagagagattcccagccagctgatgttggagagaagactagatccagaagaggaccaagagcagagaaggaagtaattccttggtttctgtgacttctttctcacccaagatagatttcaggttagcacactgtgacgtcatcactgaaaacctctcccctcccctcgggcgtggggggcagtgtgtgactgttctttactccaggctggtgattcaggaggcagccttgtttgtgtttccgtatgcctcctgcaggggagacttgcttttctttgatacataaatggtgagtgaaaagtaactctcctgtgagcttggtctcttttttgctcttctctggtcgagcagcctgaccaggcctggtcagtgtgaattgcccaatttcatagtgtgcacgggggtctcaggagagggcaattgcctcataacttttctattagcagaatttcagattcctgacgtggagcgatacttgaaaaccatttgtgtgatgctgggaaatgtttgctttgtccttctttatgtcctaggcatgggcatttttgtcatttcactggggactacttgtaggctctgaaagcaggaaggggcttctctcaggccatgccctagctaagcgaggattcccctctgtatttggatagctggttgctcaagttccaacccttacatgaggtttttctgtatgattttctcctttatgttttggaggcacactcgggaacgttctcgtttttttttgtttgttttgcaatgtggctatttttgactttacaaagcattggaactggcatcctcccattcttgtgaactttctctggatctgtaaatacttggtatttgttttcttccttgtacatttcaggggtggtttttatatttaactttgactaagatacactcacatgctactctgagagtacatgcttcggtgtctcttttttctttgccttcagtaaaaaggataagattcagggaaggtttatgaactcactttatgggtcagacatgtgctggctgtggagagcatacagcaataagaaaggactgtctctaccctcagatacctttctagaggttaaagaaatgcaccttgatcattatcattgtctctaatggagtaaatggaaagggtagtggtagaatggttaggagtttagcctcaagtcagatctgggttgaatccacaaggatttgtattccttatctgtatagcagcctatttccttatctgtgcattagggacattcaaaggattaaatgagatacttcagaaaagcaaggattgtgagaattaattaatcaaagatcaatgccaatctcagtttctggtatctagtaagtgctcaataaatgttagtttttagtactgtttctattattcttattgtctagagaagagatggaaagttagtcctgtttttcggtagtgtgtctcacttttcctggatctgaaagatactttcttaaatgatataacttttttccttatcagtaaaacaaaaatctttgctgttaaaaactgctgcagaggcttggcatggtggctcatgcctgtaattccagcactttaggaggctgagacaggagatttgcttaagcttaggacttcgagagcagcccaggcaacatgtgagactccatctctaaaataagatgaataacataaaaaattaaaactgctgcagaaatattatttagaaggcagagggtgagttatcataaattaacctattttgtgtgggaaatgaaaacttgtactagtaaaaattgctttccaatgtatcctcatccaccaattggctgccagcttaatgtgatgggactatttaggcagcactgccacccattgttactgtgaagcacacttgcaaagttccaagtcactttacaaggctttttttggggggctgtgggggaagaaaaagaaaacaatagaaaaaaaatggtatgccatgttaggagagtgggtatagatattttggaaaagacttctaggaatgggaatgggatggggagaggtgacaagagtagcaatggtcattttggagctttgagtgggggattcagattaatgttcccctgttcaaatggtgtactcactagcaaaacaaacataagaactcacattcgctgagctaagccactgctgccaaacgatgcgcgaaacatttttatatagctgattttatttcatctgccccacaactctaaggtgtaagtactattactaggttcattgtttccagaggggtgaaacggggctttggagaggttaaataacttgcccagggtcacacagctattaagtggtaaagctgggatttacatgagcccagacaaagaacccaagaagctaagctattctcttgtaatacctccaacataggaggcaagaagtgaggtattatacaggttgaggagataaaggggagagaggcctgcagtgctaacaggaggagctgggattcatcctggcttgttctgataggtcagttagtcttagagatacccatgaggtcacctactcaaaatggggctcagagtagccttgtcccattcttgtccagtgggcgcagctacagtcttcctggcctggagtgactggaggctgtccccacgtcccacttcagtgaggcattcatgtgcacccaacacactttctagctttatttgcctggaggggaagattctccagaaccttgttaagatgcacagtgtggtcctcggactggcagtgtggcctcggcagtccctgggagcttgttaggaatgcagaatctcaagctcctccctactgaatctaaagctgcattttaacaagatcccagctgtttcgtatgcacatgaaagtttgagcagcactgctctagaaagttacttttatctttactgtgcccaccaaagtaatcaaactttgtgaagtacgattattttcaaacaagcctacgtccctgactaaccgagtggaaggtgtgagtggcactacaaattcacaaaagaactgtagcctcagataatcaaaggagagaaggtcagatgcaatcactgatgcatgctagtaattctcaaaccttcgttttcagaaacgattggattttcagatagatttgcagtaagagaataacaagtctttatttttttcatcccaacttctttcttgcacatttttcttctagctatatttaatatctgttctccccacacacttgctaatctacatttcacaatcttcttccacttcactttgtctgcaaagaaatctacctggacagaatagcatctctttttttccccctgacccttggcatttcctctccctccaacttctgcctgatcctaggatggactctctcatccctcattctctatcattagctctcaggctgcccttcctgcactttaccttcccccacaccttcttacaggaaagcagaatagaaaggcatcagtgagggatgaacaggagagtgccttgagagaagattcccaggaagacagggagagccagacagtggactggttgcaacccatgtagccgaatcatagtgctcattgctgtggaggctctggtctgtctagccacacagaccagtgaagtgagggtacataggttaaaaaaaaaaaaaaaaagcttctacagaatacagacatgttatcctggtgtgtcaatcaggaaagatgtggtccggatgaacagaattgtacctttttaaatattataacttttagggacattcttgatgaaaatgtttccactctatacataactctctcatatctgattataacacttaaaaaataatttaaagtcagtggacatatgagtttatgcactgtgctatatatttccttatttacacagcctgttaagcatttatatggctttttttcctatgctaaaagggccttgtgtgcaatgccttttaggttcttgtcttttgcctctttatcatcttatacttttacaaagctctcagcctacaaactatgaggccagaagctagatgagcaaacttgagaactgcatctaaattaaatgtaactgttcttcaattgagggtcttatgatcatttctctgtagaaagtatacgagctttaccacatataatctatgattgtaatctattggttcttaagcttggctgtatgttataatcaacttggagctttaacagtcactaatgctgaaatcttaccccacctcccaaactgatttaattggtcttgagtgcagtgtaggcatcaggatttgtaaaagctaccacatgatttaaatgtagcccatgttgaaaagcactccttctaatctggatgtcagaaagctttttaaatttttatttatttatttattttttattgagatggagtctcgctctgttacccaggctggagtgcagtggctcgatctccacttgctgcaagctccgcctctcaggttcaagggattctcctgcctcagcctcccgagtagctgggattacaggcatgcatcaccacgtccagctaagttttgtatttttagtagaggcagagtttcaccatcttggccaggctggtctagaactcctgacctcaagtgatctgctcgcctcagcctccaaaagtgctgggattacaggcatgagccaccgtgcccggccagcttttttatttttcaaatcctgcttttcaagtgtattttatttaattgagtttgttgaaaaagtgacctcagataaataaatgctatcttgttgtgtaaaagtgtttgtatatacacacatatatacatgcatagcaaatacatatgcagagtaatatagaagtttaaaactaaattacatagcaagcttttgcagatatcacaaaaataaatgttgtctttgtgtgtttgtgtgtgtatttgtgtttgtgtgagcatatgtgtgtgtatgtgtgtctgcctgtctgtgagatcctatatggggtactttttttcctaaaatgatctatttttgtggttatgtaggagtttatgaccattcattaatagagcatttatatgtattttggggagcatattatgagtaatgaactagcattattaaaataattttaaaaaataggcaaggtactagttctgaaaattctttctaagctgttgattcaaaataaaagtttatgacttttgtactgttttacctttgcacttgaaagtgcaaatataaaaataaagaaaatactctttatttcctgagaaaaagattgggggatttccattttattttaccaataatgtaaatgtatagatttcagtatattttgcagtgtactcacatcctgaagtttctaagactccattaaaaagttatgctgtttttgcagggattttttcagggcatttagttgtaaaaaaaaaatgctgaatagatgaaaaatgagtaaaatctgtgttttttttttctttcctattcatcattgctgtttgtcctctgtgtgtaggcaaccaatttgctgttgttcccctgaggggaattcaagtcaaaaagtaatattgaattactaggaaaaggtattcctatctcaaaagaacaaagtaaaatgattcagaaaaaaaaaaaaacttggaaaatttatccaatttcctggtgtatgttgtatgtgtccatggtactttacttctatgaacacttacataaaataaatcttaagtaaactataaatctgaacactgacaaactccaacggacaattcttaatttttatgaatgtagaaagtctgctatcttcctttaatcccatccaatgcacattcacattttgtcaatttttttttttcattctatgaaaacctagtaaatattttcattctgggtctcagttatttgatttctttccatgtttttcacccagttatgttttatacattatttatgttgaaagtgaagtgatagaagcttaattgaatgaattatttatagtaaagaagttattccacatttatttcaacagggtggaaatccctgacttataaatactcaaattgtgaatgacctagatatacatacagatgtttatatacatacagcctagatctcttacttgtatctcattgtgttacatccacagaactcatttactgtcactgcaattcctgtggaaaaacttgacgtgttcagaaacacatggcttcccaaatataggcaggggtaaatggcagggattgtgaggaaacagaggggaatggaggggaggcagaatataatgatcagtttggaaactgaccatgaactcttttataagaatggcatctgttgattaaaaaaacaaatcccaataggagctgcatgttttaaaaacctttacttattactttacctaaaattctgccatttaaagattcactcatttgcaataacagatctttcaaagatgccaacatttctgggaaggtgaggaggccatcagtcatttcacccccatccaaattagttctttgagattgcttttacctgaagtctggcttatatcaacaagcctgaaacgatggacattttgattgttgggagacgaagagggtcagttcagagcaggagaagaatgggtccaggtgaagtaaccacagtgggagggcaagagcctcttcaaagcactggagcatgtggaaactctaggggagggatactatgcagtggaaaaaagatacagaaagggaggtgctcagggcaattgcacatagtttaacatttttctagactggctctgtgcacaggaatatgagaagaaactcttcttcccccttattcttatactttcttcctgcacccagggctcagacatcagttggagctttattcacttaataattagttttactttgctgagctggctttgggacctgacagcatccacaactggcttctatgcaaaaatacatttgaaatgtccaagaggacaacttatcaattcatgtcagaatgtaatctgtgcctaaattggggtctacctgaatggactcattgcttttccattgtcccccattctttaatcttcatgatttaatcaggtgatttgttaggttgaactagaaagagactgggaaatgaggcattgtttgacaaaatttacatcatattagggcacgcaatggagaggacactcatgaccccatagatacttatgactcactaataggtcatgactctcagaaccctagggatgaacacccacaacctgctcctcttacctctccagcctcatcttgttttgctttcccaggttccagttcctccagccacacaaggccttggtatatgctgttcctttggcctggaatgctcgcctctgcccttttaggctgcccactacacgtagttgacttttctccgccctttagattttggctcaagatcactccagcctaagtgaagtcttcttgtttcacacactcatagatgtgtacttttttccaattaagagcttcagtttgcagttgtacatttattactgtaattattttgtttaactttagtgccttctaactggaaggcttgatagaaacagaaactgctgattttgttcaccatttatgtctccaagtgttggcctagtgtttgggacatcaataggcttttgttaaatgaatgaacgaataacaagaatgactttatgcaaaagatggttacatatatggggcattttttttttttttttttttttttgagacggggtctagctctgtcgcccaggctggagtgcaatggcgcgatcttggctcactgcaagctctgcctcccgggttcgcgccattctcctgcctcatcctcccaagtagctgggactacactcacctgccaccatgcctggctaatttttttgtatttttggaaaaaacggtgtttcaccttgttagccaggatggtctcgatctcctgacctcatgatccacctgcctcggcctcccaaagagctgggattacaagtgtgagccaccgcgcccagccctatgaggcatatttttaaatgctacattttaccctttagcggaggagggggagcagtaaattcacaggaagaagtattttctccaggctctgactctccatgtcttcctttaggtttctgtgatgtcaggagtccactaaagggcagaaaaaggctgtgagctcattccacactggttaacaattaacaatttctttcttttttttgagatggagtcttgctctgtcacccaggctagagtgcagtgacgcgacctcagctcactgcagcctccgcctcctgggttcaagcgattctcctgcctcagcctcccgagtagctgggattacaggtgtgcatcactgcgcctggccaatttttgtatttttttagtggagatgggctttcactatgttgggcaggctgctcttgaactcctgacatcaggtgatccacccgcctcggtctcccaaagtgctgggattatagttaatagccactgtgcccggcctattaacaatttcttgtcaccatttaagaaacctaaattctgctagaaaggaaaagcttgatggcagatctctgtggagccaactttaggaagcttattgagccatttcttgttataagtgccaataatacgtttatttaaagtttgtgtattcttaatctacagccccaccattcttagctccatcttttccgtcattgccactgctatgtctgtaccacagggcacttgttaagcctcttctagaacttagctctgccacagtaggttcccacgtctaactctttattttggtttccaaaggaaccgcttcaaattttccaggaaagctgtgggtggtaaaatatatgagaatatgccttcttttgttgttttcctttgattaactgggaatcactttgcgctaagaacaaggaagccttaaatatctatggataagagaagatacaaaagtgaggccaaggagttaacagaatcctaattaaagataaacttggatcattacctatttgtatattggctgcagagttgtatacttcatatacatatgaagtatagtgtgtttctcttgaaaatgtgtaataagacctaaggggttggccagacacagggcctaagacagataatccaagcacttggaaggctgaggcaggaggttgcttgaggccaggagtttgagaccagcctgggaaacatagtgagacccctgtctctaccaaaaattagctggtgtggtgccatgcacctgtagtcctagctactctagaggctgaggcatgaagatcccttgagcccaggagtttgaggttacagtgaactatgatcatgccactacagtacagtatgggtaacagagtgaaacactgtctcttaaaaaaggaaaaaagaaaagacttaaggggctgtattatgtcttcagggaaaagctgatacgattacttgaaaaaaaatcaaggaaagccagagttctagagttttatatatttagcatcagatatttgatgtttaaaatgccggcctgaagtttgagctgaggatcaaattgtctgcttagaaacaactgagtttctcagctatggtaaacctgggaaatgtgcaaaggggggaatataattaattaattcactgggaaaaaatgcagaaagaaacaacctttgctcagaaaagatgcacaaacagcaagaaattttagttaagtaaatgattttaaattataattgcagaaagtagtgatatatttctgaaaggctatggtagacatcataaagaattctgataccttaactcttagtccatcttttgtgcaagatgatcttaaaggtttagaagaaatatcccagctctgagaaatgtatttcttccatgttttcttatagttttttattgattttcattggtgaatatttttcaagagtttaatttagatatgtctcaaaaagaaatgtaagggatgaaaatgcaaactatggttttcttcctacagcgaaaaagatacattcatttattcattttataagcgatgaacaagtttgtacactgtacactggagtaacgccaggatttgagagcagagaggtgcatgacttggttcctgccttctcagaccctgtagtcaaatcagggaaagagatatggaaataaacagttttagcagagtgttaggatggaggaatgccagtaaaagaaaaatcacctggttggtgggtgggattggtgtgtcactaaatcagctacagtccagcaaatacctcttagaggagatggccattgagctgagctgtaaaggtcaccaggaagtttgtcatgttgttgggggaagcaagcgaagactgctgcaaggaatgggactaggataaggaaatgcaaagaggtagagagagcagtgcatggtgccatgagaacttcaagtctgctcaggaccggaggtggagctgtgagtgccagtgcgtatggggacttggcaaatactaggctggaaaaacacccaggagagagatcgtgaaaggccttccacgccaggctaagaagtataacctttattctgaaggcaaagggtagccaccaaaggattttaagtaccagggtgatatgatcagatatatgctttagaaaaatcattctggcagctattatatattctaaatgaagataaaacatctccttaagacctctgaagtattccagctggttcctgaagaagggatgtctataattcttgccatatatcctcttaacataccatagaaacattatcccacctgaattctggctaactagacttaaccatgacctggagaaataggtttggggtagttgttacatttttcctaataaccctggacatcaggcacacccagagaggccactgtaaaggaaacccagcctttccatattgatggggtgtttgtgtcagcagccactagcaaggcaggatgttctacacacttttcaaggggtgagatgccattttccctcatgtagatactctatgggagaaacatgcaagagaaaaaagaaaccttcatgttgggctttctttttgctgacaataagatcatgcaacaatatcctatttgcatgaaaatgtagccatcttacaacaggaactatacattcataagcatacttttgaatggaccatttggaaaactttttaggcacaatcgaatttatgcagtatcaagagatacaactataaatggcctgatttttgagtctaggtacgttttgggattaaacactgttcctaaacactggaagaggagaaaagtaaagtttaaagagaggatatggcccaaaactgtggagtctcaatacaaaattgtaaatgaaaatgatcttgaagtcactgtggcttccagcttggcttctagaaaaacaagggggtccacaaccttacacgttcatttgccctggcagttgaaagttcatctccttaattaggagttttgcttctatgacataaagagccctctaatagaaaacctattttatttttacctgatggcccactgacacaggaagttctgatcagttgtgatgtaaatcttaggagctgttttgggttttgttgttgcttcactctgagtaggtttaggggaacagcagtcctgagaggacaggagttagtagggagagaaaaaaaatggaagcaaggctttgacctgccggagaggagcccctgctgacacggtcagtctgacccattgaatggcctgaatacgataaatgccgctttatcctgccttgaaaggcacgagatagcacagtctaaatgcctgggcatgcttaaataggcgactcgggatgtttgagttgagagtgtttgaaatctgagctctctgacagcctgggagctgccacaggtcacctgccttgctccgtagggacaggcccaggtctcacaagaaattgtccgtagacgaattgtagtacaaattcctttctttgttggttggcctctttcactagaccatggcctataaaattttgtaaaaacaattcttaaatattatttgaaagggcaaatggcccacgctgaaaggtttgacagtttgacatatagtgcatggttttgatagctcggaaactgaaaagtgtggccaagattctccccctgctcgttagaaacctggtgtttttttaaatagtgtcttgttgctgtgcagagttcctctgctccttgaaatctgacaggcaatgagtctgctccagtgatcttaaatccttttagactaatttgtgagagagtagcaaagtactgtagctagcacctttgagtccagcatccaagaggcacagaaccaggtattgccaattaaggagccattcggataatcgtatcaaagcagattgctttagagtcttataatgcccgagcctgtgcctagagagagaggaacccagagtttcacttcaatgagggggaaaaaagagactggagtggcccggtctcatcagagcccaggaagttgcagggagaggatttctgcattagaatgttgcatatgtgcggcctgtgtgtgcgcagccccggccgctgcctctgcatagccaaaggccattttcaggagcctctggcccctcagtcactggcctgctagttaattgccacacggacttcatgacacatgggcagataatatgacattttcagtttctgtcactagcaaacgccacaacgttgcttgcactagttgctaagaagctgtcagaaaccattagcggttggctaaagtcgccctatggcatttcctcatagcatcagcaaaacgagcataaatcacccactggagcctactgctatcctaatgaggctgtaagcttgtttatggactagcatcatttttatgattatttccaccttttcagtttgccttcatttggcggcaggagaagtcagctccaggaatgaagtcactgctgacattttacaaatgtggttcagagctgctgcctgctgccgtgtggtcggccggcggttctccaagtttgtttagtgatctcaaaagtaaaaaaggaaagaaattctcgagagaccacattgaggtgactatatcaaattgcggagtgaatggaaatgctaaaggtacaattgaccatttagactttcctctgaggttgagacatttccagatcaattttcaattttagaaagtggaagaggttaaacaatttattaaaatctatgaaagtgtttgcttttagaatagtctgttttattatgctcttctccttccccatcttctccatttccctaacttgtgtcggaaaggagcagggtttattgttttaggcttttctgaacatgcaccagtatttacactggattgaaagcatttgcttccaatgaaaatcttgtcttagattacaacccagcagtgtaatttccctcccagatgggagtaaagtagctgtatttgcctaaaaacagtaggaagaacaaactgtgcattaagccaaggctgtttttggcttgagctaatgatgtaatagaaaccttttattcaggagaggtcactgccagggactgaagggggtgatctggctcctgcttgaaaggtttctccattgtatctacataagtcttcacttaaaaaattctgttcctaatgcttctgctttcatacagcagaaataaacaggaaaggttctggtgagtgttacacatggaatgcagaaagccttcctctcctaatggagtatataattcaggtgccctcaaggcacgctttcaggaattcttttgcctgaggtaatgggaagctaaggttgctttaaggccttgattatctattgatgcacaaagctggaaaaaagtcatctctgctggattatagtagatatttccataaattatcaatgaattctcttctaggcaggcactatgcattgcttgctaaattaatctgaaggggtttgaggtggataaaaaggctattttttttaaaggtggaaaataatcatggggaggtggtgaaaacagtattgtaaggttataagcttttcatttttaatcaatgatcaggtcgtatgtgtcttttccttggttaccttttgcatattgaaagtggattagcccattgaaaatttaaatgctgttgagttgttttcttttctcatgtttctttaatgaattgttattttatatggtaaactgcttctctgaataaaaaggctgtttaaatactggactttcaaagaatttattaggcaaatccaaggggacttctcataaaatacttggttatgcaaataaagagtttggttgggtggaaggagtgctgatttacagatgtaggggtctggaacagcacagaccccagtagttccatgccagggtacatgaccttggcccagtcagagaacatagcattttcttcactgatacaacaatggctttggagtggtgggttttcatgatcttttccaagtgaacacaagatatgtttctgttaaacttttaatgaaacagatagattttaaatataataaaattacagatttttaatgaataaaagtttagaatcagaaaagttttgcaaaagttttgcatttatagcatattctgtaataatagtagaaatgttggaattagtttgttcctcacccaacaaactttctaaacttcatctcagtacaagttaaggcaattgaaaaaaaaaaattgaggaatgcttttcttttctttttttcacaggagagagatgggtctgctgagggagctgttaaaaacagttgattagttgcaacatacctactatagattagacagaaataactgaaattgaactagagaattatttttttatgtaggacctaataacagaaatgagaaatacagaaattcatgaagccatggaaatgaacctgaggctatgtgcaggaaacttgtcttaccaaagtttcaggttctttgggtcgtgtagttggctctccagtggcttatttaacccagtgaatgtgctcttgggtgtattttttttttacctcatttctaagcctggctgctatagctcttccgtttgggcccagatcaacctgtcggtttctaagagaacggttgaccgagctaagctactttttagtgtaatgggtcttgtcctttgttgttttcctttttgactttgatgccaaggcaaaaaatacctactttccatttgtaccttgtaacttattttgaacagttatatgggttaattttttattttttcttattaaacatggcattttaaaaaagaaatactaactttttaaatttcattatgtcacagagccaaaatattttctagaataaagagtgtaaatgttataataaaaatcaatagaaaaataggatccaatatagaggaatatgttagcaggtgatttttcagtgtgaaaaatgctaggtttacctagcatgaattttagaaactgcctgaattattagtgtaatacaattctaatttactattaatttagcattaccttatttgatttacacagtaattgttttttaattaagaaactatgtcaggggtttttcctttactaaacttgatgctttctctctattacaagaaaaattatattttatttgaagcattcctatgtcaaactgcttatatgatggattacctacatttccccatcctagtttaactagtcttaagatagatcacttgtggaaatagttgatatcttaaatgaatcttctcacaagtcaatgtcaatgactgtgggatttgaatgcccaggcagccatagcgccacagctaatgactgccaccatgtttaactccccggtaggagttacacttaacctgtctcagctatacatattggaataattaccatagcaacaaagccacaaggggattggatatttccctccattccctttgacttttggcaatgttctttggaagaagttctttagacctgactgctcttgagcctaggccttgttctttctctgtcttggaaaacaaaacacaacaaaaaaacagtaccaaagaaactattaatcatttaaatttgctcttttggttttgtttatatccaaaggcattctatttgaataaagcatgtcaaggtagcatcagtcaaaatttgattcgctatgtttgcaggtgatggcttggacaacagtgtagcttcccccagcacaggtgacgatgatgaccctgataaggacaaaaagcgtcacaaaaagcgtggcatctttcccaaagtagccacaaatatcatgagggcgtggctgttccagcatctaacagtaagtggattctaaatgacatatataaactaaatatggacaatgaaccagtttttatacaaaaaaatgagaaaaaagtgatccctctggacttgaaatatttaataaataactgtgttcccacagtttttgcaaaagtattagcacttatttcttagatagataccccaaatgagaaattttatttaaaattcacgattgcgattttgttaactttcataagttaaaagatttaggtgttcatgtgcacttgtgattttaagtatgtgttttaatgatgttgcttttctaagtgtgacccttaagtgctcagaaccatctcctactaagaagaaagttagacaaaccctagagagagacttaatatcttctgatgctttagtggatctttacaacaaatggtccacaaaaatttaaatcatgttgcaatggcaagatgatcacataatttgcttttaagtggtttgaatgcactggcttccattacaaaacattcatgtaagtcagagctccacagtgaaagttgtccctgtatttagaactgtaaaggaaaacagcaatatagagtcagctcttcctgtgtagtcccttgtgacttttcaagcagagtaacagtttatattgtctgtgccagtattgctgttttcactgcaggaattctcctggagatgtgagaaactggagatttggggctttatgccactgggggatttgttttgtttggttattgttctgaatgaatttcatgttcaaaatatttataataataatattttggtggatatttttgtaagtgcataccaatttaaagaagaagatacaatgaagatttgtggataaaataatattttaaaaatcaacaaaattgttgaccagaggaatttcaatattagagacaaaggatgaatttagacaggttgtagcaaagttacatagatggataaatgttaaaaactcttgagggttgttttttaatatcaggagaaaatattttgtgttactatttttgtcttagcttgcttttcctaaagtcaatttttccttaaatattaaagttaatcttgcattgtcataaacacttgcagagcctgtttaccttcatacctgggcccacattcaaagccatgttcctcagtgagttttacgggtacagagatacaaactcaggggatgtctgcaggtcatgttagttctgctcctctggatagaggctgtgcctctaataatactcaagggtataaattaatccagattttccagcatcagtgaataagataaaagctgagagcagcaggaatagctaaaaaaaaaaaaaagtttcctcccttctcttcttcccataataattccaaacagtatctagactacactacagtttttgagtaaacttcagggcttggctatgctggaaattagttggagatttagattatttgagctgttttgattttaacatcatattaggtttacctagaatctgattcaggcaccactacttatctgacacctgttgcatgtgtgtagatatttcaatatctgactcctgcaaattccccactgaggattatcaatcactaatgaactaggggaaagaggactcaggtcttgagggcatatcatgaaaaacgaatgatatgacatttagataagaagtggcaattggtcaaaggtgtggtacaatgatgctgatgcaatgatgctaatattttatctccagaaataaccagctaactcgctgtgtggaatgagttggtgtggtggataaaatcaggttggccctgaagtcacaatcaaataatttctatttcctatagactaacagaaacaatgaatagatttcttcagcccccatctcaatctgcaaaggagttttggctttacttgaagctgaggtgcccctgaataaaatataatcaaatattggttcagacagaatcaggagagagagaagcaagctattttatgcagccactagttttcctgtttttctaggttgtacccttgtgaagacccttgcatagagctacattatcttcttgaaacaaacaaacaaacaaaaaacccaaataaactttctaacagcccgcatgattttacatgcattgcattgcttatatggactatgtgtttgttactggggcaattgtaatcgaaattattcatgaactgcctgatttcttgagacctaaataatagtcttcagttttgaggtctttgctggcctgtgccactgccctggaaggggaagcccattcatccatgtttccccagctttctgtgaatgtttataggtgttaccttgtggtttccattggatatttctacctccattacccactccaatgccatctgctcatacagaaatattgattaatgataatggtctgtagatagctaattgttcttataacatcatctgaagagcaaagttaagagatatgtttaaatttttcatcttttccttcccccaatgaaaaagattccttcccacttctctaattgcaagagcaaatagacctccagctataaggaacacccgttacccttgttttgtaatccttcttgaaggaatgcatggactgcttaggtaatatttatagtaaggagctaattttaataaattctattttaaaaacctatagaatctaaagagagttttgttgttgtttgtctaaatgtaagtaaccactgacatctcagtactaattctttagtgactttatttcaagttctgggaggtcttcagggatgcacaattcattaggaagactgtacaaattttaaatggtcacgtcattgctatgtgattaacgcaacttatctaggaaatcctttctgaattcttgctagatgtaaaaaagccattgaaattctggctaattaaaacaatagcaataccaatttattagtaaattgtaaactagtctttttttaaatgtcaaaagacatattcgaaaacctctcacaccttttaaaagcaaattgctatttctttttaaaataaatggatcaatcctttcactgggtttattcagtgaaaaaatctgcccttgaaaaggctttaaagcatttctgtgttagaagagtagaataggccctgaattaaaaaccaaaacaaaacaaaaaccaactttctgaatttgtaccccagctacatgagaagaaaaatgtggcagtctgtagttatccacaggtagacttaatcagtagcacattttactactccaaagagagaactaaagcctcactcttgggctcacagtctctagcaagctaaactggacatacttgtatataatgaaaataataaaagaaaaaggaaacgagttttaaactttggtgattatggggtaagaagaaatttcagtgaggtaaattcccagcttatacttagttgagcatttggcagagtcgataagtagagagggtctcttaaaagaaactattccctggaattgaaaggaatgactgacatgatttaaataataagagagaattagaaagaaaataaaggcatttattaataggaattcttacatttgcctgaagatgaattattgcaaacaattaaaacgtgcttaatatttgcatatgagtcactgtgtattcacaatcagttcaggggcatatgtcatatcaaggtttctttttccttcttgaaggcattattccaactgtaaacatagcctgtgacatcatagtgcttaagctggatgtgttttgcatgttatcagttcttttgctgcatagtattacaaagatatgtgtccaaaggcttagtgaaaatgaagaaaaagaatgcatgccacgtttaaggtaaaaatcaagggtctcttttcttttttgttttcctatcctatcatattgcagtctaaagtataatctaaatagaaaagcgcttaatgtggttcttatttaaaatatgcagtgactatattttcctgcatggagctcccgtgcttccaggaatactgaaagttagggataagggagggaggtagaaagcatacctacagattcaggtgaagcaagcattcacgggtcaatatccagcattgaccagtcggaatggtgattctgatggtgaactgattttcattcacactctctcctactccccatccattcaccatcctgaggatcccatttggttaagccttactatagggacaaactttgcttctaagttagacacacttatgtgccaagtgtttttgtttcattttctttcttctttctttctttcttttttgtgtatgtgtgcacttctagcctggaaaatttgtgtgtgtgtgtgtgtgtgtgtgtgtgcggccaaatttatgtcttgatttctgatttataagacttccctctcattgtggataaagccaatgcgagaggttgtagaatcttccaggttgagaatagcgtttccatagtaacactattagatgaaaagtgccctgcgggtccgccactctaaggacggagtaaatggaattgaattgggaattgaatgctctagaagagacagatgttgtttcattggtttcgtttttagtaacaagatctgttggagtcatcttagtgtcgtatccctccttgccattttggaagaattattctgtaaacattatgaattattacaatgaaaaagtacatctaattggtatctggataatccattctgttgatcaaagttaggaaaagatagaaggacttacaggtaggcacatgggcaggtagtagatgaaattttctcctctcctcccatttctatttctttttattgcccacctctgtactctgccagtttgaacagtgaatattccttttaagccttaccagccagcatccttcaacaacctatcctgaaagatctagggggagtcctgagaaggtggtggggaaggacaactatattctcacattcttgcccaaactgttcatcagggtatttgagaaaggcagtttcttcttcaaactagtcctaatctaccttaattgtcatgtgcctgagacaagggaagtggcttgtggagatagcaggtaactttgattccttcttcactacctgttatctgcagacagatcattaaattaagagccttgaaaactagtatgaaggtgcgagaagatttttttttccttgcagatgtccatgtaccctatcaaaaattagctcttttacatatataagaagaatattttcatagtttttactttttcccttacatgtaactgccattcaccttcacctctgaccaaagctaggctttgctgaaactaacccaggcttggatgacaaaatcctttatctgagttttaaaagatctctgctactttgtagatagcgtatttcaactttgactagataaggaccctgactatttttcactcaagtgggaatcatcagtctggggagggaaatggagtcgattatttaattacttgaggggaatattggaatgctctaatttttctgtgatatacatcatataaactctgttttaataatgaagcgggtggtttccagattctggggcaactgcctttttctttttcttagctggttattgaaatcctaatgggatgggtgatgaattttcttaggtcaggtaaactgaaaaggctacagctggaattcttcacccagaagaatcggagttaatactaatgatcattgtgaattagaagatcaaaggagaagcatcagcctgttctccacattgttgccccagaggccattagtgacctggcaaagctttctcccagccttctctgtacctccttccccttgcctgggcctttcttccccacttgtagttatgcacctctgacctggggtaattacagtcagttgatgcggaggcatgggggaaaacaatcgaaagcaaaatcaaaagtccaactttaaaattgcttatttatccaggtatatagcccttctgagcacacgacctctgtctgagactctatgttactgtcagagtatgagtgcaatttttgtgtgcagtgaaataagtggtttattcatttcaccaatggttgtttcactataagagacttttgtagagtctggctggcaatttgtcagatcattctaaaaattttctttttttcccaaggttaagatacagatacacgatagtttggttttctgatatattcttaattgggctgattaaataaaggattatgtgtaaaacaaaagtgcccatggactttttacaatttgttaggttgttactgatacacctaactgaacactagccagccatttgtacttcaaagtgtgtatcaatatcatgtcttctttttattttaattagtgatgatatatttttaaagataaaatatcaaacttggtcactgagcatgcacctcaatttatctttccgattaaaattggagtaccacaagtatacatgtgagtgtgtgtatatttttttaacgaactcaatccaacccctaggaattttatgctagtttggttctttctttcttcatgtttaagattcctaatgaagataccttgtcttaaaatatgaaggtttgaccacaggaaaatcagatagatttattttataaaagattccagtgttttggattgttttgtttttgttggttggtggttttgccagtagtagtaaatctacatgtcatggaatttaggatcctaggactgaactggtaacatccacatcatatctgtctctcatgctaaagtgtgagtataactatctgctcatgtatgtccctacccctgccatctatgaattttagtagggaaaactgatccattttacatcttttaatcccctaagtagccttgtccaaggttctaatttttcttcttgtactgatgtaggtccatgacagagggcaaccaagtagtggagtacttgcacattgcaaccaagaccacgttgcaatggtctgttgctcagctcacaaaacactctgggccatgacccaagcttacctttgatagattgaaagccatgtggtagcaaaaaaaatatttgattgacgctccaaggcagtaatgatagggattgtgtagatccacatcaaaatgattgctcctgatgtgtgagcactttcacttcagtattgctcacccttccttgtgcagagtccggagtgtgggcaacttggctagcctctgtggacttgatagtcacttcagtgtgtcaagagccagagagtgcgctcaagaactcagataaggcatctctttcttggtgggccagtggagagcctccaggagtaagcagtagatgaaagggttatgctacgcaaccttctaacattttaaaggctttttagtccttgtttttcattgccattgcaaaacgccttcactcagcaaattataggccagtgagcacgggtcccaagatgaaatgtattcctctatctaaagaaaaggtagaccttaaataacttgatgttatgaaggccaacatcctaaattagttggtatttaaatgagacagaaatgacttggttttatgtttttagaaatattctgaaataggtcttggtaactgcttgaatttgaatgtcctgttggcatgatctcttaaaaaatggggtgatatatattaatttaaccttgtagttgtctttgcatttcatttcttaataatctatggtcagtttttatctgtttccacaattacctttgttgctagcatccctgcagtacccaagtgctgtcatttgccacgtggcatagattaccctgagaatttggtatcctgggaagtttttgggatgtccagagaccagcaggtatagtttttttttccaacatgaacactcatcctatgaaagatcaaggtcatttctgttgcagtttatagaagtttagaaaaaattcttatctattatttaaagaaaagccagttggccgggcgcggtggctcatgtctgtaatcccagcactttgggaggccgaggtgggcggatcctgaggtcaggagatcgagaccatcctggctaacccagtgaaaccccgtctctactaaaaataaaaaaaaaaaaattagccgggcttggtggtaggcacctatagtcccagctactcaggaggctgaggcaggagaatggcttgaacccgggaggtggagcttgcagtgagccaagattgggctactgcactccagcctgggtgacagagaaagactccgtctcaaaaaaaaaaagaaaagccagtttcccaacttcaagggggaagaacttcacaaaatgaattcgttgaaaaaataaaataaaatattctcctgcctgcataatgtgacttttattatatttttaaaaattcagctattaattgcttggctattttgacattggattattctatcctttcaacagctgaaggaaaaaaatttattgtaatgctaaataaaaatgtaatatgtatgtatgtagtgctttattgtttaatattttcctatacactggatgcataagacaatcctgtaaggtgggcagcatgacaaaaatgaaatttagagaagttaatgatttttctcaagatcaaaagcgaggaactggctgagcttgaaccaggatctcctgacttgaatttccatctgctttccaccacgctgcctctcaaacacacagcaaatcaaatcgcgttgtgggagttcaaagatataattataatctcattccacaagctagctaattagtatttttaaaaaataaaaatataagccagagggcttggcataaaacttcataatgcaatctgatggttattagtaactaagggtcaagaatggtccttccctatctggaatctttttctgcagatatctgcccataaaaaaggcaaagaaagctacagctgttgatattttgtgacaatcttgataatttttgcgtttttggaatttcagattttcaacattatttaactgctcctccttccttacagaaatatgtaattctctacccatgtctgttaccaacaatgtctgtgatagtgctttggggggtgaagaatctttcctcatgcagatcctaactaaaccttctaacacagaatttagctccttgaagattttttttttttttgcctgtcacgtggcctggacgccaaagagctaagtctttaattttctttatggagatagaggaaactgcttatgcagccccgattactcttgaaactacaatccaactgtcgtttctcagcaaagaaggctgctaaacccaggagaattaagctgccactctggggtatgacaccgaggtctgatcattttaaagctagtaataaccagaatcctaaaattcttatgaataaaatgtaattttagtaatgtttccataaacagtggtaatggtggcattttagtaggcagtgacattagtcacatagaaattgtaccacattggcttttaaattactccacctgtctgtatgaatagaattttcagtgtaaaagcagagagacagctgctgctaatgtctccttctccctgtgcgtataatgctggcaaatctacatgcagaaaggactggcttgtgatgtaaaatggtacctgaccccgctggctcctgagctacaaagcaatacctttaattaccagtggctgtgtttagttgttgatataaaaatgtcagcttccaggagtgtcacctcaggttcactccctctagtaatgtcacccatcatacaatatttttcttccacccacatccgtaatgcgatgggtgggcatttatctttgtgtgtttcagaaacatgcaaggcattaatagtttaaaggaaaacgcctaatactgtacgaacttgattaatgatctttccgttggagaagttttaaagattagtggaatttggttccttctttctagccagaacagaaatatggcatgccatttgtaccatcaaagggcttagcatcatttatctaatacaaatacaggttcttatgtgaggatcatggcaggcatgtcatagagcagaaagggtaaagaatggaggggcttgagaatatcaaatctgttactacgtgcccatgtttcctattgatagatgaggaagtttactttttagataagcccctttgctcttagccatttggttatggttctattgtggcagctccattgagacaacagtgggccaggcgaggggatcctcctgttggagatgcctgttgccaacaatgtgtttgatgaaatggtaaataggagatatacgtgtctggctcattggcaggcattctttttgacttctttcacacaactggtgttttcgtgtttaattgaacaaggaatgagtagtaaatgaaagctgctgcctgaaatcccactgtgagcatgttttgcacttggctccccagtgaaaaggcaatttgtgaaattatgtgatggagtaattagatgaagccagggcttctgactgttgccatgcatatgtggcgagggtttgttgggaagagggagggggagaaaaaaatagattattactctggcaagtcggctcaaagcttcttcatttatttgtaaacagaatatttagtgaccgcataggaagtagctgtaatcaccagctcataaagaaaccacagcagagcgtttggatttttgcagagtgctcatgtaaaatttaagctgggaggcagaatccctgttaatgtaattaggatctaatttaccaccctttgcacacagatgtaataatgtctagatatttattctatctttaagcatgttacatatacctcagtgcagcagttactgaacagaaacaggtgtgagcagtttcctaattcgtttttacactgtaaacacatagcaatttaagggaaatatttaccaaaaacgaggggaaagaatgtctgcaaatgaggcagtaatggacagttgccctttatgtactgatggatttctcaatggttaagtaaattaaagcaaatgctagaaaaatcaataggccagcatagtcttggttttgcctcatagacttcaggacagaatgacagatgtggtgtctatgacccatttaagtattaatgcttgaaaaactgcttctgcatgcaaggttgtaggcttagaaacattctcctatattaaattacagacaataatatttttaagtatatgtggaatttatatgtttcagttaggttgttcttatgtgttacatttatactggaagattagttgcttagttgttgcaatagcaccataaatcagttttgaatgttcccacaaggaaacatcttcataacgctgtagttggaaggtgaagatgatgtattttgagctgacgtgtatgttgaagtgaatatgctcaacagcactctatgtggaaaccaaattaaatttaattaaggagtagatgctcagagcctttggaaaaaatctgtaaagtagcattcaaatgtggcattataattcagttaatctccagggctacaaatgctgtattttacatttgaactaacatgggtaacatgtcacgtaggttgactgtcatagcgtgtggaattgtggagctattctgatgtcctaagtggtaggtgttagcctctgaaaatgagaaggcagaccttatttggtagcccctcagaatgttaagttttccactcgttgttcctatttctaaaaattcattaccaatttcatgataaataatttaaatacagtcaaaatgttgatttgttgactaccagagataggaaggcaaggagagaagcaaggccaaatgtacttgcatgtcagagaccaaaatttgctcttatgatcgaaataaaatgaggttaaagttattatcctggtcattggaggagaaggtgccttttgttggagagaaaaagagttttgctggcttgaagtgtcctgtttaccttcttgtgctgtctgaacttagacaataattgctcaactaccttccttgctcatgacaaagcaggcatggtccagcctgactctgggttttgaaaatcagtatgtaaaggtaatattgtggctaggagcagtggctgttgcctgtagtcccagcactttgggaggctgaggaaggaagactgcttaagccccggagttcaagaccagcctggacaatatgatgaaaccccatctctacaaaaagttaaaaaattagccaggtgtggtggctaatgcctgtagtcccagctacttgggaggaggtgggaggatcacttgagcccaggtgtgttaggctgcagtgagccaagattgcaccactgcactccagcctgggcgacagagtgggaccctgtctcaaaatgaataaataaataaaatttaaaaaattaaaaaaaaaggtgatattgtgataagtcatatcattggaaacattgctaagttggtatgatgaaaagaagtacagtgattatttaggttctaaatagaagcctttaaatttttttttcacacaaatattttacacaaatatttcatgaaaatatttacaacatttctccgaacttgtcaaatttatcatgtgatttaacaatgaacacatctggagttttaactgaggtataacaagtaactttaaaaaagtgaaagtctatcacctgaaaaactagaaaatgaaaattactacagaattgaaaattcttttgcttctttaaaaacagtgctccttggctgagcacagtggttcatgcctgtaatcctagcactttgggagaccaggacaggcagattgcttgagcccaggaattcaagaccaggaattcaatgggcaacatggtgaaaccctgtctctacaaaaatacaaaacttagcctggtgtggcggggcacgcttgtagtcccagctactcaagaggctaaggcgggaaaatcgcttgagcccaggtggtggaggttgcagtgagccaagatcactccactgcactccatcctgggcggcagagtgagaccttgtctcaaaaacaaacaaacaaaaaacaacaaacaaacaaacaaaaacagtgctctttaagctatggcatgcatttaaattatctggatctttttaaaaatgtagattctgattgagagggttggggcctgagattctgcattttcagcaagctcctattgctgctggtgctgctggtccacagactgcagcttgcatagaaaggatctaaggtacacaagcaagatgacagattttaaatggaaagatgattgtttttctctttgatttttatactttgattttgcccccctgattttgaagcttaccccattgtttttatcatattagtttgacaaaatgttttattttttctctgccaactttcaatgttttttaagcatataagaagttccttttgaatatcaaagcactttcattggatccctcaagtactctgaaagcttctgatagacgcagggctctgcagaaagacagactgtttcttctgggcttgttgacagtacacttgtgtgttcgggtgggtggaggggtagccctgaaggtcccatgatacagaatgttgtggttcacctccaccacaaggaaacatcttcatagcttcagtgctctggtgacaatatgcagcgacggaagttatcatggagtgagggcagtgtgtgtggcatgctagctcctagactcctgcagaggctctgcagatcaggtagcctttgtcagtaagaaagtaacagaatcactcactgcagaaacaacacatatgtttgagggagaactgcgtttgtgcctcacacttcttgcctactttatgtctgctccaggagatccttttgtattcccactgccttgtgtactttatctgccatgggcactgtcactctcaaatttcgcagcatcctggaaggaaggtgaatttgctttcaaaagtgagtatctgaaaagtatatttcctccagtgtggctaagatctaaggaattattataagtagtgcatacctattaatcattgcttagcaggtaaattctctcactcattagagttcacatgctagatgtagtttcttgaaattaggtcatttactttggtctaagtcattgaggatcaaaggtcataaggaatccaaaagccattagtcagggttcttttctggaccccttagatgtcattgtgcaagtcacccatggcaggccgggcctggcctgctgtcagggagctggcagggtgcctactttatttccagtttgcatagataaaaagcagagcagcgactcttggaatcactataaaaataagcttacataaaatctccatttgaaatacagtatgtgtggtgtgcccctgcatgctttctattctggaagccatgggagctagaaatcaaaattaagaagcgaagagacagacctctgatggcattgtagactactctttgtttgggtgtaggcatttataatttatggtaagtttagtgaagaccaaattttcacaaagaattaaaatgacaaaccaagcattttaatttgctaaataaaataaaggcattgcttaaccattgtcaaacatatatatacatacatatagctaccccctcttaataagactgaagtacatttgtcggtatcagaagtggtgggcaagagatatagtcaaatcaattcatttacttctctcattgagccctgtgagtctcaggcccacaccttgaagtgaaaaaatcatcaattaccaaaatgacaggtgctcaggacttacttcctgaaagatgttcatattggaccagacaccacgagcactcagcaacattcatcacttcgttcaaaagagaccgaaaaaactgtggggtgaatttgcaagggaaaaaaggccaaatatacatgcatgaaatagcatacgtttgaatttctaaaagtcagacagcaagcaagtatcctattttattttaaaagattattaattgttatttaatagtcaacttgcatgtgatcttacaattaataattgtatccccatttcacagatgaaggaactgggacagaaaaggttaaagatctaacagccatcttagtgtacaatgaagttgggactggaaacaaaactcagggccataaatttcaacttcctggagcttaccacttccataccctgacacttaaaattatgacttgttattgttcttgaaattgtcctgcatacacagttgactagaactaatgagaatggaggcagaagtccacatagcctcatcagagtcatgcctttgacacagttattccagagcaatcacaactgctgtatggtcaaccagaactgggggcccctgtgtagcccctttgctgtccctagagatctctgtggctctgatacctgtattgcagtaaaagcaagtgtgtgtgtgtgtgtgtgtgtgtgtgtgtgtgtgtgtgtgtgtgtgtgttgggggggagacagggatcatgctggcattagggcctttatctatgaataccttatgctttttggtttgaggagagatggctagaatagtttccatgatatgatgacttaatcccaccacactgcaggaaaaagcaactttcaaacctgcttgttatgttacccaccataaatcatggcaaaactttaggccacatctaacttatctttgaattgcaatataaatggggtcattaaaagttttttccaagaaagtcaaatgttttttgagggcctactatgtacaaggaaccatatacatccggaacgttctatgatgtttgaaaagggcatggatctaatctctggtgcagtttatagaaagctggagtgaacagaacagtcagaagacagctataacagtttgggtaagaaggctgtgctgtgggagtacaaagaaatgaatgagtacaagatatgttggaggtaaatctgtacctcataaatagaaacattctttcagttaccaccacagacactagagatgtatatagagtcatagatccagagagtgccaagagagaaaaggaggaggccaaagatagaatttgggggattattatttctgaaggctgtctggaggaaaaacctagagaaggagagacgaacagacagacaggtctctgtcaaatacagaggtggcatgaattaatttctgggtcccttccagctccaatgctttattattctaataaaagcaaggaaggtacagtggtaagaaagtcgaagaatccattccctacactaaatccatcatggctcccaaactggctctccttgctgtcagcgtcgtctcagttcatgacatcaccatagacccagaaactccaactcagctgagacccaggagtcatcctggaaggttcctctccttcccccttcacaggcagttgctcatccctgagtcccatcaattctctctcctaaacacttctccattcttcttcccacctagctccattgccactgccacaggtcagtcctctatgtctccagctttctccgttcgttccccagccttcctgcctctaacattggtcccttataaaccatcccttattttgacacagtttttctaaaacaaaacttggctaagtctcctcctacttaaaatcctttgatatctccctactacccgtaggatatgagacaaacatccgtggtgtgccactcaaggaccccttgaggtctgacactggtgccctggcgcctctctcaccattttcatacaggctccccatgcatgccatgctgcagccaagctgagggcttacagctccccatcagtgctgcacagtcttgtcctctgtgcaccttacatgctgttccctcacctgagatacatcacttccatgaccccttctctacttgacactttcctccacatccttcacatcttagtacaattgtcactgcttggggaagccatttgttgttttccccaggagagggaaagtgacccctgcccccaggtccacagcaccttgatgagactctgatagggagtgcttatcatagtgactgtttatttatgctgtgcctttctatctagaggtcaggatttaatctttgctctgtacatcttcagagctgtactataggtgcttgatattatttattgaccaaagcaatgagtacagttgcaaaacagaaatgaccaaactctgggagctttataaagtagaaaggctggaaaagatcctgatacaggggttaggatatcatcagtgacttttgtcatttatttgtttatctacttcttcttatttcttttagaaatagggtctcaatctgttgcccaacctggagtgcagcagtgcaatcttggctcactgcagcctccacctcccaggttaaagcaatcctcctgcctcggcctcctgagtagctgggactgtaggcacatgccaccacactggctaactttttaagctgtttgaggcatttggaagagaagaagttgtattatgaggcatatgatgatactgcagtggaggcagcaaaggtagatccttttgcaatcacttgaggaaatatactaaaggatatactttagacagaagcttcaggaagtggtaacaagaaggcatggtttttcttttcttttttaatatttaggagaaaggatatttgaatatgtttacatatacaattgaattcagctgtctttcctggaattgctactatgttccatgcaatttgttaatgcatagcctacttacttacttaggcaatagagacctttgaagatcaaagtagaaagggactgattaatgaagcaagaatcaagggcaggcagacagtggaggggagggtgatgggactcagagtaagaacatagcaataaggaagaagtcagagaaatttagaaatgaagaaggctgctattctcctcctggatcttttagcaggctggaggcaaagttaactgatgaatgtccaagaagtgggattaggagctggaggagaatggaagtcatttggaaaaattgctgttgggaacacagtaggcaaagcaaaaaaaaaaaaaggaaagaagaaaagataaaaagactttcagagtgtagttgagaatacatatagaagtagcactagataccacactgtgaccaaggactggctagacttttaacaggcacatttcataatcaatctgtttttcacatgttaaaatgaaggtaatagatgaattcttagtggttttccacaggaaaataattccattttctattccttaaaaattagtaccatggggccgggtacggtggctcacgcctgtaatcccagcactttgggaggccgaggcgggcggatcataaggtcaggagatcgagaccatcctggctaacacggtgaaaccccgtctctcctaaaaatacaaaaaaaattagccgggcgtggtggcaggcacctgtagtcccagctactcgggaggctgaggcaggagaatggcgtgaacctgggaggcggagcttgcagtgagccgcgattgcgccactgcactccagcctgggtgacagagcaagactccaactcaaaaaaaaaaattagtaccatggggaacattcattgagccccagtctgagtcactgaagtttgtgccatcatatgtaggttagtgaactcaagattgcattaaaggttttatctcagctttggaggaagttaacatgcagttattgtacattatctttcagtactggttgtataagaagtttgcaaagttgttattgataacctttgcatgtgagttcaacaaaaaccatgcaaatgcagctgtctgctaagataaattttttttcttgccatgtgatttgagagaaaaggggagttttaaatttaattaagacaaatccacacaacattgtaaaatatctgagcaactgtacacgttaacaggtgaacaatctcagatatgttctggtaaaccttcctctgctggaagccttatttttagcaatgggaaggagagatgactggcttgaacagactactttagcttcacaagttgaagttgaattgatcttgacactgctccagaagagtctactgttgtcattttggtttgatggtaaatgatatacaattggcttcatgaaataaaatggtaccctacacataatgaacactcatcaccatatacaaagaacagttagctcagtgtgatcatcaggtcacagatgactcatgtgaagtctctgtttaaataggaaggactactgacaagcaaacatgctcacagaaaaatagctaagtagcgaaataaataaagggctcagtagtccttcaaacatgtattagaaaacaaattaaaaattggtttcctattcagtactgtaaggcaatgtcatgacagtgttggaaaaccaactccctggtagctggtgtattgcggacatttctgcccttgtctttgggagtgccacgtacacggttacacaacgcataaaggcgagggtcatttctaggacagataattgaacattaatactcgctgacattgccgaaggaatgatatgtcaacttgacagggcctatgtgcttacatctgctgattggctgcggacgaaggccctgtgtgtcaggatgagaccccagggctgactgcagcagggccaaggatgcggcggccattaatcatgagctgccatcttgagccaagacagtgtctgtaaaatcactcgacatcctgtgtgtggctggcaagttccatctgttgtatactagagtttggtaggtatggctctcagttaaaaaaaaaaaaatcatcgcagaccttttggtttgcatcatctaaccagaattttgggtggaccagatgtcctttgcatgtatttctttcttttttttctgaaactagttataaccagttttagtgggtaaaagggaggttctgaggtggagtgtcttctgttcctatgggaattagttttgatgagtttctggtttcctgattcaccatagatagtcagtataatgaagaaatccaacaagaattaaactgaagttacttgctgtgatttattttttcgattctctacaaaatattaaaccccgtaggcagatttttgaacagggaaaaagaggtctatgcaattattttcttatccctgaaatcacatgaacagcactttcctccctcatttataataaatctttagtgagttaattctgttgctgcagtatttccacagccagcactttactgaacatgtacctttcagagaaaaaaaaaacacaaaagcatggaacaatcacaaggccctctgacactcaccccaattgtgccttcttaaaataggggtaaacactctggcagtagttagtgtgggtttccactgcataaaatgttataaaatagggcccctgagagcatccattatcacatattggttaacatcacagagtttttaaatcccagttgccttgatgccatgaaaaaaaaaacagctttcatctgtaaaatctagtttccctttgttattaaaataaatgaagccattaaacaaaatatatgcatgtaatagtcgagttcctcatttggcatcatcaaaatgatggaattttgcatttttaaaaattggtgttgccatcttagcaggtttgatgtgagctacagaatccaaatgtgctggaggcttctgaaactgtatgacatgacatatatttctctctttagtctgcatatatatatatttatctggctctcctttaacaaaaagtagaattctgtttaagagaactaaaaaagaagacagttttttttatccaaaatcctgccatcaaatcaattaattataaccattgatgagctcgtattgtgactgtgctagaattgaaataatttccgaatactttatttccaaaggtttgtttttaattacagcagcatttggttggcatgcaagggcgagttctcactcttgatctatcctagctggagctcaggccaaaagatcctctgctcccttttctcgagagcacacttttctgccaaatgtggtgctcgtcccctgccaagaaaggtgggcgaattgccacttctgacttccaaccaccaaaagacaaaggctctcaacattcctaagtccactgagccagaatgggcctcacaccttgaaggatcccgattattattgattatttttcccccatagactttataatatagaatattttctcagtgccttagtcagtccccgagggtgacttaggcacttacagcaatgtgtgaccccttgaaggccactggagggtcattgaagtgtccttactcatctgtctgaggcctgagcacatctacactgtcagtgtcacctctatatcttgcttttatagtgtctttttttaacactctttaagttagaatctagtaattatttatttacttctgtgaagctcaaataaactcaagagaagttgtagctaagcataaaacatctaatagggaaaacatagcctcttttccttttaatgggacccattgcgtaatttgtggagaatgtgtaaattctcctcataaattgtgcagggcttcttaaaaaaaaattcaagatcgtgacagcagcacattaagtcaagcatggggcccgtctatgtgggggtccctgtgtcacttacaggcagcacacccatgaagctgccctgccttcagagatcttggaagcaagtttgtccaaataaagagaattacaagaaaacattaaaatctaatttaacagtaaaaataaatttagaagaattatctagtcatatcttcttccctgcaaattgagaactgtatgcattttatgtatttttacatagattagcccaatcttaagagtcatctcagattcagctactgtttactagtctctaaatatatgccagaccctatgctaagcaatttgatgcgtgttgtctcatttgaccaccaccagcgtgattatcctcattttaccaatgaggaagcaaggcttggagatctgaaatgttgatcaaagtcatagttactgtgggttctaaggacttaactttagttatctaactaaattgatacactgaactacacctcttaaaaccaatttttgggccgggcgcagtggctcacacctgtaatcccagcactttgggaggccaaggcgggcggatcacgaggtcaggggtttgagaccagcctgtccaacatggtgaaaccccgtctctactcaaaatataaaaattagctcgtcatggtggagcatgcttgtattcccagctacttgagaggctgaggcaggaggattgcttgaacctgggaggcagaggttgcagtgagccaagattgtgccactgcgcttcagcctgggcaacagagtgacactctgtcttaaaaaaaaaaaaattcttttaaaatgtttcctttagatttgccatttgtaaatgtgtaaccacatcactgaagcatgaatggacttcatgaccacgttcctgggctaaacgggcttatgactctccacataggcctaagttttcttaagaactcatttaggaagggaaaactaggcccttctttgtgtaattagcaaccttaagtcacaagtggaatggcaaagaaaaacacattacataaagcaaaactatatctagttgtttcaaagaggaacaaacgaatcaatcctcactggataaggacatttctttcccaaagcatgttttagaaggggcaaatgtcactatttaagactttttggcattaccagtaagattatgtatataagttcattaggaatgatggcagctaatttaaaaggtgatggttttgtttgattttagtttaagttttagtttagttctttgtttcatcctgggcagtacacatttacacgttaaaacagaggctgggtcaactaactcacagtaggtttctgacagatgaagctacagctttttattttatcattaacaagataaactttgagcttcagtagagtgtaaagacaactagatagagaagtaggaggccttagggccagcaacttcccagccacgtaaccctgtatatcttgccatgtgtccactctaaattttgttttctcttgtatagaatgagggcaacattacctattctaacttcaccagtaattgtgaggttcaaacttggcaaaatataataaaacctctttgaaaatgtaaagctatatacaaatataagggatcacccttctcaaagtcttaaaaaaaagcccaaactattcttcaagttaactttgatgaaatatatttttgccaactttatctcacagtcttgttggtgacaggtcgagccttctcccactcatctaagatattccatgaacatttgtgataaccctgcagaaataagtccacatctgtgccggcatccgcacctccctgcccccagcccagttagatttaatgaggaaagtgtactttgggaaacaaatacggtggatctgcccaaattttgactaagactcttccctcatctataatccactctggagacagacagtgaattcacatcaataaatgctttcgggagttggaaagggtttgcttaagaaggttcataaagataaaggtaatctgatcactaaaaccatttaaagtttttagatttttttttcttcttaagggggaattccctttagtttgattgcaagataagagttttgttgttaactaagataaaatatagtgctgaataatctctgaaattaaaaactgaagtgcatggtgcacagaatagagaaaattaaatagcttagactacaatggataaagagaaaagagttttcatgaaaattagcttagtaaaggtaaattgcatttgaatcttaacttcagatctgggtgctctgctatttggcatatgttgaattgataatgcctgtgtgttaaagaattctgattgtttcttttgcctctctcacagcttataaaaatgcaagcagacccatctaatgaatattaataggagtgatgtctagataacacataaaccccgggatctgtggactttggatggagtagtcagagaggatttctgtggctttatttaataccaaatttacatacttttaaagaataaacatcatcttaatattttaatatcaatattccagagtggagattttagtcaaataaaaagcttaattttgtcttcccaaacattatgttcaccagggtctgcattttaagagacaggaaactgttagctaaaaaagaaattaacttaatcccccttcattaagttccagtctttttctgttacttagagacaagtaataattatacccgtagcaatgcaaagcatgttttacacttttgttatacaaaagaactgcggttgttaaggtgacagcaaaagaaaatgagaacattgataaatactgatttttttttcttaaatcttctctgactcttgaaaataaatttcactcaggtgtctgagaggccttttaattcattaactgcaaaaatctacacatatgattttagaaaatgtcaatcaactagctaaacaatattttcccagctaaggttataaacagcagctaagtgggtggaaaatgtctaaaacgactatacataccagttcttttataatgcataaaaagtgggcattttgttttcaagctggtatctttgggatggaacttttagcaagcacacagtacatctcagcagtgtatattatttaaagtgcattctctctctctctctctggcattgtgaagactttttaaattttagctttacaaaggggggaaatcattaaaatgtggtttgtaccattacattccattatttgtcatctttatggctattctatagttttcattgacctttaatggtaagcttggtcaggagaggtgagcaggaatgttcacatacttggctgagggtgctgcttgagagtgtctgttagctgggcttcaatccacgtccctgtagattttaatgtccctacagactgctggcagcctgcttccagctgtggcaggcatgatgcagtgaattgcttttgaatgttctttactcaaataggcagtaattacaagcttaaagaggtttagtggtccagtaaactacataatcacccctgaattagcctgggctcatcagttgcagtccagcaagctccagtctgctgtttgtatgccgtcttgatcacatagcaacctgatcagcaggtgtggagcagccagagtcccccataaacacaactgtctactggggacaatgatctctaatgagatgaggctacatcatcactgtaatttaagtgggaaaattagcactagagaatgggtaccagttccaggggtctttagtcatattgggagcagcacgaattctccatctcattctccctgtctctatctttttctctctcaaaaatatctcctcaccaaatgtaccattttgcttctaacttacggatactttattctttagacaaggatttttcctgaataattaatgctagacagggcatctgtaaaggcaataatgattgctgtcaacagactcattccaaaatggcgttgtagtatttcatcttccttgtctttctacttaatggtttcaaaatcctttctctttgatttttaaagtggaaaagtgttcttcaggctggtgttaggtctccttttagctgacgtgctctctgaaattgtagagatgggctatacgtagtttgaaaaagatccttactttattggagtttattgtataaatcagtcatgaactttcttttcagaaaggtggtccagtatagtgtgccatgtttttgttgtgcatgttcaagtgaaattcttggggaaaagcctccatgttgaaacagtcttctttatcctttcttctgtcctgtgctaggcataaagatacagaacttgaattttgttgcattgaagttagagagtaggaagggaattttgtcacaaataaacccaagaacaacatagagtgaatttgggagaaactttgggggaaattataaattgacgctaagaaagaaaagcagaataacacagtaattaaaagcataggctgtgcaattgactacttagagtcaaatcccagctctattttacttgccagtaaattagattctgagcctcagtgtcctctgtaaaataatggtaagagtacttatcttagagacttgttttaaggattaaataagtaaatacttaaagctctgagaacgctgcccaacatacagtaaacattatataaatgtcaggtaaataaagtgagcaaaatctggactaggcactctactattctgggatttgttgaactaagtgagaaggatgaataattgttggaatggagctgctagttttgtgtttatctgaagtcatctactcctactcacaaatgcaggttgagggattttagtcatctctaactttaataacattcattcacagaaatatttattgggcacagaactggtagctgcatcatcactgggaatagcattcatatgtttttattagtagtctactaaaatgtaatgattttgaatgtcatttaactcatatttgattaagaatcatgtaataaacaaaagtaattggcgaaacacacaccccaatttgtttcaaatcccaatttgtttcaaagctgacaattgaaggcatattgtagtgtggttagaggaaatagtaggcatttgattctatgatccttaaaagagttttttttttttttttgtttgtttgttttttaaggagtctcactctgtcaaccaggctggagtgcagtggcgcgatctcggctcactgcaacctccgcctcccgggttcaagcgattattctgcctcagcctcctaagtagctgggaccacaggcgtgtgccaccacggctggctaattttttgtatttttagtagagacagggtttcactgtgttagccgggatgatctcgatctcctgacctcatgatccacctgccttggcctcctaaagtgctggtattacaggtgtgggccaccgtgcctggccaaaagtgctcttgtatataagctactatcattcctgtataagcaatgctacaagcattaataaagtgatgggcatgtgagtttccactgagttttctgacttacagcaagattgactcttccttccattagcagaactgagttgtagaaataaaaggtacacacacatacgttaagataatagtttttttcatataacaagtaataatcatcatatatattcatgattaactcaccaggagtcagtgggatttcttcacctattatataaaagacaaaatcgtttggaagtgaattttcccgacttgtatgttaccaccaagtttcaaattccagctctactacttaccagctgtgtgaacttgagaacttcctttgtcctttctgtgctcaagtttcgtcatctatcaaatgggtctagcggctgttaactacctcagaaggcttttgtgaggagtcatataagtgaagcatttggaacagcgcctggcacattctcacttcctgatatatgttacaatgactacttcttccactcttattaatactgctaagctactattaataaagttcctttggctggatgctggaaggagaacatgggtcaaggttctgatgaactaactttccctgacagccccctcccctccccttctgcctgcctcccaggcagaagcagtggatattcaggtaggagtggaggagcagggaaatggcaactctttcctctctgttcaccatgattaataacatggttcatactcccttataatatattttttgttaaaaaagggaatggagaaatgagaaacaaatggcagtgggagtgtagccaagtggagaaactcagggccggacagacctggcaccagcactaagtagctgtgtgctgttggtgtgtttttgacctggccaaccctcagcttcttcatctgtgaaaaggagctaagcacagcccttactcagggggttcaccaagagtacatgaaataatgcctgtaatgcatttgttgtactgacaaataatgagtttgaatgagctattgtttaaaatgattcaaaaatgacacttcaaagtaaagcatgagttttctcccttatctactcccaagggcctcctgtcctgtttttgttttgttttttgttttttgagatgtctgttgcacaggctggagtgcagtggtgtgatcttgggtcattgcaacctccacctcctgggttcaagtggattctcctgcctcagcctgccgagtagatgggattacaggcgcctgacatcacgcccagctaatttttgtacttttagtagagatgggatttcctcatgtcgggcaagtcctgacctcaagtgatccacccactttggccttccaaagtgctgggattataggtgtgagccactgctcccagccctggttttcttaatggccatttttgtatttcctcttataagcatggtcttctactgagagaatcaatattcagaggattcattaatagctgttcaacataattttagcatccttcacgaatgttaatccatttaggaagaggatataagtaatcactaatttggaatctaaactgtatgtcttaaacgtatatactttaaaatatttctgtaacatatgtgtagctaatgaagaatatatctaaaacattgttattttataaatttgtaagcaactttaaaaaaaattccaaatacaaaggactatgcagtttcttaatataagtatctgacttctttatttagtgttttcattttctatttaattgatatttaggagaaattaaaagatcagataagtgaggcagggagggcattttattttattttattttattattttttattttttatttttttttgagacagtctcactcagtcacccaggctggagtgcagtggtgcaatctcggctcattgcaagctctgcctcccgggttcactccattcttctgcctcagccacccgagtagctgggactacaggtgcccaccaccatgcccagctaattttttgtatttttagtagagacgaggtttcaccatgttagccaggatggtctcgatctcctgaccttgtgatcctcccgtctcggcctcccaaagtactgggattacaggtgtgagccaccgcacaggcagggcattttagtattggtctcttataattggctataaaacaatgtctttactactgtgtattataaatatagtcttagtacaaaaaacaaagattgttatgaaacattatccagcattctacttttccttccacacctatgtcattttcatgtgctaaggttacatttatagattcctacctgacacctccactggcaacttcttttaactgctgttggatatacagaaatcagagagattgtctgcagaatgactctactgggccccagaaaaaacaaacgctaaacaaaaaatggagcccatttagtctgagcaactaggcaatataggagtgttggtggagaattaagaaagcggatggaaatcctatgactctactgatgatgctccaaacatttctggcttcttagccagtcccaacaccacccttccttcttttgattccagcatgtgcgaggatgcaggactcaactactatgcattcaggctatgttctgcgactgcacggtgcactgcttttgtaatgcaaataggaggcacaaagtgtctctttgataatgtgcagtcagaagacaaaaaagcattcactgaaacagtaaaactaattcataaagctgaaagacaatagggaagcattatggatttttttaaaggaaaaaagtatcctagatcaatgtaattgtcacagtgtaagctattcacagtcaatgcaggaggggaaaatggctgcaagtttatttaaagtgggagaagttttataggcaaaaaaccattatgttaaacaaatataaatatatttggttaacaagtttctgcttagtctcttagaggtcaaatatatagctggttattttcatttagatccacagtattcccttagtgacaaaaactcagtagaagttttaaaagagcacagagatctaatagttaaaaaccatatggtagattttttttttttctttaaagggagtatctccccatcacataccagagtttagctcaaggtcaacttatattaatgcattaaacttagctgtggaggaggcaaagggctggaggaaaaaggataaaagaagttctgaaattgttcttccaacatattcagccaagcaacagaacattgcctggataaggcttatattggacagttgccataattcctcctgttagatcagctcctctggtacctattcccataccttttaaagtatagcatgtaacattttgcttgaaaattgcttctacctctattgctttgttatagccgttttgcagtttcggtatagaggcagttctgtgtcacaagaaattactaatctgaggcttgagaaggggcagtgtagccttccattatctcaccagcaagctctgtacaggattattttcaaattttctgctgccattacaatgtgctattagagtggccaaggtggtgagggaggggatgttattgaaacttggttaccagggtagataagataaacttcatcactttcttggcatccacatttgtagccaagggtggaaattttgatgaaagaagtacatttggtcaaagatattaaggtgtaaagctggatattttctaactgcattctacagagtctgtctcttccccattgatgctcatctgaaatagtctgcttgattgtttcaataaacacactttctttcaatgtattgtaaacttgtaaataccagataaccaacttaaaatccccctcccatcccagtctcaagaaataacactggttatgtgcagacataactttcttgagtaagtcaccattttctgtcactttctatttgcggctggtaaaatgacagctcaggcttaacttttacataagctatttttagatttttctcagacatcctttaactatttcttttatacaggatcctaccctaaggatcattttattctttgacggggtcattaagcaatcactctatactggttcattattggaagtcactgcaatatccagaaatacatgaagagtggcaagtggtttatatttcagcaagagatttatgctagaaaggagaagtcaaggtgttgacgattgaaataaggatgaacatttcatgagttattccctttcgctggggttccactgcccacaagccacttagtttccctttgaggccagcatctcttctctctgcagccaaaccagcctaatacacatgtgcaggtttaatgctggaagggaggggccagctttacccatacataatcactgttttatggctttcactcattcctgaggtgttaatgcagatcaaatgggaaacactcgagaaagaacccttgcagctactgcattgcctggctctcccctctcaatcgttaattcttattgtaagatctaaaggtaattttgtttgctctcttaatgtgttgcagttctcccagtggcccttgcatatcctttctcaaattcccatcttgatcaattgtttgcaaataattaagcttttaaaagataatagcatgaggctaatgtacacaacaaaggcgaggtctccctcactgtctatgggactgtggtcaaatttgctttgatatcccgaagtgattaggttgattggtatatctgggaagtgccatccatctttccttcacaagagcctactgatctttcttaaactgtgtccttgagatgcaataacagcaaaggtgtttgggaggatggcaaggagtgacataggcctttagttgcaaaggtttggaatgaatttcccattttctccctaaaaacagcacttctcggagattactctttatctcttttgcaaagtgacgtctgcctttgcccattgcatggcctcactagacctgtgggcagaaggcaacagggctttcaatgtttttttttcagcagccatgcctgtggcatgctgggtttttgtcaagtcatttttttttaagtctataaaagaataactcatactgtccacaaaaagctttatttagtaaagatgcataggatttaagatattgaaacatattaggtttcagtttaaaagcctacttctttgtgaatttttggctggttaaggattaactacatgaagtcacggctttcatgtgattctagcaattacagacttttttcagggaattgaaagtttgtgggacactaaggccaagaactatgagaaaaagaaatacattcagttgacctaccatagacaagggtttaggaatgttgttgatacctttttctcctcttaacaatggccagattattgtgacatttaatttgtccaggctcattcatttgtattaaaaaaatatatatatatcccgaacaactgaaaatttcttaatggagacagagtgctgagcctccatagcttgaggctgcctagcaattatgctgcatgaaattagacacagtttgttccaattacttaaaatcagatcacatgaaaagtgacagaggaaaaaaagggtagaactttctaattttgtgatatttaaattatgaaatcagaaactatatgatgtgaagaaacaactgaaatttgcactgaaattttgagagccatattactaccctttgaagctccaggtagtggtaatgattcaaagagaatttttgtgacaccacttgcataaataaaatgtgaattccatttgctttgtaagaatgtttgtaaaacttgctcataaacaggcatgcaaaagtactcttgaaaatacaggaaaataaattactgtgacaattttcagttttcaaagtaactaaagataaatggtataaataataatttttatccagttctggtcataatattaagacataactaataagacagggcaaaaggttttgccatctgactatactaaagaaggactgttgacatatttattaattctattaaaaatcactgcaagtgatttctgtaagacctggacaactgtcagcaaataattttacaggaaatgttatagattggaagttgcttgtgtacttcagtgtacaactttatatgacacatagtgccagtggtgggatgctaatatttgcatatttcaaaattgagcttgtcttctggcactgcaatattgtaagaactgctagcctgggtaatctttaacctcaatggatcttagaactctggatgacaaaattgaggataagaaaagttgtctgttgttcaaagtcccatagttaatgagtggcagcatcatttatacaatctaatagagtcacctatattaggtacaattcttcaactagtagagacatagacctactgtatatcaagctgtaattcagcattctatccatgggataagaaattcatttggtttgtattgtgtgccaaatctttatacagtgggagttatgttttaaaccttagggtaatggattcctttgagctcagtagccagtcatgagactttggctgcaatggctggcattctgttgagtagtcacttatgatcttagcctattaggaggtttatataccttcatttgaagaaagtgggtcaacatcacttttgtgaatgaagcaaagaaagtagtgtcatggatcttaaattggattgtttctgctttgttatacaatttgatgttgcatctgagtggagagtgtctgtcatggcatggtacagccattcctttgttccacaaatatttagtgattttctgttatgtcccagtctgggctttgaggataaacagaaagcaaggcaaggggtttattagcattggtagatgagtgagaaaagacacaccaacaaggaaataaacaattaaagcaggtgcttcagagagtgatgcttgctattagggaaataagaaaaagatgaatgtgagcgtgataaggcggggtgctgggaggtggggagggtaaagctgaacatttgagctgagagctaaaagtgacattggggtaagaatctgagtgacgggaaaagctggtggtgttaggaaaacagaaagaaggatggtgtggcttggtataggggtaggaagcgggtgagaagaaggtatcaaaatctgagaagtgggcaaggctggatggtgacaggccttgcaggccatggtaaccagtctgaaggttatttcacaggggacatgaatggggattatgaaaggcgtctgctacatcctttggtcatggtgaggcttaggcactgaaagggaagcaggaaatatcactgacttatgtctgcctctgtccatctcttcccctggccagtttcctcacctgtaaaacagaagggatgatagattccatttatgtcactcaaagggatataatggggattaattaccatcctgtctgtaatatacttggagctctttagagaaaggcactatattccatgaaagcaaagccttattctaattgtgtatttattgattaagtgacaatcatagacaatgcttatgggaaaaattgtgatctctctgctgttcacaaacaaatcccctgtgtatagatatagagcatatttaaacttacatataagagtactgaagtggtcattaacaagcctttttagcatctaatcagacattattaattaaattaaaagctatgtcaattagcattcaatagacgacaatttagtttccatggcacagatagttaaattaagggttgggggtgcacttttccattcataatagaatagagggttgactctcagaagaattttatcttgggataatttattgagatgtggtgtttcaagcaagctaatgtctctatagatggaaaccatatcctcagctcctcccctaagctttagaaatatgtatttcaaattagatatatttgatcagtgaacagaaagcatttgtgccaaaactaatttcagtagaattccaaacgttcttacaggaaggtatgaatttcactttattatctaatcctgtaatacttttatctactatgactcttgaggaacatagctgggcttgttcttagcatgcaaaatatgctggtctttgaccttatattggcctgtgttcagaatctcagcatgtgttgacattcagatttggaaaccaacattggtgaattttgttttttttgctgaggactgaaaatgaatagtgtatgtgtgtgtgtgtgtgtttaatagcacccactttagatttgatatttgcatctggcaatatggtgttttagagggagaacgtcactatgtggacctcagctgagattgttggtccaaatgggtcagctttagaaatttatggttcaatgaatatattaagttagggcagtatacttttaggtggtaacaaatggcttgtccttattttaatcctataaaatacagtgaagatcatactaaactttctgtgtttgcaacaaataaagctgttaaaggataaactcagtgtcaaggttctgcaagtatcctaagtagctatttatacacttcattaatctttgtaattggcttgtcttttactgccattaattagatgatgtagtattccattaataagagtgacacacctcagcatttttacctttaattatagacttcatgagacacttaggctattgacaaaatggctaaatattgcctgatgcacacgtatcttttttattctctttcagcacccttacccttctgaagaacagaaaaagcagttggcacaagacacgggactcaccatccttcaagtgaacaattggtaagtaatttggctttgtgtttacacacaatctgtttccccctctggcaacctgcagctcatgttttgcattaagaagacacacccagttgccactgctttccctggtggcttgttgattcaaaagtgaaaacaaactgttgactgatatgtgagaacatttgctagtatgggaaataaaacattgtattgtcttctacctcctttataagttgacaattttatgcatagtataagtatgtgtgtaattcacattcactatggctctgtcaatgtatctctctctatggctttttttttcccccttcagggtaatcgatagagtagtatcatcctattttctacaaaacaagaaaatccaccatcacatatcagtcaggtttaaattcattgaataactaaattcagttagattttgttagggctatgcattcaaggatagcctctcctttgctcttatctcctgaatactgaaaggaagaaattatttgtttctctttgaggctattccaaacctgaggcatctcgtggctgtgcaatactgtttctaaataaagtgtaaattcctgatttggggcgaagctgagattatgtaccaagtaccagccaacaatattctgactcaatgtacagcagtgtggcaatgaggctttgagaaagtatgatttattaccctttgtgaatgtgctgaaagccaggtttcatataatcacccaggactagtgtcatatttgaagggtatcgaaatccaatatcctctaaaagtaagtgtatctaattaattgtcctaatatttttagattagtgtttatgatggggaaaccttatcctctttgaagtaaaatccagaaaaggcccaaagcctgggctggggaaggggagaactaggaatgccagtttgcagacagaagtatttctttctgttcaataagtgtcaaagattaatattacagaatctctgattacatggcctaatccattttggtgaataaatttgttcttgatgtctattgcacctacattaacagacccttctctgttagagagcctgggagcctttgggagagatttcagatatattaaaccccattacagaaaatgtaatttctgtcaatataatcccatgtattcttcaatttagtattttagagataacaagctacttacaatatatttgcctttggaggattaatttacaaagtgcactatctgcaagacacagacagactcacataagaattgcttgtaagggttatcaatttctatgaccttactgctgccttgagagatcaatttttgcagcccttttcatcagtggatggtaaaccaagcaaaggcatactacatctaaatgtgttactacgagttgtgtggctgctgaggttttttgtttgcctatttctacctgctactgtgtcttaattttcaaggctgttaatactacatattggaaatttcaaatatgtaataatttcatatttgaaatatgaaatttcaaatatgtaatatttgaaatataatatcctggatgatattataggggagaccatcaattttgcgtgcacatctagattcatatatctgtattttaaaacttaaagctgatgttgagacagttttaatacaatggaggctgcacaaatgtccgcatttccctgggaagtgttcctgtttgcgggcaaaggagtggcaggacaagctctctagttaagaaacgaaaagcgctgtcattcaggggatctatcctgtgagccatctctcttcctctgcagggttgctagcaaactccactcataaacacagttaccagagaacaaatcccaatacaagttgcttactatgggtggacggccttattatgggatatttcctgtgaatgcaggaagaggaaggcattcttgtgacttcaagcaatatatatatacacacagttttctaaattctatgcacagtctctgccggagagcaatcttcctaatcagtccatgatcacaattcgactttctcagttttgtaaccagaagggagagaaaggatgtttaaaaagttttaattcacactctaaaataattttaaagtatatgcagactttaccctaaacttcacactgctattcaattctgcacgggtaaataacttaaaaatagcttttaattagttatttgggacagaaacacaattctgtgcttaactgccactttgtgcagtgtgtggtttctctctacttgtatatatatggagttagaagtggcttttgcttgcaccacagtgctttgcatttggcaattgtttcaacatttaacaatgttgtttgctgtagaaaatgtccctcaagtaactaaaagttgtaagagagattgtttttctttagtttgacaaataatgacaataccatgtttgatttgaatttttaatggtttattaatttttatagaaacctcttcctgttttgttttgttttgttttgttttgttttgttttgttttgttttgataccgagtcctgctctgttgtccgggctggagtgcagtggtgtgaacatggctcactgcaacctccaactcctagctcaagtaatcctcctgactcagcctccccagtagttgggaatacaggcatatgccaccatgcccagttaatttttttttcttttgttgaggcaggggttttgctatgttgcccaggctggtctctaactccagggctcaagagatccacccacttcagcctcccaaagtgctgggattacaggcgtgagctactgcacccacttataaacattttttataaaaaatgtttttcatcttagctatactgagcatcggtacaagttattttctactaaaaataataattttgaaaatgtcatcattagtatttctgtgtttccctttcatttatttatccacaacttttaaacatctgtgtcttccttcttggatttcttaaaacttgttaatacacatgtacatttttgtatgaactatgagtcactgttgaaatgcaattcaataaaatgctgaaggacaggttgagtgtagatcagtcataattattagcagtaacataatgtatcaaaatatataatatgtaagtgaaaaatataaactcatgtctagttgttagagtgtcatagaaatcctggctgatgcagttttaagttaggctttgactgaaaaatagacaagaagtttgctacattttaatggttctttcacttcatcactgaactaattttacatttctcgaattgacagtgatatatactacctgcctcaggtggctaaggctaaagtacatgggatttgaggggagaaaggcaaaagaggagagaacttaaaagtaaaacaataagactgatttgattaattaagagaaaatctggaaaaaagaaaatctcgttataactcttattttggtccaattgtcagaataaaaatggagagaaagaatcttaaaatggttggcatcagtacttacagcatgtgggccctaggatggaatgtgaaatttattagatgtgacattgtgggccaagtctatgccaataaattttttgagaattgaggcaattatgtaaataatttgagtaaaatatttttaaataaattatctaagtatttgatgtgactgcatatttttaaaaaatcaacctccataactagttgtctaaatatttcaatctagtatgttgtggttgacttagatttaaaagtgtaatcattttcgaaacataatatgcaccagagatttatgtattcttccttctttggtcccttgctcccaattataattttatccaaaaatgataaataatagcatcaggggcttttgtctctttgcttttttactgttgttgtggttttaacaaatacttatgttatatcagcagtgcaaacattaccaatatgcaaatgttttagtaatttaagtagaaacatcttaaattttgagattagatggttgtttagacctttaagtatttaagtagaactttatggaagacacacacacacacacacacacacacacaatcaatacttggttgttttttctcctgaatagaccaacttaatttttttatattgaaaatgtgagtgtagaatggtcagataaaaattcccttatacatgatcacaccagtgttgcggacctgggaattccctgtgatgaaaacttatctcttgtacttgtgtcgtacttactggatgcctcagttgcctcctgcctcagcagagttttggcctagggtgtactgaatacattttacagtttctttgtttactactcctcatccaaacactttcctattaagttctgatattaaatgattatccctttatgctctgagaaggcaatatgggttttaggtgcaaaatatatagtgtatgtgaaatacagtatttatatatagagaaaaattattctccatcaagagagcatataaaattccaggttccatcctagcagccaagatgacactgttcagaactatggtactctacatttcttagatttagtgctcataccagattttcctagttatttcatttattgctttcaaagctgcaaagcattcaggcatcacttcccatttattatgagtgggaaaaaagtatgttatccttggagatttatgccactggcaagtaaaaatgtaaacttattttttaaaaataagatctcctttattataataaacagattcagctgttaaaggtcaagtttctttctgagttatggtaataatatagcaaatacttttacaaataatcaaagattctataaatataggtacctgtttagatgtaaatgttaaaacattcacaaattatcctttcaacttctgtgatctaaaaatcaataggggtcatagggtttcatagaattgttctgctttttcttccaacataatttaataatacattttacagatgttgtttgaatattagacacagattgttttgtcaataaagttaaacagaggtatgacacaaaagcaaggaaaacagatgtaaaaaaaagaaaaaaacagtacacgatgcaagaagctctgggtcacttgtttgctattcaactacaaaattaaagtgtgggctgtatggtgattttccttgcctaggaatcacctagggatggaacagcttcacacatagaaagtaattgtattaagcaggtggtttaactttttcccttgagaattgaagtgtaacctacatttaaagtagacttcctaattgatcaatggagtaacaggtgcggtatattaaaaagaaaaaggagaaatataaatggaagaactccccagaatatttcagaatgggttgttgttcttcaagcctcggttaattgctatgcttttcaccttgagtgtcaattctaataatattacctttacagacgcttactctgggcttagattatagcaatcagtaatactcactagataaaatactgtctagttgctcataagaaaatattgaaatcagtcaaaaaatgtttagcttgcatattgcctgagacagagctggcggggcgccagacaggcagggtattattaggaaagctgagcaaatagctcgcagggaaaagagctgtgaatttagaaaccttcaggtattgtcatgtcagagagtcttaagagttcaacagagacactgctttttttttccttcagatttaaaaaatttccaacaaacaatcttctttgaaaatgactctgcagtctgttaaatatactttgttgtaagttttacaccataagtttactcagagcttttccccactgcataaaatcacatcgttaatactgttaaagacgaaagctccttatgaaagagtacactttgaaacactgtgctggctggaaaaaccctgccccttccaccatggggccctaagtctaggtgagaaaagaaatgaaggtctaggatgtaggaagggtggatttgaaagtccaaatatggttttgtgtaaccactgtttctcctccagccagcattcaaaggcagttgctgagcttctcaggaggacaagacactagctggaagctgcaatccagctggtacaacctgaggaattatgtcgggaccctgtagggttggggttcaagtgaggctcagagttgagtgagttgggagactgatttacccagcagggacccaatgtttctgaatatccatgattcatttcaaggcaatgaaaccagtgacaacggaggttgactttgaacatggtatgcaggtcagcacaacttgttgcaaatcctaattaagccagtcttcttgttttcagtgtgtctgtaagtatctggtcagagaaatgcaaacaacaggctgtgggtcatgcaacccgatggggcaggacttgactcccatttccctggagagggcatagggatgaggggctgagaggtgtcacggtcaagggggaagagcttggctacgcctcatccataggtggctaaggtgtaagcctcatgacaatttaaaatttacacagggcaagtatgggaaggggaaatgcagggacaggtcgctgcaatcaaaacatttcatccctcatccctactccttggatttgggcgacagtgtcctctggtttaaaatggacaagtaggacgaattagtcaggactcaaaggactcttttagctgtaatattctagactgtgtaataatgtgaatcaaagagaagtaaagtgtgcgctctgaaactctcattccagctttatcctaggagtggggaaggaaaaaaaatactttgataaggagacaaacagagaaattaattaaaaagttgtagttgtaactttcctcatcttacataagcaaatcaaacactgtaaaataaaaactagatgaaattaaacattatcacaagacatgaaaaagatgtgtgctgtcattttaggattcataataaagataaatcagttgtttttagcagtgtgctatgagtctatgaagggcatgacagataataggctcgaaatttctgaagttattgtacagcaaaatttgttttttcctcaggcattcaatctttttctccagtaattttgaacatgacaaactttttagtggatgcattaataatctataagtaatgggttgtcaggtgtcagttagataagattaaaagactgtttaagcattatccatttgcttctttgcatgagttttataggtcagcagaaataactttttgaattgtggttgtgtgtacgtgttctctctctctctctctctctctctctctgtctctctccaccccccaaacccccctccctctttcatttggctccactccaagcatacgtggaagaaccgtattacattccataaatcctgtatgtaagagcagatttgaaactcactatgtgaatcaaggggacaaatgtctcagctgtcttctgtaaatgtattttagtttttaaaatgttactcttcatcttctcaaaggaagctctgtaaggggaaacaaactcggctaagaggggcattgaagctttagacattagtagtttcctagcaagtcaggtttaggtctattcttgtcaaatatgtcttaagtgtgtttacatatagtttgcctttctggtattttctgcttgcacagacctgatctccacctattttgtgtcaacagttgctgaggctggtgttgggtgattaaccgttaagcacggaagcgcagtacccagagagaccctctctctcctctcacttacatcatcatctggcttcaggctgtgcctacagaaaacaaacagcatttttgagtggttaaaaagtcagcctgaaatattaaaaaatggggcaaatgttgcctcctggttgaatagaacagttttcttgaaaaatggagtggagccaggggctcgggggaaggaagtgtttccgagggcaaacgttggtcttagatccggtctgcattgctccagtgtgtgcacgccgaggagctttctgtagacgctgagggttatgttctgcttcgtttttgattttcaaggggaaagaggacatacaaaacaaaaacaaaaaaaaacctacaacaacatggatgcctgtaactttggcaaatataaggctgtcctgttcaatgccctcataaatcattaatattttcctgtctattttattttcattcttacaacgctcttagcctgaccccttaatatggaaaataattaactctttcatgctcctgatgcctgaacaataacaaataaacaaaagaatattaatctgttccgacatatttgagaggtttcttttcctttttaccctcttaactaaccagtgcctcacaagattagatcctatggttgaagaaggggaaaagtatttcctttttcaaacacattaactcctccaggtctgggggagatgattggagctacatgtaacttagctcaaaaataaatgtcctgcctttggtgagatctggcttaatattgataaagtcactttttttttttttttcaaaaacaatatgttgcctacggatggaagttaatgcaccatataattatacacacatacacacgtgcatgtaagttttcagtatttttactctaggatgctaactaaatcaaatgcaaaccagtagtcttgaggtttgttgtctggttgaagggttttgttggcctatatcactaggacatctgcagtggttgactttgtttgtttgctagtttgggtcatagttcagatgtacttggaaagggccggggagtgggtagggggatgttttaaaagcttatggaaagaattgaacatgtacaaaaagatataggatctcagccccctggctggttacctgacaatactgtttacagaaaggaaagtatagtaggttatggcagagattcctatcctcaggacttggggcggggtgggagggggcgcagagagggggtagcggggcacataagaagcatgtcacaatcattttgagtgaatatagtatttaaaaagcatatcgagaattaaattttgtttttagtcatgctatttcttttgaaattgcaaataacaaaggaatataagatttttgatgtgtcaaaagggagcatggattaaaattttagaaaccctatgctacagaaccataaagtaaaaatcctgggagggagggaatttatgcatcatacgacagatgaggctcagggctaattagaggcagggctaggactggttcctagtccagtgcttcttccagtccactagaatgtacttatttttaacagctttattgagatataattcataaaccatcatttcacccatttaattcaatggtttttagtgtgttcacagagttgtgtaaccatccccatagtcaattaaaagacattttcaccaccttaaaaagaagccttgtaccctttagctattgcccctctttatacttccgtctctctctccaacagctcctggcaaccactaatctactttctgtctctatatttgcctattctagacatttcaccaatgtgatcatggaatacgtggtattttgagactggcttttttcactaagcataatgtttgcaaggttcatccatgtcatagcatgtattatcagcacttcattccctttcaaggctgagcaatgttccattgtatggatataaggtatcttttttttacctatttatcagtggatgggcatttgatattcatctcttaccattataagcgttcatatacaagttttggtaccattaagtatttttgggaatgacagtatagcaacaaagacctgtcttaggtttgtataatttggaaagcacttttcattcgatcatcccaatttcagcacctaaacactgctagaaaacttgccggtgagtggcagttttcccactcagttctcatattcttctcactacacactgctctcactttccccgccactgggtagtgttttgactgtgataattacgagtgatgttcaaagaaaaggaaagttggctgggcacagtggctcacgcctgtaatcccagcattttgggaggccgagggaggcggatcacctgaggttgggagttcaagaccagcctgatgaacatagaaaaaccccgtctctactaaaaatataaaattagctgggagtgggggtgcatgcctgtaatcccagctacttgggagactgaggcaggagaatcgcttgaacgcataaggcagaggttgctgtgagccgagattgcgccactgcactccagcatgggcaacaagagtgaaactccatctcaaaaaaaaaaaaaaaaaaaaaaaagaaaaaaagaaaagaaaaagaaaaaggatagtcacactgaaatccagcaactcagcagtaaaatgcacaaagttccctcgaaatgacttagatgaccataagcattttcaaagatttgacagattccaagatgtcattttgctaatgttattgtctttattcgagagattgttttcctttaagtgtgtttccatttgtattttaaaggtctacaggttacatattgacatatattattacatagagcttaggtttcaagctttactcattaaaacagaggtcacagtgaacattccaaggatgcatgcaagcctccattcaagtcaaatcatcttcattgtgccattctatagcctaatttcataaccagacggaactagaaatcaagctaaattttgagatatcctctcttgacatgagcagagactccaggtctagaggtttatggttgctgaagacttggagaactgaggcaactacaggcaagatcctagagaaaggaaggagctcaaaggtactccaatatggagctaagattctttaatacctgattagggccaggcacagtggcttatgcctgtaatctcagcactttgggaggctgaggagggcagatcacctgaggtcaggagtttgagaccagcctggacaacatggcgaaaccctgtctctactaaaaatataaaaattagctgggcatgttggtgggtgcctataatctcagctactagggaggctaaggcaggagaatcacttgaacccaggaggcagaaattgcagtgagctgagatcgaaccactgcactccagcctgggtgacagagagagagagagagagagagagactctgtctcaaagacaaacaaacaagtaaacaaaaaaacctgatgtatatgggggctggttgccattctaacacaacggggttttaaattatttgggggaaactttctttggaaaataaagcatatttgatcattaaggtgaccatgcatcccactttcctgggaggctcatggtttatgcctgttgcccagtgtaattgttaacagtgcctcttcactctcaaacgtgtcccagtttagatgacaaattatctgctcatcatatttataatagagattggcagaaaactagaatttgctttaaatagatacatttattcagtaatgtgtaagggatgttttgttagattcaattttattgacttcttgtgaatatggaaaaattggaatttaaatgaaaaatggttcatctattaaactaaagagagacacttctgttctttgaagacattattatacctattttagctttttcattagtagaggaagttttgctatattatcctagatcatgctattgcttctacattgtgctaataatcattttaaatctatattctaaaccactattttttttagctccataaggttatacaaactcaaatttggcaaattgtctgttacatgtaagtaaatattttatatttacttaaatataaatataaaccctgtctcattctgttgcctaggccggaatgccgtggtgtgatcatgattcactgcagcctccacctcctggatttaagcaatcctcccacttcagcttccctagtagctgggactacaggtgtgcacaaccagacccagctaatttttacattttttgtagagacagggttttaccatgttgcccatggtgatcttatactccaggctcaaatgatcctcctgccttggcctccaaaagtgctggtattataggcataagccacaactccctgccatcactttttttttttttttttttaggatgaagtcatttcaaaatttgctttcaaggaaaattttctgtaatatataccaagtgatgaattatttgaaatttattttaatgcctaaggccaaaataatacatgagttttgatattactttgcatcatcattgtcaactagtgattggttcatttcacaagctgctttaaagagaattttagtggctgggtgcagtgtctcacacccagcactttgggaggccgaggaggttggatggcttgagctcaggagtttgagatcagcctgggcaacatagtgaaaccttgtctctacaaaaaaaacaaaacgacaaaaactagctaggcatggtgatgcataactgtagtcctcggaggctgaagtgggaggatcactcgagccagggaggtggaggttgctaagctgtgatagtgccactacactccagcctgggcaacagagtgagactctgtctcaaaaaaaaaaaaaagaaagaaaagaaaagaaaattgtatatgtaattaccttcctcaactgtggtagacaatttcagttctttctaaagtaatttggcaaatacccccaacactgttagagaaggaaaacttttcatgtggctgattgatggacttcttatgatttgaccaaatttcaatattatgtttatcaagtgggtagagaagagaggtgctcccttttcccctcctgtctattctcctcctgccgctgttctctacctcccctacccgcagacacactgatgatgtattgcaatcttggaactgttggatcctggaggaggttaagaaactagaaaaaggtgccaaaaacatgatttcataaggtttgacttgagaatgaatcaactttcttgaatatcttaaaatcatgtttcatgaaattttatttcacaaagaaagggagtgtagaagacttgaactctgaagaccaacagttatggatcattaaatccaatatgtaaatgtaaatctaaaataaagagttccaacagaaaaatttcggagtgatttttttattgttgtttaaaagaacagagagttacatgggagataactagacctctttccctgagggtttgtttataaaacatgccttaaaagttattaagggatgctgactttaaaaaaaagtagtagatatgattttatttaaatgactatgatatagatgaaggaaatgctatggtgaggaaattcctggaataaaaaaataacaaaatgttgggatttgacaactaccttccaatgataaattttatatttgaagatttttcatgaggtttaaattctaaaatttgaaaatatttatagaaatcacaaaaatgaattatgtatcaattatcatctgtgcatgtttattttctattgaataaagaatagtatatgcagaaatcttatatttaagaatgcacagtgttaatttttattactaagtttttatagagatattcctaacgctagctaaatattaataaaagattattataatcagcacttcccttaagggatagtgtaggtatagaaggcattgccactaatcaatctaactaattaacaaaatcttttcttaatagttgattagcttcttaggtacttgcagatgttgtaaaatgatatttctctgtctagttaggaaccttctgaagtaattctatgtccaccactatcctgctgacagttcacttacgcctagttggcaagaaacacgacggggggtgaagcagagccatgtcattgtttggaggcaacaccattgtgattttctgtggtttaccaagttggctgtggcatgctaacataaccaaatgtgggcttcctttaattatcagggagtaagtagagtggtaaacactgaggaatagaactaattgagtaaaggtgaaaatgctatttctgaaagtgagcaagtaattttttttttttttttttttttttttttttttacttttatcagtattacagagagccatacaagggaggaaaagggcaaaggtatgtggaaaatgttgcctgtgaaactgggaaactaccttgtgttttggctcctaacagatgcccactgtgatctcctcacctctcctggttctcacagagggaaactaaacttagcaattcagttttgggggaagagaccagggaaaggagtggaggataaactaaaggacaaaggtcagtttcaaaaagctgttctgccagatcttgctcagaaaactattcaggtatccaaagactgagaataaaaggagatagatgaaattagtccagtggaaaaaaaaaaagcctaatgataaataaacatctggggacaaaaaagaaagaacaaagcaaaacttcctgtatttcttttttaaacatgagtcacagtcacttcccattctccttgtcagattcctataaaaaattcaaaataaaattcaatttttagatgatccaggtctcagatttttggagattttgctcccctgccaactttcctctttcgctttttaggacttgagtcttaaacaaacaactaagtaaaaaagaaatatatttctatttggacatgaaaaaaagctatagagcaaacccattatcttcctttcctttgtaaagctttttgttttgagactggagatagtttggtcagaagaagaaattctaactcatgattctatgaaaaaaaggaaatataaagattcttctcctaattcagtcttccaccacctgcagggagtccaattcttaaaaagtacttcacaaaagaagactgtgttttcaaagcaaactagattttaagaaaccctatgttcgaatgtaaatgaaaaagcaaacgagacattttctaaccttaaagcatactaaaagatttactttttcaagaatcccaatgtatggcaaatttgaattatatttcattaaaccaaggtgtgtaactatctattttaatgagtgagcaaaactgtcatgtggctgtgtactcctgacattccatatctgagttttaagggctatgtaatattaggaccttaattgtaaaagtacaaaagtttcctcttacatctttaaactaacgtactttgtaaaagagaccttatcagtatggaaaattctaagattgtgtgtatttcatagatatgtatttgtattttatctcaaaccattttgtggctgttggagaatgtattttttatagtatattcaaattggaattttgtcattcttttttatatttctcttccaaaacactatttcttctatgttgaatctctaatatatatttgtgttcatacataaatgtagatatatatttgaacacacagacacacacacatacatataggattaagataactattttacttatgcctcttaaaatgacaggattttaaagtgacaatatgttcatttaagttcacatcatatgtacagttctttttttggttcggtgtttagagaattcttgataatttagactcttccacaatgaaaagtaaagcattctgtcacaaaagcagggaggatgagacacaaggtcaaagggcattttagaaacaaacagctggaccaatttatttaaacagatagagggatggggaactgacctcagtttgacttatagtgggaggagcaagaatgtcattttattactttgcccagaaggaaaatgtttttgtatctgaattcaccctgaagccatctaaacatggctctgctgtgtgtagcataattccaaagagagaggatgtataaaatagtctgggataatgataaaatacactaaagagaatcaaatgtggagattgtttaaggtcgaaaaggtgatgttgttttaaaaataaaatattttgctatttactttgttgttttcacatagatgtccatcatgaccccaaataattagttgttcatataagtgtagtaattgtaattcagtaacgttctgagagattactacatcctatatgtactaatgatatttcattatattgaattttttaaattaaatgtttcacaagtaagaagttgcaggtagacctactaatgtggtcaaacagctcagaaaaggtgattagtttttctcaggttttcagtgtttttgtttatgttttattttttaattaaaggtttccccctttgatatctacacattctaggggtagctgacatctgtgttcttaataacaacaaacagttcttgccaccaaaaagaagcaaataacatctagtacctgtgggcagttggctaagaggctgtggtattttttgtgtgtatttgctttctacctggggatcagagcaggcctggaataaatgtcgttggtgttgtccactgcaaggcttcaggaggacatagacaaagatcagcctactgagcagagagtggtccaggtattgaatggactcaatatcctagaaggactcacattctagcaggcactttttaagaatcactaatgtttaacctaaggattagaggggagaaggctataaagcataatggctatgtttaactatttgaagggctatcctgtggaagtaaaattagaattgcttacagtaccccaaggagttgtgctgataaaactattaggttgggtgcaaaagtaattgttttttttttttttaattatactttaagttctagggtacatgtgcacaacgtgcaggtttgttacatatgtatacatgtgccatgttggtgtgctgcccccattaactcgtcatttacattaggtatatctcctaatgctatcccttccccctccccctgtaattgttgtttttgccactgaaagtaatggcaagaccgcaattacttttgcaccaacataaatatttttgatctagtaaggcagaaccttctaacagccttgtttatagatggggtggcctcttaagtaaggtggtgagtgctgtattagttcagcagaggttacctatgtacttttgggggacagatatcatataggggattcatgtcagtgaccaaacgaagtgaccattacagcccttttgaaacctgaggtgtaatttttaaaaatgaactcatgactttaatagtcatagactcaaacctgagttgattattatgaattagtttatgggagtctcaatatgtgaatatgatggagacaagttttggaatacagataaatcaagtcactgtattcactctctctctctctctttgaatagccttatctttgcctatacacacaaacagtgcagccatcaaaattttcaatttacaaaatgttcacagtcatgcttcttccttgactaaacactggggttgctgccagtggtaattggcttgaaaccagctaatttttatatatctatttagtctggatattctagatgagtggcactatagttgcggtgctctagtcactgtgccagagcaccagggaggagggtgcttgctaccactgacagctgtgtgtcatttagcaaattattaacatctctttggtaacatgtgacctcaaagaagtcacctaatttctctgagcccaggcttctcatctgttaaaaatgtctcttcctatttttaggtaagtagtataagtcacatccataaaagattatgtttttaaaaagtctggaaaaagaaagttaatagacagaattccttccctctaagagtctgcagataatgaacagtaccatagataaagagatgtttttgctctcttacctacattagttactatgaaaattacttttggtatatgcagaatattaatattaaataattttctaattggtcatgcagtgaaggcagctaatgaaaaaacagattttttttcattttaattggttatttcacatggtgtttgtgctacacctgtgcttataatgagaatggagaattaatctaaccttctgctcacatgattccaattttcatggtttatacaagataatgataacctgatttgcaacacaatttgttgtagacctgtgttttaaatatttttattagcagttcagggacttcatatacaagaactgatataatatgtattgccaacaagaattagcacaaacagtataccttttagttagattctagtttcattatttgtttcaattacttctcagataatgaaagaacacaaggatacaggatattgagaatcttaaaatgttatgaagtatgcatttttgttttgaaaacctgtccctgtctgtttaatggtttggtttttaggaactattttccttcctgaagtgggcagatttacaaactagaattcatactggactatggatcctttaatcattaatagagccttattaaacttttcattgtattttttatgtcctgctcagatttgatctgagttgggaactaaaaggaatttactatttcagaatctaatatgtcctcttcattttctggatttgatacgtaatttttaatattatgcagaacaaacggatcttaagagaatctcatgcgtatgactctggagagcgtatattaactacttttttacatgtcagtgacttgtcacttttggagaggctacaaaaataattgtacaaaactatcttattaaggaacttaaagtaacttaagtgccttaataagatgtttataaattttcagtactagctggagaaagcaaaactataagttcaattactgtatatctgtgaccttgccttgacctcagactttacataaagagcaaaaaaaaaaaaaaacaacaacaacaaaaaaagccaccccaagaaatctctacaaggaatgcatttctctgaagtcctaagcagtgtgagttagtggtgataaactccagacattctctcatttgatggtgtgctgccatcccagttcattatcttaatagtgggcattaaaatagaattaggtttgcaagaggtaggggtggttttgataaaaattgtacaaaagaagtcagagaacataagattgaaatgtcactaattaggagaggtaacagatgcccttatgagcatctaactctttacaccaattttctctctttgcaaatgaaaggagtggtggctagtattgtttcctgaaaactctgctaattcccccatgaaaagatgaaatggaagtgtccaactgtggtaaaacaggcaaacataaatcaactcagaaaccccaagcctgtgtactcaaaggtcactgggggttacaggttttccagcacgtgaggctgcacatagagcaatggagagaactgaaggagtcccattttgccaagatctagttttactccaactgcgattcatcttttcctcttcctcaacccccccttttatttttaaggaataacgatttgtttcactttcttggttacaggtttattaatgcccggagaagaatagtgcagcccatgatagaccagtccaaccgagcaggcaagtcccccatagtgactgtattcaagtcacgcaagcgaaaaccatcctcaagccattcaccgggaggtccgctacctggtaaataaactgggagtgagtataggaacgcctggcaattaaaattaaaccagtttcgtttcataacaacactaatcaatttaacatcattataaaacgtttggagaaggtggaaaaaaaaagccaacagagaaaagtaactcttaaataatatgctcagttacaatattctttgtacacattcaatatattaatgttatttttttttctgagtttgccttcccagctctttctgctactatgaccactccctggtgcatggcttggtgtggaattgctgtaaactttattacctgtcaaaagggcaaaggggtcaggattgcttgtgggactcagtaaagttcaaagacattcaatgaggtagagcttttgtgtgctttaataacccaaggcagcttacttctgaagcagcttttcatgtacagttaaaacacgggattcaggtagtggtataaatacatggttcttatttctcagaccttctcttgttaatatccatcttctggtgttcgactttttttttttttaataacagtctttttgttttgtttttaaattatgagcttaaaatggcgatacttctatgggatcctggcttgtggatctaaaaatccaagaaacatctctctaggatttgtttttgcattataatatgccagtaagataacaagagtatttgctaggggtgatgtgagtctttactttctttatgaaatactctctcatctcttagggagcactatggaaaactatgttagcatcgcattgaggcaacacacatttactcctgtaactttttttcttccaacacccattatgtggtcaccagacaaaacccaagcagaaagtttccacaccttaactgttccctctttgagctagatgttttaaaaactcagtcacagaggtgtgtagatctagtctgagagaaatttcactttgaatgtttaaaaaattatactagcctgctatgttctgtctctttctctggtatgttctcctcttagtctctcttgggctatttcttttgctctcagagactgttattaaaaaaccacattctgtacttttgtagtaagtcaaggaacaccttataatcctgatggacagcccatgggaggtttcgtaatggacggtcagcaacatatgggaattagagcaccaggtaagactttgtttttgtggtagttcctcatttttgactccaagagtgtcatcccctcatcaacacaggtaaatccgcctcatccttttctgttatctcaagctggctgccttgccttgtctgctatctgtgcatctaagatattgcagaggggaagccaggatctttatgcactgaagatctcactatttctcaaccctctagatcctgttttttttttaagggtcttttggcactatctgttgactttgctcattttctggcctcttcttggatttttatctcccttctaggacctatgagtggaatgggcatgaatatgggcatggaggggcagtggcactacatgtaaccttcatctagttaaccaatcgcaaagcaagggggaagtaagtacaaatggggtctttgttttcactttgtcctaggaatatttttcctcttgcattttcttatgttctccttgcccatagcttcatgcttgttcattcctttccattaaactcctggtttcttgcttccatcattttctttttggttgtgatcaagcttttaagcttataaatactgtgtatgatgtacatttatcctgtgtgttgctattgtacagtactgaccacatgacaaaacaagaaacagtcaggaggtgggggagtgggttgtcatagcaacagactgatttgcaaaatgtaagcagtctgcagcagtgcaaggagaggaaagagcatgtccccaaagtgtcataaatctgtctaaccgcagttgatgcatgagttacatttctacactaacctgcaagacaccgaaaagctaaacagagacttcttttaggtaaaataaacacaagctttacttagggtaagtaaaggcatattttgagctccagtcaactaaactttgattttttttcttagtttattcctttgtctgtccatcataatgggattacgtgtggcaatgggaaaagggagaatacaaaatagaggtgtgcacagcaggctgcggggcttagcccaggctaattgactatatccaaattaagtatgccatcacttgcagtgtgacaaatggatttgacttattcagtatacaaaaatagagatcattaatgcaatcttcagtggcaggcctagtgaagtgggcctaggaaaactgtcccagattctcactcttgcattttctctcctataaagacactccagcaattcgagttcaaacaagtaaaactgttttgaacaccaaggctcttgttcacttcctaaattacccctaatagcactgttcttgctttgtttttgaaattaaaagcagttatttcagagtcttgcttgtgtctctgattatatttatgcactatttaaaatcactgctgaggccaggggtaattcgtactggtcatcttctctgggtgtgagtcaaatataagtttaacaattagctctgaaaacattccattgagctggggaatgcaacagtcttattacctcatcatggaattctctagcttagttaatttaaatattgtttcttagtttctgggtcaattaaatttaaatgatgtagtttatgcttcgtgaccaattaaattactaggttattacaaaaaaaattatcatcttttttgattaaagagctgtgggtacagtatattttataagcaattttcattagttcaaaaatgttcctttaggctagattaagcagccattcattgttagagcctggagaccttattcgaaggtgttcatcgtattcacagtgcactattacttagaactaaagccaattgaacctacttagcaatagcgttatgcctttcacccttgatgattatggagcttatagctctcagaaacaatacacctgtcagtttccatcaactatagcaatccatgcagaagacaagaggccccctcaaagcaggaggggtattgttttaggtccaatttttcttattgttctcaaaatcattataaggtggacagtgttttgtgaagattttcttttccccagctctaagaaaccatgtggaaagaattcattgataactgttttgatttttttctttttttaagtacaggttttgctaagtaatcacccttagtgagcctgtgtagttcagctgcctgtgagatgtttggtgaccagctcagtgtattcttgtattcttgatagagaatatttcaggagacaaaagtgcttcttcagaccagacctcaaataacaattttattctttttaataaataagacctcagtaggcggacctgataacagtgacaatgaaaggaaaatagtggcaaaatgtgagtttccagcatgatgtttctcattttattttcttctgtatgaatcaaaagaatgctttacaaaaccatgttcccttaatcacagtgttctctggcttttataggattgtcatagccaggaccacactattgctttttcataacattttctttttgtttctttcttttgaatttcttacagggctgcaaagtatgccaggggagtatgtagcccggggtggtccaatgggtgtgagtatgggacagccaagttatacccaaccccagatgcccccccatcctgctcagctgcgtcatgggccccccatgcatacgtacattcctggacaccctcaccacccaacagtgatgatgcatggaggaccgccccaccctggaatgccaatgtcagcatcaagccccacagttcttaatacaggagacccaacaatgagtggacaagtcatggacattcatgctcagtagcttaagggaatatgcattgtctgcaatggtgactgatttcaaatcatgttttttctgcaatgactgtggagttccattcttggcatctactctggaccaaggagcatccctaattcttcatagggacctttaaaaagcaggaaataccaactgaagtcaatttgggggacatgctaaataactatataagacattaagagaacaaagagtgaaatattgtaaatgctattatactgttatccatattacgttgtttcttatagattttttaaaaaaaatgtgaaatttttccacactatgtgtgttgtttccatagctcttcacttcctccagaagcctccttacattaaaaagccttacagttatcctgcaagggacaggaaggtctgatttgcaggatttttagagcattaaaataactatcaggcagaagaatctttcttctcgcctaggatttcagccatgcgcgcgctctctctctttctctctcttttcctctctctccctctttctagcctggggcttgaatttgcatgtctaattcatttactcaccatatttgaattggcctgaacagatgtaaatcgggaaggatgggaaaaactgcagtcatcaacaatgattaatcagctgttgcaggcagtgtcttaaggagactggtaggaggaggcatggaaaccaaaaggccgtgtgtttagaagcctaattgtcacatcaagcatcattgtccccatgcaacaaccaccaccttatacatcacttcctgttttaagcagctctaaaacatagactgaagatttatttttaatatgttgactttatttctgagcaaagcatcggtcatgtgtgtattttttcatagtcccaccttggagcatttatgtagacattgtaaataaattttgtgcaaaaaggactggaaaaatgaactgtattattgcaatttttttttgtaaaagtagcagtttggtatgagttggcatgcatacaagatttactaagtgggataagctaattatactttttgttgtggataaacaaatgcttgttgatagcctttttctatcaagaaaccaaggagctaattattaataacaatcattgcacactgagtcttagcgtttctgatggaaacagtttggattgtataataacgccaagcccagttgtagtcgtttgagtgcagtaatgaaatctgaatctaaaataaaaacaagattatttttgtcatgctgactccactgcttgaaaaatttgtttactgccccccagatttttaaagattaatacagtaaatataaaaattaattttggctccctaagccatatatgtatttgacaattttaaccgcaaagtaagttgtttaataataaccactgatttctttaagctgacttaatgaactcctaatatcagcaaatttgaggcctaaaggcactaaactaactctagactcagaattacatccaacagaattactcatctaatatcagtgaaattattcttgcacataaaggcaaacctaagtacaaagttaagtcttttactaaaggatgttacctaggatgagcagtatatgtttattaggaaattaactacatgaattgaagagaccagacttcaaaatctaatttttataaatatgctctatgttctcattggataaaactggttattaaccaattttccagaacagctgtacaagatttctgcatggcagccggctaaatggtagaaaataatatgtttaagctggaatagcttataattttatttaaataaaattgctgctataaaaagtgcttcccaaagctaaggaaaatatacaaatattttaattaaggcaaattcgttttaaaaaataagcctttcagtagtgattgctttgtaaacaaaggatgggtcggaggagagagagccttaaactcaagtctgacattcaggcccaagtcaccctataaaccggcccttagcaattctattttctattcgaaaagagaaaccagctgtgggttggctttactaggtgatgtgtgattgactgactcacctgctggagtagcaatgcattctcaccttttgctgatggggccttgtttctaaacacgtggatgcgcagagagcaaggctcagcctactgcagccatctctggcagcgcttctacccctccccagcccatagatgggattgtttaaatctcccttgttgacctagtggcaattcttcctctacctaaatagtcgatgtgagtgaaatcattctcttttgataggtggttgctagcagttaacaaccatttatttactttaaaaattaataataaactttataaactgtctatttgctcctcctctccagtacatgcccgggtgagttggttattttcagcctttattcctgaggaggctcaggatgggtgggggagggaaagaaaggggaggaggtgtggtggggagagggagagaggcgagagggagagacagagagaaagagagaggcgctaggggagggaggtttacaagtgaagagtagttagggaatatggtgactctgaagaatcgagatcagcagtgtccaggaattagaaaaaataaactgctatttccgtgagttccccctctgtgagccatttaggtgagagcctcgctcttcgcagttcctttcttcccctgcctcgatgccctcccctcttaatgctattttagcttttcctcttgtaaatttcagagccagctcgaaggttattgaggacacttatccgaaagaggcaaataatagaggtgctgagagtgtttttgatgtttcctaaaaggcaaaaacaaaacgccctcctctaaacaagggcacaaaattgtacctggtttttatttttatttggtggtgggggggtgggggggtggggggggggtggaaagggggctggctctggctgaatgagactactttttaatatgatttaaatttttttttcaaaaaattaaaaatattttaccctatcatatttaatcagctgtaattataacacattcaaaatgaataatatgccttgacagtatttttattgttattgttcattgcatgatgttcgactgctttagaagcacaggaaagagaagtaaacgcgctacaaatggggaattaccctcgtttagcattaaaattcatttagataaaattgccacaaacatttaaatgggaagattagttccccctcacgccttattgcactcgctcaatggttccgttaagaacattttacacgttggaaattccgtcttctcagacggcttgctgtttcctagttacccacattcaaagcaaaggcagcagcaaaggcagccgcagcagcagcagcagggaaaaaaaaaaagttttggcaactggtctgcaattcatccgctgctcgccccagtctcccctccgcccgctgcagtctgcccccaccccttccccttccccacccctacctctttcccctcattatgtaattcgcagagtcccgtcctcgaggaaacacgttgcctagttgtgtagtatttatatacaatgttaaaatacaaagaaagaccctaaagtcagtcgagtcggttcctctctgggtctccctctccctctcctgttctaaaatgaagatttagcttgaatgtgctgagtttctcacatcccgtaccctgaggccacaaggcacgttttttggctttcatttctgccaggacttttccaggaaattcaccactgcttttcgcttgtattagaaacgtgtgaaagaattcgtctgaaaagtccatgcaccgtctagcttttctctcccccctttttttcttctccttctcctcctcctcctccttctctctctctgtctctctctctctctccgccccccactctcgcactcccccatcctcctctctccccctcccttcgcagagccacaggaaaagaggaaagtcggcttcgactgccatcttttggggatttcgaaaaacgactcggtaggaaacggagggaggcggaggcgcgggagtgggggaaacccccttattatccagtgtcggaactggctcccttaatctgatgcttaaatatttgatgtggaaaaattacccataaaattagttactaacaatttcaaattgaaatcacttatcgaattataaacgcattaaagctgtatggatggtattaggagttcctcgggaggcagcgggtgtctccttgaagtgagccaggcgggcgagtttcgccccggggaaaagagcccccagccgagcccgggggcaaggccgggagggcggcgctgcaacctgggcgcagggtccgggtcagggggatcgagcgggcggccgggtcctggtggaggctgcggctgcttcggctcgcgggggcggggagaaggggaggggaaggagccttggtgggaggctccgaccccggagcagaggcgcctaccagcaaacttcgtagtgaagtcgaaggattctgaaaaggaaaaacgcaagccctgccctccccctccctctcgcgtctcccacgcggcgtgcagacttcgcgctcgactttgcgatcggggttagttgctgtgtgcagtgtcccccaagtctgcgggaggagcggaagggtataggctccagtcctggggttgggcccggctccgtgccccgagaggaaatccagcgggcaactgcgcagagctccagccaggacgtgctacccctgagtccctcgatgcgctgggtcccggcctaggccccagtgcgtgggcgggcaggtctttgcccagagaccacagctctggtcgcggggggtggcgggggtgggggggctgcacgggcgcctgccttaccctcctgccctcacccccatctgagtctagtctaagggactgttgactttgtctctggagatggggcgaccaggggtctgcgaaggaggttgtggagaggcacctcctgggtgcaggtccgggcgctctttcctcggaacctcacggagtgctttgtagtagcctggagacttcctaatagactttgccacatcgggggccccagactccagagtcccatagtggccctgggagcgcgacccagagagcctgggggctggagggcacatggaacgcgtgcacggcccactaggagggcgttgggaggagagtgcccgagtctggagccgcagccgggaagccgtagacagcaccccgacgccttaggcagaagctcctcaggatcactttaaaagctctgcaaactttccccagcctttcggataccctcaggcccttggcccacgggaaggcagtaaaaacgtaacttcatgctgcaaagctcccgggtaggcgcttggacgccgatggagagaggcgtggaactgggtagtggggcgccctgcctggctgggcacttttccttgtctcattctcgtctcccatgccatgccttacccactggctgctagcggcgcgtttcacttaaggtggccacggtgcggagactacaggagcctgggaatcccagggtttggggaaaaagtagtgagcgagaaaggtggggtcggggacctgaggaagacagctgatggctgggagagggagggctcccttttcggcccgctctacccgccaaggagtctgaaacattctctccctaggcggagctgaaaggaaaaacaaacaacgtattgagcaatcagttcgccaacatttgagctttaaagcgcctttgctctgaaaatagtaccctgggggtctcagtggggagatgggggaagcatttttagggccttgattctggcttgccgcgccccacgggtcacccctccgcgcgctgcctcctgacatcccggcgctctcagcccactgaggggaaacccgggcggtgcagccctggagaaaagggatttagttttaagccagtctcccatcgatcgggtcggtaatttctacccctgcccactcgcagacacactcacctctaccctaaagcattaaggtcattacgcgagcaatgatcttaatttccaggcggaaaacgagtcccgggacctcgccgattggggaagcagtgaataaagtcacctgcttcaggcacccgcttggcccgctcctcccggtgggggccgtgtgtggcagggagcgccgagcgggggtccctagctccacgccgaggcggaccgggcaggggtcagaaaccctgtgtctgttttctgcggggtgacgacctcctgtaagggtgggattgcttttgcttgctttccttctcccctccctctgcctttcttcctaggcctccctcacatctcagtactctttcttcctcctcccctcccccaaagtggcaagttccccttctccacctagtgtccagaggttctgcccctctcctagtcccccgctgcctcagggccgtcgcagaagtctggtagcccgacgcctttttgcgcccatctacctcgcccacctttctgggcatgggtggggtggggaatgttcagtgaggcccttttgaagccgcttgctgagggcaccctgaggctttaaagaaccagatttctcgatttagggacgatctctgcgcccattgataactccatcccaaagaaacccagcacagcagcaaacacccccagcagtcgcctgctcctcagcccccgccttggcacagagcagcgtctggcactgcggggagatggaggcgagccacgcgcacccgttcccttactggccgacccgcgaggcgccagcttgttctggagactcagtttccactggacaaaagcaggggaaacacaacgcaagggctgtgcaaatccacgttcccgacgcccctccaccccatcccaatctgatttttgagacgtgcattttcaggtagtcctaaactgtgaacagcgagctttgtgtgttatctagtgggggtggggatgaaaggggaggagactcccactgcccgttccagtctttaatgtttgaaataacgaaatgccttgtgtagcagctgctgcttgagccaaaactaactctttggaagacggaaaagagtgaaaggcaaagaaagactgttcattttttttcttttggtgccgtttgggatgtcatctgtttccttggcgactgtgttcagcccccggagcccctgggctcctggattgttaggggggaaaagcatgctatttctgcaccgtcatttatcactgtcaccgcataatgattccccttgcagccccttattgatgtttgtaattgcattatctcataaaggaggatgatcaatgaaaccgagccgtgcattctggggtcagaggaagccaaagtactgtttgtcccctttaatacaacaagtactcattatctttaggtctgcattcaaaaaatgatctgatctagggctgaccctgtcggacatcccaacactttctaaaacgcggtttgtgtaaccttttgcttaaatgctaaatcaagtacctgtcttgcatttcaacgaaacaagatgctaaaactgaatgaaaaaaaagcatttcttttttttttttccccctgggaggggtgcgatcgtctgaaggtgcatgagattttacactgtaactgcttggtaatataatacagaaaaggcaatcccaatctacatgagtcctaataaatagaaaaaaaattggggatgaggggaaaaaggcaggtagctgggagcttttaacaaggtcggtactaaaagatcagaataaaaccacatccagtttaattaataatagctataaactgaaataattccccatgattctgcccttgcttctcctttttacagagtcatatctcttcagtttagagaaatgacttttgtggctgttcgattctcacaacaacaataactaaatcagttgcacactgttatctaaaaccatctacaaactccagcaaataaaaagaagttcatttgtctattaaggcaagcatttagttgagcagaaatatcccagtaacactgaatagagttcgtgtaatcctatggaaatcaagtcatcttgttgcactgaagtaaatgaaaaaatacaaaggagaaaaggtccaagtgtaattgtaattttaaactaaatgcattattggactgtcacagtgaaaacgtgattgttcggctgcggggggggggcggcgagtggacataaacttagctcacatttaacttaaaggtttcagaaaggaaatatgtattccatatttggtgatcatttgtggaaagaggagaaattgaaacaattctaacccatcattttagtatactagggggaatcattccttcaaaagcagaattaagcaaaaagcttattttaaacattgcaagtctgtattagcagaaaaaaaaagtttcaaattttctgaaaatgtatgtcctctctatgttaataagatgttgacagagagaaagagagagagagagagaaactaagttcaggtgttttattttttaagttctagatacttctaaattaacgatataaattaatgttttacataaaaagatctaaatgaaaagttttcattatagttgagaaaatgagtacttagagtgtgctctgataatttgacacattgacataaaaccttaaattgaataataaaacaaacggctaaaatattcccccttggaaaaataactttaataataaagctagaaaagttttaactgtgttgaaccatcacttttttctctggaaggcagattatcctaaagagtattattttccagaaattctgtcaaggcactttgaaataatatatgtttgtattatttaatattctgacacttccgttctttgaaaatgctcagactggaatggatacgtagccatgcatatatttaatataaatggtatcttgtcgttaacataaaatattaaagagaaaataaaactttgggctttgtcagttaagatagaattttttagcataatactctgattttcaaaacataaaattgaaaccccttgattttaaccaatcaacacaagtctttctcttatttggttggggatctgcatcatatactctttctatttttaatatttagtgttgtagcccactgttaatgaaaaattagtctcgtttcaaaattatttatttatggaacgaacatgattaaaacataaacacacaaactgcagctgcaacagaaaaaaaacttgatttatggttattaaatctttgatcgccatgttaatgtttctttttctacctttcatttgcattttaatctatcgaatctttacagttttgctgcctcctatttcaatgattgattacagatctgaaataagaaaaaccaagcctagcttttcttttcctttcttcgctttcttttttctctttttcttttccccccctccctttccccccgggtagatttctgaaactttctctcaatgctaatgtagacaggacaaattaattctgctcttttaaatgtcaaagatataaataaaaaatgttttctgtcccaaacgtgaatattttcccagctgcttgttttcgagtcgtaaaagatcatcccagcaaaatgcaattaacagcgaaacacacacacatacactcacacactcggcggtgcggaatttttttaaaggacgtgttgttctgagttgaagaaaggtgagaagttcaccgtcccttcaccatcagtagcctcgctgcggctctcctctctctctctctctctctctctctcacacacacacacacacacacacacttggaggtttggtccctagttctatctgtgatctaagtcacacaaacaaaaacaagcttggtggcagcttgttgttgttgagtgttgttgagttgatttcttgagataagcagtgtaaagacaaaagggggagcgatgcaggtctgtttgttttctttccccgccgccccactgtcccttttctcgtctccccgcgcacctccccagacgccctgccggggtggctccgcggatgaggcggtcatttgctgtccgctttgcggggacgggtcactttccgcgctggcgtgaaagcaaatgtggagctgcttttggaaggcgccggccggacgtcggctaggctccttctccccgcggggctgagggcccctggggctctgcaaggctctggctccgaacagattgcgcctcccgcctggctgccagtaggaactggggtgggagccgcgtaactaacagttgcgcgcaggaggcgagccccaggtgtgagcgcagaggctctctccccagcccgcgggtctgggaacctttcaggacgcctccctccccaactcctacccatgcgtctgctccctaggccgagcccccctcgtgaggttttaatgaccgcggacgcaggggagcccgcacttgagcgaggaccgacttctctggcgggtccacgctgctcgcgcttgcgtccgcgggtagcgcgctgtgcccgggtcagggggcgagctgcgagaagtaggaggggtcaagacccccagaaatccctccatgggcacacacacaatcaagaatagggttgagggtcttgagaggtagaactaccctaggcagggcttctccaactcggcctttggaccccgcgcgcgcccaagggcgtgcccaccgcggaagcacagatcatcttcccgggactgggtctcctggaccctgcgttgctccctttttcctagcggccccgtagctggctgccgcatgtagggcgatcttcattaacttggacgcccaacgtgattgaaatagagaggaggaaaaaacacatttgatctgggccgaccctttgtcttgaagcagattaggcagcctagaaataggaggaaaaacagaaagtctaggcaggaaaacttattgtgttcacaacatataaaaatgatccgagcggtctggtacctcaaggggtgaagatagatccttgtagacgagtgtgaagacatgactgggaagatttaaagtgaaagaaacggcagattattaagaaagtaatagtaaggtgtcccatacactacagttttattgttgggtagtaactacccgatttatttattgccggggctatataatagagataatgaccacaaactcaagataaattcttatgcgcccagccggtcaattcttttttatttaagagagtgagcctgaagggtgagcctcatcccctcccctcctcgaagatccgtcttgctttctaccatattataagcatgacatgcaaataaataagtgct

SEQ ID NO: 2675 - DNA, 3357 bp, Homo sapiens
atccacctctccgcctgtgcaacacacactttacacacgcacggggactgcaagcgggcagcatcgatcgtggctcctttaagacaaactcagacagacattttttttaaccctccttctctaatctccttccagtgcagcacttgcaaagagggagagagagggagagaaagaaagagagagagagaagagagaaactgattaggaattaggactgattcaagggaagcgagcgctagggctttgtgcatttgaatattaacatttgaggtgttctgaccagaagaagacagagcggatgatcattcattcaccacgttgacaacctcgcctgtgattgacagctggagtggcagaaagccatgagatttggtagttgggtctgaggggcgctcttttttttccttttctttctttctttctttttttttttttaaactgatttttgggggagagaagatctgcttttttttgcccccgctgctgtcttggaaacggagcgcttttatgctcagtgactcgggcgctttgcttcaggtcccgtagaccgaagatctgggaccagtagctcacgttgctggagacgttaagggatttttcgtcgtgcttttttttttttttttttttttttccgggggagtttgaatatttgtttcttttcacactggccttaaagaggatatattagaagttgaagtaggaagggagccagagaggccgatggcgcaaaggtacgacgatctaccccattacgggggcatggatggagtaggcatcccctccacgatgtatggggacccgcatgcagccaggtccatgcagccggtccaccacctgaaccacgggcctcctctgcactcgcatcagtacccgcacacagctcataccaacgccatggcccccagcatgggctcctctgtcaatgacgctttaaagagagataaagatgccatttatggacaccccctcttccctctcttagcactgatttttgagaaatgtgaattagctacttgtaccccccgcgagccgggggtggcgggcggggacgtctgctcgtcagagtcattcaatgaagatatagccgtgttcgccaaacagattcgcgcagaaaaacctctattttcttctaatccagaactggataacttgatgattcaagccatacaagtattaaggtttcatctattggaattagagaaggtacacgaattatgtgacaatttctgccaccggtatattagctgtttgaaagggaaaatgcctatcgatttggtgatagacgatagagaaggaggatcaaaatcagacagtgaagatataacaagatcagcaaatctaactgaccagccctcttggaacagagatcatgatgacacggcatctactcgttcaggaggaaccccaggcccttccagcggtggccacacgtcacacagtggggacaacagcagtgagcaaggtgatggcttggacaacagtgtagcttcccccagcacaggtgacgatgatgaccctgataaggacaaaaagcgtcacaaaaagcgtggcatctttcccaaagtagccacaaatatcatgagggcgtggctgttccagcatctaacactggttattgaaatcctaatgggatgggtgatgaattttcttaggtcaggtttattaatgcccggagaagaatagtgcagcccatgatagaccagtccaaccgagcaggcaatcaaggaacaccttataatcctgatggacagcccatgggaggtttcgtaatggacggtcagcaacatatgggaattagagcaccaggacctatgagtggaatgggcatgaatatgggcatggaggggcagtggcactacatgtaaccttcatctagttaaccaatcgcaaagcaagggggaaggctgcaaagtatgccaggggagtatgtagcccggggtggtccaatgggtgtgagtatgggacagccaagttatacccaaccccagatgcccccccatcctgctcagctgcgtcatgggccccccatgcatacgtacattcctggacaccctcaccacccaacagtgatgatgcatggaggaccgccccaccctggaatgccaatgtcagcatcaagccccacagttcttaatacaggagacccaacaatgagtggacaagtcatggacattcatgctcagtagcttaagggaatatgcattgtctgcaatggtgactgatttcaaatcatgttttttctgcaatgactgtggagttccattcttggcatctactctggaccaaggagcatccctaattcttcatagggacctttaaaaagcaggaaataccaactgaagtcaatttgggggacatgctaaataactatataagacattaagagaacaaagagtgaaatattgtaaatgctattatactgttatccatattacgttgtttcttatagattttttaaaaaaaatgtgaaatttttccacactatgtgtgttgtttccatagctcttcacttcctccagaagcctccttacattaaaaagccttacagttatcctgcaagggacaggaaggtctgatttgcaggatttttagagcattaaaataactatcaggcagaagaatctttcttctcgcctaggatttcagccatgcgcgcgctctctctctttctctctcttttcctctctctccctctttctagcctggggcttgaatttgcatgtctaattcatttactcaccatatttgaattggcctgaacagatgtaaatcgggaaggatgggaaaaactgcagtcatcaacaatgattaatcagctgttgcaggcagtgtcttaaggagactggtaggaggaggcatggaaaccaaaaggccgtgtgtttagaagcctaattgtcacatcaagcatcattgtccccatgcaacaaccaccaccttatacatcacttcctgttttaagcagctctaaaacatagactgaagatttatttttaatatgttgactttatttctgagcaaagcatcggtcatgtgtgtattttttcatagtcccaccttggagcatttatgtagacattgtaaataaattttgtgcaaaaaggactggaaaaatgaactgtattattgcaatttttttttgtaaaagtagcagtttggtatgagttggcatgcatacaagatttactaagtgggataagctaattatactttttgttgtggataaacaaatgcttgttgatagcctttttctatcaagaaaccaaggagctaattattaataacaatcattgcacactgagtcttagcgtttctgatggaaacagtttggattgtataataacgccaagcccagttgta

SEQ ID NO: 2676 - protein, 318 aa, Homo sapiens
MAQRYDDLPHYGGMDGVGIPSTMYGDPHAARSMQPVHHLNHGPPLHSHQYPHTAHTNAMAPSMGSSVNDALKRDKDAIYGHPLFPLLALIFEKCELATCTPREPGVAGGDVCSSESFNEDIAVFAKQIRAEKPLFSSNPELDNLMIQAIQVLRFHLLELEKVHELCDNFCHRYISCLKGKMPIDLVIDDREGGSKSDSEDITRSANLTDQPSWNRDHDDTASTRSGGTPGPSSGGHTSHSGDNSSEQGDGLDNSVDSTGDDDDPDKDKKRHKKRGIFPKVATNIMRAWLFQHLTLVIEILMGWVMNFLRSGLLMPGEE

SEQ ID NO: 2677 - DNA, 3289 bp, Homo sapiens
atccacctctccgcctgtgcaacacacactttacacacgcacggggactgcaagcgggcagcatcgatcgtggctcctttaagacaaactcagacagacattttttttaaccctccttctctaatctccttccagtgcagcacttgcaaagagggagagagagggagagaaagaaagagagagagagaagagagaaactgattaggaattaggactgattcaagggaagcgagcgctagggctttgtgcatttgaatattaacatttgaggtgttctgaccagaagaagacagagcggatgatcattcattcaccacgttgacaacctcgcctgtgattgacagctggagtggcagaaagccatgagatttggtagttgggtctgaggggcgctcttttttttccttttctttctttctttctttttttttttttaaactgatttttgggggagagaagatctgcttttttttgcccccgctgctgtcttggaaacggagcgcttttatgctcagtgactcgggcgctttgcttcaggtcccgtagaccgaagatctgggaccagtagctcacgttgctggagacgttaagggatttttcgtcgtgcttttttttttttttttttttttttccgggggagtttgaatatttgtttcttttcacactggccttaaagaggatatattagaagttgaagtaggaagggagccagagaggccgatggcgcaaaggtacgacgatctaccccattacgggggcatggatggagtaggcatcccctccacgatgtatggggacccgcatgcagccaggtccatgcagccggtccaccacctgaaccacgggcctcctctgcactcgcatcagtacccgcacacagctcataccaacgccatggcccccagcatgggctcctctgtcaatgacgctttaaagagagataaagatgccatttatggacaccccctcttccctctcttagcactgatttttgagaaatgtgaattagctacttgtaccccccgcgagccgggggtggcgggcggggacgtctgctcgtcagagtcattcaatgaagatatagccgtgttcgccaaacagattcgcgcagaaaaacctctattttcttctaatccagaactggataacttgatgattcaagccatacaagtattaaggtttcatctattggaattagagaaggtacacgaattatgtgacaatttctgccaccggtatattagctgtttgaaagggaaaatgcctatcgatttggtgatagacgatagagaaggaggatcaaaatcagacagtgaagatataacaagatcagcaaatctaactgaccagccctcttggaacagagatcatgatgacacggcatctactcgttcaggaggaaccccaggcccttccagcggtggccacacgtcacacagtggggacaacagcagtgagcaaggtgatggcttggacaacagtgtagcttcccccagcacaggtgacgatgatgaccctgataaggacaaaaagcgtcacaaaaagcgtggcatctttcccaaagtagccacaaatatcatgagggcgtggctgttccagcatctaacacacccttacccttctgaagaacagaaaaagcagttggcacaagacacgggactcaccatccttcaagtgaacaattggtttattaatgcccggagaagaatagtgcagcccatgatagaccagtccaaccgagcaggcaatcaaggaacaccttataatcctgatggacagcccatgggaggtttcgtaatggacggtcagcaacatatgggaattagagcaccagggctgcaaagtatgccaggggagtatgtagcccggggtggtccaatgggtgtgagtatgggacagccaagttatacccaaccccagatgcccccccatcctgctcagctgcgtcatgggccccccatgcatacgtacattcctggacaccctcaccacccaacagtgatgatgcatggaggaccgccccaccctggaatgccaatgtcagcatcaagccccacagttcttaatacaggagacccaacaatgagtggacaagtcatggacattcatgctcagtagcttaagggaatatgcattgtctgcaatggtgactgatttcaaatcatgttttttctgcaatgactgtggagttccattcttggcatctactctggaccaaggagcatccctaattcttcatagggacctttaaaaagcaggaaataccaactgaagtcaatttgggggacatgctaaataactatataagacattaagagaacaaagagtgaaatattgtaaatgctattatactgttatccatattacgttgtttcttatagattttttaaaaaaaatgtgaaatttttccacactatgtgtgttgtttccatagctcttcacttcctccagaagcctccttacattaaaaagccttacagttatcctgcaagggacaggaaggtctgatttgcaggatttttagagcattaaaataactatcaggcagaagaatctttcttctcgcctaggatttcagccatgcgcgcgctctctctctttctctctcttttcctctctctccctctttctagcctggggcttgaatttgcatgtctaattcatttactcaccatatttgaattggcctgaacagatgtaaatcgggaaggatgggaaaaactgcagtcatcaacaatgattaatcagctgttgcaggcagtgtcttaaggagactggtaggaggaggcatggaaaccaaaaggccgtgtgtttagaagcctaattgtcacatcaagcatcattgtccccatgcaacaaccaccaccttatacatcacttcctgttttaagcagctctaaaacatagactgaagatttatttttaatatgttgactttatttctgagcaaagcatcggtcatgtgtgtattttttcatagtcccaccttggagcatttatgtagacattgtaaataaattttgtgcaaaaaggactggaaaaatgaactgtattattgcaatttttttttgtaaaagtagcagtttggtatgagttggcatgcatacaagatttactaagtgggataagctaattatactttttgttgtggataaacaaatgcttgttgatagcctttttctatcaagaaaccaaggagctaattattaataacaatcattgcacactgagtcttagcgtttctgatggaaacagtttggattgtataataacgccaagcccagttgta

SEQ ID NO: 2678 - protein, 461 aa, Homo sapiens
MAQRYDDLPHYGGMDGVGIPSTMYGDPHAARSMQPVHHLNHGPPLHSHQYPHTAHTNAMAPSMGSSVNDALKRDKDAIYGHPLFPLLALIFEKCELATCTPREPGVAGGDVCSSESFNEDIAVFAKQIRAEKPLFSSNPELDNLMIQAIQVLRFHLLELEKVHELCDNFCHRYISCLKGKMPIDLVIDDREGGSKSDSEDITRSANLTDQPSWNRDHDDTASTRSGGTPGPSSGGHTSHSGDNSSEQGDGLDNSVDSTGDDDDPDKDKKRHKKRGIFPKVATNIMRAWLFQHLTHPYPSEEQKKQLAQDTGLTILQVNNWFINARRRIVQPMIDQSNRAGNQGTPYNPDGQPMGGFVMDGQQHMGIRAPGLQSMPGEYVRGPMGVSMGQPSYTQPQMPPHPAQLRHGPPMHTYIPGHPHHPTVMMHGGPPHPGMPMSASSPTVLNTGDPTMSGQVMDIHAQ

SEQ ID NO: 2679 - DNA, 2717 bp, Homo sapiens
atccacctctccgcctgtgcaacacacactttacacacgcacggggactgcaagcgggcagcatcgatcgtggctcctttaagacaaactcagacagacattttttttaaccctccttctctaatctccttccagtgcagcacttgcaaagagggagagagagggagagaaagaaagagagagagagaagagagaaactgattaggaattaggactgattcaagggaagcgagcgctagggctttgtgcatttgaatattaacatttgaggtgttctgaccagaagaagacagagcggatgatcattcattcaccacgttgacaacctcgcctgtgattgacagctggagtggcagaaagccatgagatttggtagttgggtctgaggggcgctcttttttttccttttctttctttctttctttttttttttttaaactgatttttgggggagagaagatctgcttttttttgcccccgctgctgtcttggaaacggagcgcttttatgctcagtgactcgggcgctttgcttcaggtcccgtagaccgaagatctgggaccagtagctcacgttgctggagacgttaagggatttttcgtcgtgcttttttttttttttttttttttttccgggggagtttgaatatttgtttcttttcacactggccttaaagaggatatattagaagttgaagtaggaagggagccagagaggccgatggcgcaaaggtacgacgatctaccccattacgggggcatggatggagtaggcatcccctccacgatgtatggggacccgcatgcagccaggtccatgcagccggtccaccacctgaaccacgggcctcctctgcactcgcatcagtacccgcacacagctcataccaacgccatggcccccagcatgggctcctctgtcaatgacgctttaaagagagataaagatgccatttatggacaccccctcttccctctcttagcactgatttttgagaaatgtgaattagctacttgtaccccccgcgagccgggggtggcgggcggggacgtctgctcgtcagagtcattcaatgaagatatagccgtgttcgccaaacagattcgcgcagaaaaacctctattttcttctaatccagaactggataacttgatgattcaagccatacaagtattaaggtttcatctattggaattagagaaggtacacgaattatgtgacaatttctgccaccggtatattagctgtttgaaagggaaaatgcctatcgatttggtgatagacgatagagaaggaggatcaaaatcagacagtgaagatataacaagatcagcaaatctaactgaccagccctcttggaacagagatcatgatgacacggcatctactcgttcaggaggaaccccaggcccttccagcggtggccacacgtcacacagtggggacaacagcagtgagcaaggtgatggcttggacaacagtgtagcttcccccagcacaggtgacgatgatgaccctgataaggacaaaaagcgtcacaaaaagcgtggcatctttcccaaagtagccacaaatatcatgagggcgtggctgttccagcatctaacacacccttacccttctgaagaacagaaaaagcagttggcacaagacacgggactcaccatccttcaagtgaacaattggtttattaatgcccggagaagaatagtgcagcccatgatagaccagtccaaccgagcaggcaatcaaggaacaccttataatcctgatggacagcccatgggaggtttcgtaatggacggtcagcaacatatgggaattagagcaccaggacctatgagtggaatgggcatgaatatgggcatggaggggcagtggcactacatgtaaccttcatctagttaaccaatcgcaaagcaagggggaaggctgcaaagtatgccaggggagtatgtagcccggggtggtccaatgggtgtgagtatgggacagccaagttatacccaaccccagatgcccccccatcctgctcagctgcgtcatgggccccccatgcatacgtacattcctggacaccctcaccacccaacagtgatgatgcatggaggaccgccccaccctggaatgccaatgtcagcatcaagccccacagttcttaatacaggagacccaacaatgagtggacaagtcatggacattcatgctcagtagcttaagggaatatgcattgtctgcaatggtgactgatttcaaatcatgttttttctgcaatgactgtggagttccattcttggcatctactctggaccaaggagcatccctaattcttcatagggacctttaaaaagcaggaaataccaactgaagtcaatttgggggacatgctaaataactatataagacattaagagaacaaagagtgaaatattgtaaatgctattatactgttatccatattacgttgtttcttatagatttactaagtgggataagctaattatactttttgttgtggataaacaaatgcttgttgatagcctttttctatcaagaaaccaaggagctaattattaataacaatcattgcacactgagtcttagcgtttctgatggaaacagtttggattgtataataacgccaagcccagttgtagtcgtttgagtgcagtaatgaaatctgaatctaaaataaaaacaagattatttttgtcatg

SEQ ID NO: 2680 - protein, 388 aa, Homo sapiens
MAQRYDDLPHYGGMDGVGIPSTMYGDPHAARSMQPVHHLNHGPPLHSHQYPHTAHTNAMAPSMGSSVNDALKRDKDAIYGHPLFPLLALIFEKCELATCTPREPGVAGGDVCSSESFNEDIAVFAKQIRAEKPLFSSNPELDNLMIQAIQVLRFHLLELEKVHELCDNFCHRYISCLKGKMPIDLVIDDREGGSKSDSEDITRSANLTDQPSWNRDHDDTASTRSGGTPGPSSGGHTSHSGDNSSEQGDGLDNSVDSTGDDDDPDKDKKRHKKRGIFPKVATNIMRAWLFQHLTHPYPSEEQKKQLAQDTGLTILQVNNWFINARRRIVQPMIDQSNRAGNQGTPYNPDGQPMGGFVMDGQQHMGIRAPGPMSGMGMNMGMEGQWHYM

SEQ ID NO: 2681 - DNA, 3385 bp, Homo sapiens
atccacctctccgcctgtgcaacacacactttacacacgcacggggactgcaagcgggcagcatcgatcgtggctcctttaagacaaactcagacagacattttttttaaccctccttctctaatctccttccagtgcagcacttgcaaagagggagagagagggagagaaagaaagagagagagagaagagagaaactgattaggaattaggactgattcaagggaagcgagcgctagggctttgtgcatttgaatattaacatttgaggtgttctgaccagaagaagacagagcggatgatcattcattcaccacgttgacaacctcgcctgtgattgacagctggagtggcagaaagccatgagatttggtagttgggtctgaggggcgctcttttttttccttttctttctttctttctttttttttttttaaactgatttttgggggagagaagatctgcttttttttgcccccgctgctgtcttggaaacggagcgcttttatgctcagtgactcgggcgctttgcttcaggtcccgtagaccgaagatctgggaccagtagctcacgttgctggagacgttaagggatttttcgtcgtgcttttttttttttttttttttttttccgggggagtttgaatatttgtttcttttcacactggccttaaagaggatatattagaagttgaagtaggaagggagccagagaggccgatggcgcaaaggtacgacgatctaccccattacgggggcatggatggagtaggcatcccctccacgatgtatggggacccgcatgcagccaggtccatgcagccggtccaccacctgaaccacgggcctcctctgcactcgcatcagtacccgcacacagctcataccaacgccatggcccccagcatgggctcctctgtcaatgacgctttaaagagagataaagatgccatttatggacaccccctcttccctctcttagcactgatttttgagaaatgtgaattagctacttgtaccccccgcgagccgggggtggcgggcggggacgtctgctcgtcagagtcattcaatgaagatatagccgtgttcgccaaacagattcgcgcagaaaaacctctattttcttctaatccagaactggataacttgatgattcaagccatacaagtattaaggtttcatctattggaattagagaaggtacacgaattatgtgacaatttctgccaccggtatattagctgtttgaaagggaaaatgcctatcgatttggtgatagacgatagagaaggaggatcaaaatcagacagtgaagatataacaagatcagcaaatctaactgaccagccctcttggaacagagatcatgatgacacggcatctactcgttcaggaggaaccccaggcccttccagcggtggccacacgtcacacagtggggacaacagcagtgagcaaggtgatggcttggacaacagtgtagcttcccccagcacaggtgacgatgatgaccctgataaggacaaaaagcgtcacaaaaagcgtggcatctttcccaaagtagccacaaatatcatgagggcgtggctgttccagcatctaacacacccttacccttctgaagaacagaaaaagcagttggcacaagacacgggactcaccatccttcaagtgaacaattggtttattaatgcccggagaagaatagtgcagcccatgatagaccagtccaaccgagcagtaagtcaaggaacaccttataatcctgatggacagcccatgggaggtttcgtaatggacggtcagcaacatatgggaattagagcaccaggacctatgagtggaatgggcatgaatatgggcatggaggggcagtggcactacatgtaaccttcatctagttaaccaatcgcaaagcaagggggaaggctgcaaagtatgccaggggagtatgtagcccggggtggtccaatgggtgtgagtatgggacagccaagttatacccaaccccagatgcccccccatcctgctcagctgcgtcatgggccccccatgcatacgtacattcctggacaccctcaccacccaacagtgatgatgcatggaggaccgccccaccctggaatgccaatgtcagcatcaagccccacagttcttaatacaggagacccaacaatgagtggacaagtcatggacattcatgctcagtagcttaagggaatatgcattgtctgcaatggtgactgatttcaaatcatgttttttctgcaatgactgtggagttccattcttggcatctactctggaccaaggagcatccctaattcttcatagggacctttaaaaagcaggaaataccaactgaagtcaatttgggggacatgctaaataactatataagacattaagagaacaaagagtgaaatattgtaaatgctattatactgttatccatattacgttgtttcttatagattttttaaaaaaaatgtgaaatttttccacactatgtgtgttgtttccatagctcttcacttcctccagaagcctccttacattaaaaagccttacagttatcctgcaagggacaggaaggtctgatttgcaggatttttagagcattaaaataactatcaggcagaagaatctttcttctcgcctaggatttcagccatgcgcgcgctctctctctttctctctcttttcctctctctccctctttctagcctggggcttgaatttgcatgtctaattcatttactcaccatatttgaattggcctgaacagatgtaaatcgggaaggatgggaaaaactgcagtcatcaacaatgattaatcagctgttgcaggcagtgtcttaaggagactggtaggaggaggcatggaaaccaaaaggccgtgtgtttagaagcctaattgtcacatcaagcatcattgtccccatgcaacaaccaccaccttatacatcacttcctgttttaagcagctctaaaacatagactgaagatttatttttaatatgttgactttatttctgagcaaagcatcggtcatgtgtgtattttttcatagtcccaccttggagcatttatgtagacattgtaaataaattttgtgcaaaaaggactggaaaaatgaactgtattattgcaatttttttttgtaaaagtagcagtttggtatgagttggcatgcatacaagatttactaagtgggataagctaattatactttttgttgtggataaacaaatgcttgttgatagcctttttctatcaagaaaccaaggagctaattattaataacaatcattgcacactgagtcttagcgtttctgatggaaacagtttggattgtataataacgccaagcccagttgta

SEQ ID NO: 2682 - protein, 388 aa, Homo sapiens
MAQRYDDLPHYGGMDGVGIPSTMYGDPHAARSMQPVHHLNHGPPLHSHQYPHTAHTNAMAPSMGSSVNDALKRDKDAIYGHPLFPLLALIFEKCELATCTPREPGVAGGDVCSSESFNEDIAVFAKQIRAEKPLFSSNPELDNLMIQAIQVLRFHLLELEKVHELCDNFCHRYISCLKGKMPIDLVIDDREGGSKSDSEDITRSANLTDQPSWNRDHDDTASTRSGGTPGPSSGGHTSHSGDNSSEQGDGLDNSVDSTGDDDDPDKDKKRHKKRGIFPKVATNIMRAWLFQHLTHPYPSEEQKKQLAQDTGLTILQVNNWFINARRRIVQPMIDQSNRAVSQGTPYNPDGQPMGGFVMDGQQHMGIRAPGPMSGMGMNMGMEGQWHYM

SEQ ID NO: 2683 - DNA, 117302 bp, Mus musculus
  misc_feature (1)...(117302): n = A, C, G or T/U
gccagtcctattccctaatacccccaacccgttttgggatgggtggaacaaaccacagggactcagtgtagtccttggctgagaaccaggtgaccaggccttcatacatcagagaaggtattcctagagcaaagggctgcagactgagtcttgctcagcattgggcctctctaattgcttatttaatttcaaaatccaagaatagagaacaatgaaaaggatattttatctgtggtagggtgttttaaattttctgggaacctaagtaaacaattttgtagggtttgtttatatggcagacattttccccgtgtcctactctgcactggatctgtaaggcacaggctttcatcagtgtggacaacccagaacttgggtaattcagtgtctgttataacagaaacagttcgtgggatctgcagagacaagtggctgtttccagtaggtacagatgcccacatggctgtggcatgtgatctggaaagccacccaaaggcccgtgcttccaaactaccttctgtcctctgtttgaatcttcttgctcacagcagcaaccagccatccacttccagactctattccttgtttcaaaatgtactgaatgttcattccacatgaagggatggaaatactgtatcttaacaatgatatcttcaagaaagtgtgccagggacaatctgcaacactgtctttaatacaaaccagagtacagaaagcttatttctcaagagcagctgactgggcagtggcatatgcctatacacttatcatttgagaggtgaaggcaggaggatcagggctatcctcagcaagtttcaagctggcctggaccaaggagaccctgtctcaaaaagaaaaccaaccaagcaacgtccctaaattgactaggtgtttgttgacaccatacaaactgtggaaacagtagattaccatagctctttgtgcccgaaggccaatatccacattatactctcatttctaaaaaactgaactgtcaggggctggagagatggctcagcggttaagagcactgactgctcttccagatgtcctgagttcaattcccagcaaccacatggtggctcaagaccatctgtaataggatctgattccctcttctgtttgtctgaagacagcaatagtgtacttacatacataaaataaataaatcataacaaacaaacaaaatactgtctctacagaaagaaaacatctgttattacaagtggccagagctatcttgcttcacataggttcctgatagcggtttagaactgtttaagtctgtggcatgaagctctggccaccaaagtaatgctaacagtgttccttcgcacagctttgacatgtgtgacagtgaacttttcttacatggcatgtttttatgtcttagtattttaaaataaaagccaccctagatagagtccaggtctcctgtgcaatcctccagcttaaaaaaaccccagcacaattcttaggagcaggttcttaattttatggaaaactaggggtttagataactgaccttctgcagagactttgtaagagggaaagaaggcaggcaggttgttatacaaccaggaatgggagaacagggagttttgtttattctttaccaagctgtcacagaacagcaagaagggatagacattttctaccagaaaaattccctttgctgaatttagcaggaaaatagaaaaaaactgctgatgactggtggaggggagagggaaggggaggggatgccctagcccgtgggagtgactgtcttgtgtctgtcatggctatgggtggcccgtgggagtgactgtcttgtgtctgtcatggctatggaccatcagaggctggatgtggtggcatacatctttaatcccagcactcagaaggcagaggcaggcagatatctgtgatttcaaggccagcatggtctacagagtgaattccaggacagctaaagcaaatagtgagatcctgtcttaaaaacaaaacaaacacaaacaaacaaacaaacaaataagtaagcaaagaacaacaataaaataaaacaaaatccaaacaaacaaaaagaatctggcaaagaaggaacttaggtctggtgatatgtttggaccacagcatctcttttgtcacccagctaactcctgaggaggagaccaactaaagccttcgtgaagtgaaagggatgaagcctcagctggcctgatttgcagtctgtttacagactgtagagaaaggagagaaaaggaactgctcttcctgaggtgagaggcttcttctacaggcaggtgtgattgctgagaagtcagtgattaatataagggattgacagccagccagccagggctgcctctcagagctggctccgaaccccatgcatctcaacatttaccttaaactgatcttcagcctgccttgtatagaatggcttggctcaagcaaccgaagttggaaaggtaaattgaacttttgactcctgctttcatcccattctcatcctctgatagctatattaagcatagaaacatcgtaattaccacttcccaccagtaccgtcagtatgtctatcaccactaccacgaccatccctatatcatcaccatctttgccacaaccagcatcccccccaccatctccatcaccatctttacctaccaccatctccaccactaccatccttgctaccactattactatttctaacaccattaccatctctatcatcaccaccattattacctcaccatcatcaccaccaccatcaccagtatctccactactatcaccaccatcaattccactaccatctccagcattacccttctcatcaccaccaccaccgtcttcataaccatcatctccgtctctgccaccaacactatcactaccatcattggtatcatgaccaccatcatctttattgttgtcttgaaaaggattgtcattaggcgcagcatcattagtaaatatcagttacatattatagtggtgatataccgggttaatacatacttcatcctggcccatgagttaatccaaggtaaatccttcatgaatttattgacaaaaaccaagcacagaattctttgttgattgcacacaacggcgttcctcctctttccagtggtattaaagattaagcctcacacacagcaagcaagtctaccactgaggtatattcccagccatttaaaaattctattttgagacagagtcttgctaaattgctaagttggcacctattttatggtcttcctgctttagtctaactgggattataggcgtatggcactatgtctgcctctggctattgctttctgaacagatcaattgataccacgaagtccccaatgtctctgaaataaatgcaataatacttctttacatttgcacttgtatgtttaatgtaaattgtgtgatgtacagatacagtgaaatataatttagccataaaagaataaaatgctgtcatttgtgcaacatagaactaggggacattttgttaagcaaaataagcccgacataggaaggcaaatgttgctcgggctcacttacatgtggaaacaaagatgttggctagagtagagactagactagtggtcagcagggcatgtgaggaagaggatgcagagaagagttaacagataagggtgcggctggataggagggatcacttctaacgttacaactgcagtgggtaaaaatggttggcagtaattcattgaagagagaattttgagttcttcccacacaaaacaacatgtcacgttatagataatgtcaaataccctaatacacagtatacatgtatcaagacaccacattgcatcccataaacatgtgcaattattatgtggcaattaaacataaaagtatattttgaaataccaactctttaatttttactgtgcagttgataggtgagcccatgaggtgctttatttcctgcatttggtaaatgcaatttttttctgaaagttctaacacaatccctctgtgtgcctatatacggtaccatacctggcatatagtcttgatttttttttctgtgtgtggatagataggcacatatatagagatagaggcacacaaaccacatacatacatacatacatacatacatacacacacatacacacacatacatgtatacatacatacatacatgcatacattctctaagacaataaaataataaaaacttataagaatagcaaagagttcatttccaaatacaggattgtctataaaattccctttcagacagtgaagtcatagctagaagttggcagtaaaaccatctgaaactactaaaaatcatttttgcaagagagagagagagagagagagagagagagagagagaggagagaaaatcttccacagctgagttattttgccttttataaaacaacttcacatctggactgataacttgaattccacccagtgccatttaaacaacccaagttataaacctcttaaacttggggtttataatagaaacactgacagacccttaactatagtgcctcgtagtaatgaaagcacaactatttcattagagcagtgtctggcgaggctgctataattaagagtctgtcagcgtttccattataaacccaaattttaagaggtttttaactcacattgttttaaatcacactgggctgaaacttgctgtacaaaatgtcaggccagatgtgtgtgtgtgtgtgtgtgtgtgtgtgtgtgtgtgtgtgtgcatgcacgtgtgtgtgtccatatactcatgtgttgcttttccttttgtttacaaaaaaaaaaaaaaaaagaaaaagcagaagaaaaaaggaaacacatagtcaaaagtagttttaaagtttgggtgtgaaaaccacatattgaaaaaaatagttttcttgtatcagcacaagattcatgtggctagggtagagaataggggacaaagtacaaaatacttttgattgtatttttttttcataaaatagattggtacctatctaaaaagcaatgttaaaggggaaatgtatatttgattctgggttcttgattctggccagtttggaagattgttacagtgtaagttgctggaggtgggtgtacacatattgccttctattgttaactgattagctgtgaggtatttgagatgatgttcctttgagctgtccttggtaggaatcactttaaggcttaaatcaactctcaccataggactgcttcaccaaagccttgttggtttctacaaggtaaaattatgaggtaaattaacacagtttggatggttatgaactggttccatgggtgtggtaagagtattagtcctagttcatccactcaaagactgtttattgagcatttactgtgtgtaccagcaatcactagtacactacctccattggacagtcagagttgtacctgtgtatcttttatgtaaacattagtatgttaaattaacagtttcattcagtaatattctaaccggacttcttgtctcttgagaagaacactttaactgagattgttgctcccgtcttttcaagcatgattgacttaacacacagcagccttgtctaggggcagaccctgcccttggttttcttttaggtgcgtccaggtatataaaacaacctaccagaccccagaaacccaggcagcctctggagaaagaccagacggatagctctctcagaatgggggaaacttgtggcttccacccccagcccccagggaagaattgagcctctgatgaaggggtagatactgtctactcttgggcctccttaggtcggggcttcatggtcacacaggcagcaggggacacagaaactcacttctcttttcaaacacagtctctgccctttcaaatgcattgtctaacagcattccagctagcagcatgccctcaatagcgtcaaatgtgaattctgtgttgagtatagggtccaaacctaaagatgattgcccattctctattttctggtctgccaattagggaccagaaaatgataaaaagaaagaaggagaacgaagtaaaaagtgagatgggactgattgcacttttaatcattcattcatttattttttatctatgaaagcgtttcactctaaagacaaacacagtgaatattttattttaattttgtagtttccaccgagacagaccttttaacccctcactctccagctcgtagagtccccggtgtacgggatgctctcactgcggctggggctgtattaagcctccctcttggagctgtttgttgaccacattcacgttcagaaccccgaagctaaaagcactttacaccataaaataaaagccctgtctttttttctaaaaggttacgtctggaggccacgcagctcatacttcataccgaaaactactgaaaggactatgaaaccctctatgatttacaccctctctccgcattagggtatagatctactaggctctaaaaatacggtgggtttctaaacgacgtgaatatatgtgcattatttcagaaagtctgttagaaaacttgtcaacacattataaagcataaaccaggacttggctattaagtacggagatcagaggcagaatatatactgcaggaagtatggggagtctcctccgccggcaagataaaagcggggaggagggaaggggaggggtagtctgctggtctggggtttacacactgtcgtcactaaaggtttgggaaagagcccaccgagctctctcaatgaaagcaagcaagggtattacaacctcaaacgaagttaactgaacggctagaaaataattctaacgttgtcataatttactactttttaaaagccatttctggagaggtaaataaatatacttattgcgtgcccaagtgtgtacgttaaaactgacctttcacccagctccacaataccacctacatcattaatcaatacttatgcaatatttttcaaatctcttagaacaccacgcttttacttctttaaacactcatataaacttcccctcccccaccttcaggcgctcgggtgaatatccatcagtagaagggaggggcgtctccggtaccctggagcactaggaacccggagggggcgggcaaaaacagaccaaatgccgacgcacaaccctatttttctgggctgggtgaaatctggttgggggaggggcaggagcagagggcaggtcccatttcaccctgggcatttcatgatggagaaattaactatatgttaatcatggaaacagtgccgcttacctttgcactggctcccagggcaagcagctgtaactgttttttttttttttttgtatgtgtgtatgttttaagatgtggctttcaaaggaactccctggaatctgaaacaagtgcagtaacacgacggacttacttgttactaagtgcttaatttcctatgatttttttaaaaaaagaaaatcaataaaatgctgccagttatttattggaaataaccacagatagcggccctgatagggtgcaggtttcagagagcacgcgattgtgtaatgaattgtaattcagaagactcttaaatgtgaaccgcagaacctttcagaggtaataaagtcattactttttacactacagccaaccctgaaaagctttatacataccattatatataaatcacacatatacagtatgtatttctacagcataatttgtccatgtatctgtctcctttctgtacagacttttatggatgagagcaagattcaaatctgcccaccttcgtcttgaagaagtctggctcactattgttacctgaagaggcatttatttatttattttcccgaggcctctgtgttgtactttcttctactctcctctcaccctgcagaggtccacccctgtggcccctcccctcccacctcccgtggcgacattcatttggtgattctaaggctgatttaacaaggaaaaaaaaaaaaaaaaaaaaaaacagaggaagagatgctgacctgctctgaagaactcagtgaaaagggggaaacggtgtcgtgcagttactgcaatagtcttcctgctcctcaaaccgaattcaagacccccccccccacacacacaccccaggaaaaccagctagagggaaacagcatcccccaaaacagtttagcccacagctctcctaacgttgggcatcaaaatctgtttcttcctcagaggggcccgaagcttcgccgagtcaggcaagccattttctaaaaggtttgaaactttcctaagacacaggaataaacagccacaagcctgtgaggctgggaggtgggcgagcgtgtgtaagcccggggccctgccttaaaacaatacaatcccccggcgtgtgggtgaatttacggaagcgacacctctcagaggaggggtgcagggacgctgggtgcaggctctagaggagaggggagaaaggctcctggctctgcagagactcacagacgtccacctgcagctcgggtctccacccagagccctcggcgcctcccagggactctgtccatcccccgcccccgctgggcgctgctagatttggacccgtagcgctgtctccctggatgctgctgctgctgctgctgctactgctgctgctgctgctgctgctgcggcggcggcggcggcggctgcagggtggtgcaggctggctgggaggctgggaggcgggagacgctgggggactttgcagcacgtttctgaataaactttccaatcgcagggggtgctgttgctgtatattttacgtaaaactgaaagtatcccacgccagagcgaagcccgctttttgacagcggcagcgcgcgcgcgcgcgtgtgcattaaagagacaggggtttatttccaacaggtctttccctaatttccagggaaggtctgcagagtggacccaggggatccggggtctcgggtgtgtgcggtggttgctgtcgcctgggcagcgctgcggtgacccgagggtctcaccatcgtagtctcaccgtagctcctgctagccaggtttctttcctttccccattttctctttccccgagtaacagcttagaacaattgtgttctgtccctaagaaacatttttctttccttctctcagtgctttcgcagttgccccggagtgggagggggtgtgtccctccccggaatcaggctccaggacctcccgcagcgcggcaagcaggttcccagagaccccggctcttggggctacccgtgctttgtcctcgggccgctgactgctcagaggtggacgcttgggcgcctcgagccccggccccgagtgctcccctctggggactgaaacacacccggaatctggcttctcggtctatgtattccaatctttctgtttctgcaagcctcgggagctggggattcagggcttctgtggcattcagctcccgactgtttgtagggtcgctcagatcccgggtccctgacttggccttgggggcgcgctcccggctctggagcccaggcctgcgccgtcagcctcgccccaaccacctctctccaggcggcgtcggtttccccgggccctgacactagccttccggacacgcgaccctccaaacttgggctggatttctctcgccagcgcgctcccgcacgcctcccctagcccgctgcagagctctcaacttggaggctcagctctcaacttcgggtgatttttttctttcctagctttcactgggcaaagtttcccgagcgctgccacgagctacgggctagcactccggccctcggcgtcccctggcggggaggggaagtgggtgtgcgcacagaggagggtgtccgggacctactctacctggttttcttccgcccgctcctctcttgactgggctgaagcgtccgggagcactctgcccccagcccccacttcaataatttttcattttagggtcggtgagtgtgtgtgtgtgccgggggggagtggagcggggcgcaagtcttgnnnnnnnnnnnnnnnnnnnnnnnnnnnnnnnnnnnntccctcccaccccgccgcccctttcttctctccgggccacgccacagccgcggcgctcgctgcggccactggtgagctagccgccccagagccccctcccctctgcccgcccctccccccaggggccgcgtctggcgcctgcggagccccccgccccgcacctcccccgccccgcactggccattggcttgtcctggtctctttttcatgtccagcccctgatgtgtgtccattggtgtgagcttccccttccctcctccccttctctcctgctcgccctgcccatgttttgtgtgtctctgtccatccagactcctgacgttcaagttcgcagggacgtcacgtccgcacttgaacttgcagctcaggggggcttttgccatttttttcatctctctctctccctctatccctcttctctcttcctctctctcttttttttccttaaaaaaaaaaaagccatgacggctctcccacaattcatcttccctgcgccatctttgtattatttctaatttattttggatgtcaaaaggcactgatgaagatattttctctggagtctccttctttctaacccggctctcccgatgtgaaccgagccgtcgtccgcacgccgccgccgccgccgccgcccgccccgcagcccaccatgtctcgccgcaagcaaggcaaaccccagcacttaagcaaacgggaattctcgcgtaagtaacccaataatagtaataataattattaataatcacgagggcgcgcgggacgctaagcaagagtgaggttaagagaggggtgtgtgcatgcattaaaaaaattttcaggtgaaacaccttcggtagtcgaagtaaaaagagattaaaaagggaaaaagcccccatcccctctcaaacatgaaccgtgtgcacttttgagacggcacgcaccttttaatttttataaaatatcgactcctcctctttccttctttccggcgctttatttcttctttcaaaaaggaatgcaatgatttctaccctacttttgcaaaaataatgaacaatgccaaggatgcggacactcacatgaaaacctgggggtgggagcttgaaggaaagggggctgtttccacttcactataggaaaatggagggaggggagggagggagtcaagtctaaaaaacaattcctggggagaaaagaggtgagaccggcctcaggacgccaacgtgtgcacggtcaagtgtgcagtgggaggaaagtagtcacccccacaatagtacgaaagtgggactgtagaagagggcccccggcgcttcccagtcagctgagtcgggagaggggctgcagcggctgggaaggccgggtgaccgggaaggatcggagtcgcgcccggcgctgccgtcttttgttccggccggaggtgggtgtttgtcccgccgccttttgtgcgggctcctcgcgcttgccctcctgcgccgccaccgctgccgaagggcaagagcaagggccgagagaggaggcggccaggggcacgcggtagagggagggagggcacaggagtctccgcctgcgggttgctgctgcccgcccctcctgggtgagccaggagaagatgcgcaaaataaataataataataaaaaaattaaagtaacgcaagagaatgtacaatttcttgctcccccaaagaagccaaacattctgccagccgtattttccacctctttcctcagattagttcgcaccctcacccctgcagaaattccacagtctttaatagagaaaagagaggaaaaaagaaaagaaaagaaaagaaaaaaatccctgacaccccttacccccaaaccccaccaagttgcaaacttagagcgccggcggcatggagagggagcgaggaactccctcctcttactattttttggaagattttcaaaaaaagtggaagtggattttgattgggaaaaatctcgtgtctgaatgtttacaagcaccgcgtgtgcgggagcctcctgccaacaaacagacagaggacggagcgcgccgaggcagccccggagcaggcggccgcagcggctgggcctcgcccgacctcgccgtgtcccagtctggagtcgggatcgcccacccagcgctcgccgcccacccgccaggcacagcagcaggccatgctgcgactccgccagccgggcctgcgctctggtccgcccctagcacaataccgaaacctcccttcgagctctcagacagcgaaagctgctggatcaaactcggttttgcaaaacatttttattttgtaaagcagctgtaaaggcgagttctgcttgtcccctccactacacaggggtactcttttagagtcctcttgtccttaactctaggctactgagagattaccacgtgcttcccccccaaccccctatctggccagtagcctcttggaccaaagcagtttcttggctaggttgaggaggggcggggcaggagaagtgtgttgagtatgcatttttggggtgcagggttcccggattcggagagccccacctttaggttcttgccctctaccttgggcctgtcttggtcagggatttctgtgagtttatgtaaagtgttagtggctgtgaccattatctccacctgaggtgtgctgggagaggcgggtggtgggcacttataagtttgagtccagtaaggaaaggcatggagatacccccctcccagtcccccttcaagtcctttctcactcatgactcttaattttcgacgaaagctggaaggaccccctatgtcttttctgcatttgtcgagggaggggtgctcattgggaattgaatttttccccccctctgggccctggaacttgtcacacacttcgggagctcccccgccctggcacgttgcggggccctccctctccccacccccgcgcatctctccctcgccgctctcccccgcccccactcccaccggccgcgccggatacagagcagacgcggcgcgcgacggtgtgaagttacagcccggccaggtaccggcgggaaggaagggcagtgttcgcaggactcgggaaagccgggacactgggacttaaggaaggatgcaatggggggcgcgagggacagtttgggaggcgcagttggagctgctctgtactctccttccacttgggtctcttctgggactctccaggctgggagggttagtctcgctgctgtcccggggaggacactggactaggagactaggtggagggtatgtgcagggatcactttcattttctgggtgcttagagggcaggagcctgccagtccatagggcgcccccacatctccccccccccccagccctgtcctcagctacgtggactgaatgagccatttggtcgctaggaggcagaacaagatcaagaaaagctccacgaacttgaacctgtaccagagcctcccccaccccctgcccggcgtttctcggcgggggagggacgagcgttgggagagtgggggtggggggcaacgaacggttagtctgaattccctttctccaccccccattaccccttaggtctttgttcttcattttgacttaaaaaaaaaggcttggctagggccatggagaagcgctggggcgcgcagccgacacccccacgtgcatgaggactcgggagctcccggcggggagccgggtgtactccagggtcctttcagggagggcatttttggtggcgagggatggagagtgctctctcgagcttaggggcatggccgaacacagggatgttgcaagtttgcccttggcttctaggttcactttttccacccccttccccgtgcagagcgcaagtctctgcggccaccgcaggcataccggacggcttggcaacccaacgctccccctccccgcctcctgcagctctcgcctggaagcccgaaatcacaacaatagtaatagttatcatcataatgatgcgggctagcagcgtcattaataatgaataaccgcggtcgccgcctggcgcgcacacggtgcccggaattgcgggcgaaacacatttgcacagatcttccaaagtaaaagtgttagtctgtgtacacagaatgaatttcaggacccgcgctcagggtgtgtgcgaggaagccaagacttgatcaggttatccagctcagttttccaaaccttacttccttttcccaacaaccggccagttcagggatcctgcgctcggcggctgcccggctgcaggggcgtggaggcagcagcagctcagtccccgggccactggccgcctccaagctgggactgtggacccgtaggccgctgctgcacgtgttcgcagagcgcgcggccagagcctgcagcctggaaggtggctgcttgctttgtgcctcggagcccgggcgcccaacttcactttttgcgcggcctactcccgcagggccccggcccggggcctgcagtccttggctttgcttttgtttctttgctttgcctctccgattttcagtctccttttgctttaacgtttaacgcgtgcagaaaaatccacttggaaaacaaacttgggagagacacggctcccttctctcctccccctccccccagcagccctggtttccctgcctcttctcaacatttcttataaggattttgcctcctctttttatgtttgtaacgaggaagggggaggacggcagggttgtgggggggggagtgggagaagagagagaaataaacatgaatatataaatatattggtctgctgtcgctgggacaattgaggccgtccagtctctcttgttgaaaacagaagcattttattttgtcttcctctccttgtagagagaattcgcggctaatcattgtgatgatttgtccactcccttccacttcaatcgatgactccccgctttgtaccgagttaggcccaagcttagaaagggtggtattgtaggggagaattcggatggagttgaattgaagggagggggtaaaaatggctggggttaggaatgtttttaggggatggggaatttgcattaaaatacagagaaattatctgatggccagaaaggaaatgctgatcaccactgagagatgtcaatgcaaatcactgggctgcttgctgtaagagaattgtattttcatattttctttgtgccccatttggttttttttttttaaataatgcagcagcaacaataaaaacacggtttgatatttctctgcacattactaggcaaatgtttttcagggagatggatgttaaatgcatttcatacattaggatagaattcttggtaattagcaataatttacgttaagagcatagaaaatgttgaggttacaggttttatatctgtacatttgatcatcttgttattttcaagaactttgcctcctataaaattaattaggtgaaatgtggaggtgtaaccagcaacctgtgaattaccacttcatttcctagtcttgattgtaactcagttcagaaggctcaaccaagtctgctttgtaccgaattacctttaactatttgatatctctttgcttctaaatactgtttctacattctgaaatcaagcaggccctgggaacaacaacaaccacaaccacaacacccagcatgagtcctcatgagaggatttgcaaaaatgttttacctttcctagattttttttttttaccccctgagcctttcagtctctcaacctcagaacttgtagctaaatagcagcagcagaaaaggccacatttgccaatgttcacttaaaattcgtagttcaaatagcagatatcatggatcaagacttcccactcctcacttgctcaaaatgaaagcaaatgcagagaaaaatgacatagagacacaaagcagaagcaagtccctccgttcgcctcctttatctggaaagcacgcttgtgcattccgtatgtgccttttgatcaggatgctgggcaaagggacataagtgcttacttagttgcctccgttagtagggagataacctaaccttcatattcctacagtgacctatgttaaattaggaggcgtaccaaaggctagaaattatgacatgtcctacttgagcccaggtgcagcttaggcaggactctttcaatattatttcacccaacacatctgggagttactccagatcttccccctcagtatccagcctgggtagggttgaaataaatttaacctgagttcactggattttcgcactttatcaaaatctgttccaatattctacactcaaattaaaatctattttttgattctctgtggctttaagttcattaaatgtgaaattggcagcttgctaaagaaggtcagactgattaactgtttaagacttgtacattttctgcttcactttcattagctggcagcatcctggacatgttttgtattttgtgattttttttttttttttttttttagttttagtttttcttttctttttaaaagatagtatgaacaagattttccagctctcctttctcgacttttgaggttaaaaaaaatgataaaagctactcaaatagatgccagggtacaaagttaaaaaaaaaaaaaaaaacccatgcaaacagggaagaaaggcatgtgtaccttgttagaacgtttgctgtgatgatgtgggcagcaagagtcccataatgaagcactctggacctcattcagaaaattagtcaactttgactgcattaggtaaagcctctcaactccgaaggataaaaaaggtgtttggtcttctgaagtatggagcatgggtgtccactctgatttttaatgtcatggatgcctccaagcacaaacacatttagactattttaaacattcttttcttcaggatgaaaaaaaaaaacatgactaattggcttattttcttaagtactcagaagtatcccatttagggaacatgtttgggaagacctgccagtgaatgtgatgttccttgaatttcatagctgaggagggcagggagatgttagcactgtgacgctcacctcattgtgatgggtagactgcggtgcaaatgtggcagtcctgtgtggctgcagcagccttctgtgtggaagccatgtgtgtacagtacagagattcacacacaaaggctgcctgtgctcattcgccttttttctctaatcttgggcacaatagacaacctactgtatggggctggggggaggggagcaaaattggtttgagttcatgtttttcccgtagttattatttaagcagcctatatatatatatatatatatatatatatatatatatatatatttgtgtatgttaactgttaaatcacattctttctaaagaaagaatttctagtgtgtgtgtgttctctggagttctccaagtcggagggatttcctttactacatgatggccaacctcactgatagatttaattatttaattattgataccctccagagcatttgttgcctgtgtccacatttcctgggtattatgtagagactgctccaaatacttgttctagtctggaaaggcaggggtgagattgagaatgtctgttccccttttctctccccactggttccctaataattgtgcttttgtttcttcaaccacagccgaacctcttgaagccattcttacagatgatgaaccagaccatggcccgttgggagctccagaaggggaccacgaccttctcacctgtgggcagtgccagatgaatttcccactgggggacattcttatttttatcgagcacaaacggaaacaatgcaatggcagcctctgcttagaaaaaggtgtggataagccgccttccccttctcccatcgagatgaaaaaggcatccaatcctgtggaggttggcatccaggtcacgccagaggatgacgattgtttatcaacgtcatctagaggaatttgccccaaacaggaacacatagcaggtaaatgagaagcgaaggagagaaactgtttgcatgttttctgtttgtttgcaggggcattgtagtcaagcaggaaggaggtgaagtctgtctgtatttctccctgtgactgtctatggcagccttataatgttaagtaatcattcaccttgcttccgtccagaactctgaaaataaatcgtttcctactttactgagtcagatgcaggtgggaaaggtacacacacccttgacatcctcgcctggctctgacgatgccaacactcttccccttgcttgcctcctattttaaagtgttgaaccttaccacaccacacctagctcagtttccagtgtccacttatggtcttggggatgtatcagaggcaaggtaaccacacaggcatctgtagttgagccaataactagcctggagggctagaaagagttaactgagctccagggctagccttggatccatattggctgtcagcctgtatggggctgtaattaaacacagccccgtggtgggatgacacagtgaccttgactttaagatgccattttcgactggccaggccagagtagagagggcagttgctgaagcgcacagacatgcttactcgaaaagtttaagggcatgttggaaatttcaaaaggttggtttgacaggaacggctgctccctgcagcctgcctcctcagctcagtgataaatgctcccctgcgctctctcttgtttctgatgtggttttgacagatgtatcttgattttgtttgtggtttacacagccacatgtcacccttacaaatgtccagtccagtctccacagtttcttccctagcctaatgtaaaaaatttcttggagaaaaaaaaatgcatgcacatatttaacagctttctctctcggttaattttaccaaggaggtagctaggtgtgtgggtttctcagcagctccagggaaaaggaattagaagctaacagagggaatttaattccctgccctagtgataaacagcaactctaggtagtggttcttaaaacactgtttgctttagcatgtagtcagagcaaagcagcttctgtgctgacagggctcccacatctgggagacagctccttctctgcattgccccaccctccaaacgcaggtgtgtgcatttttggcaaggtagatagatagtcagtcacaagacttactggaacttgtctctgatacaggtggaccatggagttgaactgggggcgagggggcggcagggaagggggggggggattaaatgtcacattgctcctcccccaaatctggaatttgatcgttaagatcaagtgtggcatttcctatcttcttttttcttttctgctttctgcaacaatactcaactattttcctttcgtgaagtgaggattctgcttgccaggaacgctgcgtgtgctgagtatttttctagaagccaccacatttagcttctgagacatggaggttaagatttttatctcccccacctccctgtaggatatggcaatgaccatttccatgtgctgccttgtgactggaaggagaaggaacacaagtgtaaggcatgattaatgaagcaagagcaggcaagagcaggcggaaggggatttgtcatctttggagatccaaagccttgctaaatcaccaaatatggagtaaggcttgtgtgatgtaacatcatatttacatatcgagctgctcgtttaaaagacaaaacacagtgtctgtcaggcaagaattaaaaccacacttactccggaaggcctaaatagcttttcagtttcaggttagccagtttgaaaatcagggcctctgtatatagaagaggaatctgaagactgagggaagccttcagataaatagttagggctttttacttgtgtagttgggactctccatggatgtgcagggaaggaaatagcccttaactggttgtcataatgattccatggtatttcaaaactattatggtatggtagcagaatctagagaggaaagagagagggtgcacatttgaaatctgttttgcagggctaacggcgcattgtttccctgaaatggaaagccacctaaggtgtctcacatactcacaggctacacatgcgatccagaggtgtctcacatactcactcacagtgcacacatgcaatccaggagaggtaaacctttcatgcacaggtcattgcaagacctcggctccttcatgctgtttaatcacctgctcttaccctagtattggctgaacataaacatcatagtcacatctcaaagtgagatagatcatgactagaatcatgacttctcataattcacagtaatgaattaaggcattcgtatagtgaaattaacattctactattgcacataaattatgatgctctggacctcagctgcccctgaagcaaagttctggaaagatgactgtgtactctcagctggtttctctgtgccggggctcccacgattcccaacagtaaccatgcagtagacatttgaactgtgtgtcataaggagagaagcagtggtctatattggggaagaaatatattgatggatgactataagaatgtgcttggcaactccatgaaagacagtcacttaagcatgctgagtaggcaaggtttatgaaatgatagaagttagatttgagttcactgtgtgctctgtgccattttacaggcaggaagcaggaatgaaatcttcccaaggaaagcctagaatttgggaactttgaagcaggagggtaagacagtgtccttaagagctgcattaaagtagcatgcatgttggctgtgctcaggcctcccaaagctgaccattctttttttgataggatgcttttcccctgataactagatagatgtgtgtgttttcatattctatgcacatgtgtgctacctatatccagaagcattgaataaagctggcttctccattttgtttagatattcagagcaatacacacacacacacacacacacacactcttaagagacacagagaccattctaacagtattaatttaaatggctgttaacagcttatatcgtgtggttcagtcatcaatatgcaggtcaaataccccaaatcagatagaagcagcctttgaccgacggagctttctatattttttttgagtcttttattttgtgattagtgaaatacccattgaagatgactgggcgtaaaactgttttctttcacagaaaagaccccagaccgtctcacagtgtcagtcttgcagtcttggctcattgcacacggggatctttaaattaggattagcctatcataaagttagcttttaaacagaatgggaaaacataagtctgctgaagtgcagggaagcctgctgctactgatggaacattggtttttccccaactaacatccagaatacaggcatttccattgggggtgtttgagatcacctgcctacacagagcagctgatatctggatatgtaagacagggtctctacggagagggaattcttaggaacgatattaccatgttacttacaggtgaagcaagcaccacacttttcagtctacagagccaacttccctttccttctctgtacccacttctacccagatgaaacggaaggatgcgtttgtatattaattgtaaatgagactataaatggcagtgtcttattatggttacttatttttcatttctctttatctgtatgattctgaataaaaagaaatactgatctacgaagtcaattttcagtgtggcagcgaactccagaaaacaccgccattcagaaagcaaagtgaaatactggcaactgtttatttatctccagagcccatagagcagagaatgttgttttgtaacaaatacttagcattttcatagctaggctgtgcttgtgaggccactacccacagattgatgttcgtggaactgtgagtcctgcacacaagctgtatttgtaaataagacagagaagggttgtggatgggctgcttggatgttttgtcaaagtacaatgtcagagaaactcttaagacacattgtaaatagaactgtcacagtgactgcatggttgagctgcagaagtgtcctacaatcgttggcattgttagaggacttttgaaagcttaattaaacacagtggctccatggctgctaaatttactttggaaagacaaaaaagaaaaaaacaaaacctaacatatagaagaagatcccaaggatctcaaagtccctcagatgtcaccctcttggtggcactgaaaagatgcattgcacatcttcctgggcacctttcagaaataatagttttgagactaggtccacgtgatatggagagcattcagtgtgtgatggtgagactgtgcgcattcttccgtctcctgctgttacagacagttaatgtaaaaatggccttttattggaaacacaaatatgtattcacttcaagaataggagcagaggggggacaaagtgtctctcccgttctctgtttattgtgtgaaaactaaaacaaacaaacaaaagcggcaagtgctgtaatttctcaagtcaagccatccttgttgtgggcaggttgtgcactttctttcttcaaggagctgaagtatgctttgcacacctttctcccagggagtggcatttaactgtggggctgtccaggggctagaaaatgcagctggatgtggaactgccaggctgggccagggcaggcaccttcagttcagggagaggcgaattgggcacattaatggcacattttagagtcctggaaaatcattagctttacactgtagcttctgtctttggccaacatgggggagctaaattgtggcacataacaaatatggaatgcagattttagattttcatgctgtcttcctggtggtgttgaataaaggacgtggggcaaatggcttttcatagctgccacagagtcagaaagtttggctttcctgtgggggaagatgtaagattgaagggcgaaggagagcccatggaagatgtcactgggcacttatctgatctatcttggttgcatcctttatgacacaaggaaattatttgacaaaattcacttcaagacccagtctatcttatacacagtagtactagcctctttcagtaaaaagcacttagcatcaaactggaccgagtttggcacattgccacaatttatcgtgagatttaatcaccaagaatctttggtacctttttgctagttcagatttcatttgggtcatgactatgtcagcactgtttctatttcaaagaaaaaaatacgttttttacagtagggcccatttttaatatttcaaacaggtttttattttatgtgttaatttggaggatgttaataaagttcataaaatatgtgcagactatataatttaatggaaaatagctggtattttttatttgtaatacaaatagagaactgaccactgtgccctcctctctgtccctggagtggcccaggtaaatcagtgcccttaagctgcttttccctttcgctgccaagtctgcagacccggccaatatctgtaaatttacctttgtaatttgccatgtagtttttgcaacaatgacctaattaatttgagcacgaaccatattattgctactggactcattttctgtcacaaacttaatttccaggaaatgcaacctgacgaataagaattctttagctctccacatgtgttctctgagaccaaaggcaaatttaaaataataataataaatactaaaatgccagcattattaaaggcaatatgcttgatgccaaactcaatttgaagctagtaaacatcaaactgtatttctaatcagttttcgaatgtaacgtattccatattgagtttgctggattctgtctctgcattttactggccagctgcactcccctctgcatttttaaaacatttcagcaaaggattttgctgttcttagcagggttagtaacttggggtctatttctgagctcattcgtcattctgagatggcattgagttaggctggcaagggaaggatttgaggcatgggggggaggggggtggcgaggtcacttctgatcccagcagggaataggtgagcttcatttgcctttacaataggcgcacagttactgcaccttggaggggctctcaggtgccgctcagatgggcgcatgtaaatgccctgtcagatgtggcgttggaatattaatgcttcctccaccgctgcaccataataaagctgtacacagcgagcttaatatgcagctaggctagggaattgtataaacttagatagcccagtgtaagagacagcgatggaagaatgcgcggtatgctacagttcccagcttgttctgctttgatctatagcaaaatgaaaacatcatctattcctcctcgcagagttgtctcctcaactctgccgcctcccagtccacctccagttaggattttctttccttttccttttccttttccttttccttttccttttccttttccttttccttttccttttccttttcctttccctttttctttttcttctctctctctctctctctctctctctctctctctctctctctctctctctctctttctctctctctttctgctggtatggagaaactcaacataatttgtttcatatggttaattacaggcatttgaatatttaaaatttaaaatagccatggctccagctttttctgttaaaaagtatgtgatttgaacaaagggattagagtgtaaatatttgtggtgatttgcaacacccttcttctcccattaaacacacacgcacacatccacactgctgatttaaggactcccatacctttatttatacttctttttaaaaacctactctcaattggagcgccattaaaatacttttccattatatttttgagtctgttattgcttgaggttttatagagaatttttatcatgtgttcatttaacagaatcaacagctgtcagaaccagttgtgctaaatccacaaaacatacaaagaaaaagacacaggttttcctgaaacaaaacacttggaaaaataagctgccagaaccagggaattagaagtttgtgaccagggaactgaggtgtctcctctcgggcttgccccagggactgagcaggggtgatgcaaccctgctggaaggttaacttgggcagggtgctccactaagacagtgtgctgtgtgcagctaacctgctcaccagaggggctgggccttccacagttcccctgctcctgccttcctttccctccttttgatctacctaggtaaatactaaggtcttaagggtgctaaacacaaattacactcacctagacgtgagatgttcaggtagagactaatgtaagcggtgagaaaggcgccttgcatgtgccttctacagacaggcttgcagcatgttgttcagaaccaaatctccaccaggcgattcccactggggccctggagcaggtctgttgacgaagggaatacctggaggcctttggccactcacaatgagtttttgtttataccctcactgtcattaacattggtgaagaacaattacacctacaatttgatctggcctttagatagacgcaaattcacctactaaaaactccctctaaaatcaataatggactatctgtggaacccgaagaggtgctttgaaaacaaacacaggtgttgctgcgactctccaacccttccttcattttcgttttcgaactttctagaacacacagggaagcctcctactaagcacaggtcaccaaatgtatattcattagttgcttgttttcttgctaggtaatgatgcagtcacgttaaagaaagcaatcacatctgttaatttttagggaagattcttaactacttggacacaatgtttgacttgctagtcttttatgtttcaaagacagaacatctcattggacaaaagatagagccttccctatgccaacttcatgtatgtcatgatttcatggcatgcatacatttaaaaggctggccaccaggtaccgttttaacccctgccccagtcaaaaatcctttgagtttacatttaaaacaatgtattaaccaatgttaaaatgaaagtctccggagcttctcctactccatcccaccttaagattaaaaaagattaatctttttacatttaaaagtgagcactgactactgaaaaaaatcatttcaaggctgaaattttttaaaataataaattgtaaccttctcatgttatgttttttgttatgttaagggggaaaatcaataaggaaaaatttaattctgataaagatactcttggatctttgaaaacaactgctgtccttttaactaaaacatttgagcagcttcaaagactatgtatttcttctgatcttagagctgtgtgactggtagcaagcaggaaaaaaaagccttattctacatacaagtggattgcttaacaagtcagcacagacacgtacttgtttgtacaatagagataaaaattcctgtataaaaataattccgctgctgacagcaggcattgtcgctggacctgtcttctgtgcttgcttgtcccagctctgggtcctcctcccctgcgatctgcttggggcagcctgctgcctgcagactcctgaccacaagttaattgctatctattaagtatataggtattgtatttaaagagggctatcccaagtcctgcacgcctctcactctcctatgtgactgtggccagcagggggatggcaggcaatggctctaatagggagaatgactctcaggcagttagggaaaatttggctttcaagttccatttgctctgtagtgtagtatcagcctctaaacttttgtttttaatctaattctgatttaccctgtcagttcccatctcagccctcactgcactctactcatgtagagtaacattagtgtcaaacagttgttcaggactgtggacctgtggttcatagaaatggttgtgaatgaaggttccatccagctctgtgtcctattatttctgataaacattaaaactgggtcagctaatatgagtcaaggagccaggactctaacctgaggtttcctccccttttccctttactacgtacccacaaattttggtaagattcactattttaaaaatctgagatagtgatgagggagtaggggaggcaagagtagcagagaagttcaaacaaatccctgcagcacagagccatttgggtctagcagtggagcacccagcataggcatggaaagctattggcagtgtggcttgtccaccaactggggtatgacttgaacacacacctggggatgatatttgtggatgcagggagagagatacgttgggaattctgccactaggcatttttattttttaaatgctgcaaggttagtgagatgtcagcatgcagggagaggtctctccagactggaaacatgaaaatccaaattcctgtgatgcttccttcccactgactgggatgggctgtgcttgctgaatgccagttgatgtccgtccgtatgaccccttcctcttgaattaagcgccaccagtgcagtcagggcaaccaatgccaaaggacagcatgcttgctcccagaagtaaaccagacagcgttctctgcttcgtactccatttctgtcccttcttgctctcttccccttggaagcagaaatttctaaaaggcatgccactccaagctgatgaaaaagctgtttttctaccacagtggatgtttacacaggagaggcaacttgagggggaaaagctttctgggagggcggggaacgcgtggtaatctgtgctgttggaggacgcgtagtgttgcctatgagcaactctgggctgtttttgataaattaccatgtttagagataggtttggctcttaagggcttagttttatgaacaaagtcggtaacgatgtttgcagcctctgtctgtctcttagcccctttggcttgactagaggctctgtgtttagtttaagctcagcctggaagatagaacaattttgcattaaaaaaatgaggaaatcataggaagaaaaaccctttgctttttggatgaatcttactgataatttgctaaagctcatttgaattttaagcacttctttaatcttcaaaggctaaattgctttatgaatatgcatggtgtgggcagacttcagttcattacctagttgtaaattctaatgaccattaggtccttccagtaattgcgaattgttttgcatttttgattggcctattaacatgtacattcggtgcacatcaggctggcctgtcagcctgctgaaggagaaaaaaaaggtgaaaattgtttataacaccaagattcttagattttcaatcttgcaaaattgatgatgtaaaaaaattaaagcagagttttttcttctcaagattgaaagttcaccaagagatttgacatatttaatttacatgatgactttgcactccttcattaatgcaatttgcatatgaagctcttgttaatcacttttgatcatgttttgtgtattagctgcctcagtggctctcctcctcagatgccccagtagaaaggagcaaaatgatgcttcttcgcgccaagtttcctttagtgaattgaggaattagaagtctaaccttgagtaattacatctgttttatccgttttcttttaacgttaagtacagtttgtggacgtgttggctggaaattgttctcatttgggggaagagactgtaaaatttaagtgtgtgattgagacctgtccagagacactcagaaaaatgggttgactgtctcttcttcccaggcgctgctgggcagcttttattgttagtcgtttggtggcagagaggcctggtgtttcagcactgtgacatcaggctcccctttcagaagggagaggggacaaacctttggaaggtgctttggtggttgcttttaaataaatgactacaactcagctgtgcctggaaactgggctaggatgactctttcatcttgcaggtccagtgagtctgctgctctgggctctattgtgatttctcctggttgccaacataaacggggctggagacgcccctgtgcctccctccaggtgtaagagggccttgcttgtgaaaacaaggtgttaactaacggtttccgatttttgagagcctgggaatttgatgttgcttttgccgtggagtagtctctgctgtattattgatgctcgtctttggtttacaagtttaccactggttaacaagcagaatcagaacactgaggcagatattctgattaaaaggaatgtttaatgaaagaagataaattgtgatggaaaatgaagagagtgtgagaaacacaactataattttaacctctgagggccccagccttgccctactgtgacttccatccataccatgctaaaagcatgcttcagttcaaagttattaatattcagctgggaaacagtatccagaacacaaataaattattaagtgcatgaactttttaggcagtaagatgaactgatggggtccatctgtgagatgcaggggctttttatttgtgtgtgtcgaacgattctgccctctccgacttcacagcctttggtctccggccaactgcatgcataattgattccacacgcactatcattttcttgatgtaattgctttactaagatatgatgaaatctaatggagaatttgctatttgaaaatgggcaaaagaaaaaaaccttcctatttttatgtcggggtgacaggaggctggaggagggggtgttcaggtgatctggttctggaggaagcacaaggtggggaagactaacttagacactgcttgagtatcgttggctgtgggtagatagcaaggtctttgtgacatatggaagccagtgtgtaaatctctccctctctctctctctctctctctctctctctctctctccccttctctctctccaacccccttcaaccttccttctctctgcctctcccccaaactttaaaagaatgggatcctaacaaggcagaaggtaaacaggttagtcaccacacgccttattactcagtctatccaggagttctgccatgtcggtttatttaacttccaggaatgtaaatgctgacacaaccctagaagcaggaagaaagataataaatagtattagagttaaagatgtgagcatggcgtagtcgtgtttttcacccaactgtaataacactttagttgagacataatggtaagtcaaaacctactggaaacgtctgcttatatggagtacaaatttccttctaatagattggcatgatctagtgcacccagcgtagattgttatgtaatggcgaaatggcataaatgtcaagtgcacaactgattctgtaggaagtaagtgaaaagtattagaatttcttaaatcaccattaaattttgttggtaggacaatctcattaactccttaaaaatcacgtgtggctttgcgttagctgctccgaagcagtttatgagagaatttacagatgctgaaacattgttttaatccaagccagctcatgctttaaatgtacctcacaaacactgctcttttccaaagtccttaaagggagtagtagaggggaaggcacatgaagtatgtccatctccctgtggcaaaccgatttcaagtcaagtcataatgaacaacacacgatctgaaatttgatcagcagatacacacttgagccaaggaattgtctgtcttctctctctctctctctctctctctctctctctctctctctccccctctccctctctctctccctctctctttcccttttcctttcttttattacataccagggttatataaatcaataagccaggcagacagtaactactgtaagattaaattctaatatgcagaacaatgcagaggctgctgttttgaggaaatattaataccaatgtcaccaaaaaagatagaattaaaaaaaaaaaacaaaaaaacaaaacaaaaacccaaaccccaaaacaatcagaagcaaatgaacccaaagcaaaactcataattaacctccccaaaccattctttttacaaaactggaaatgacagaataatttaaaaggtgggggttgctcctaccttctgagtgcaaaacttctattaatagaccaccagtgagctagactgtctctgtgccttggaatgcaagacggtggaaataattagcagaggaacaaaattctcaaaatttgaagaacttgtgtgattactaggggtacagtgaaaggaaaaatgcaaatttcctcctcatcttaattagattcaattgttccgtgggagtgttggatttggggggaggggcaaggcagggtgtgctggacagaggctgtggtgatgctggtgatgcggaggctggtttctctggccagtggcagggacaaaagtggcttccagcactggcacagggtatggtaccttgagcctgatgatgatgctgtatcctgagactcttaagttagctgagacttttactgtgacctgggctttcgtttgttcattttggggagcagggtagagggcagtggcctgagcacttagctggacctggcttagcttcgaaggcgaatgagcttgggcttgcttttcttgaccatgtgagtaatgtgtttccaaccctgtcttggctataagggccaccagcttctcatggtggcctttgcatccctccccgcccccggatccagagtgtagccaaaacatactctttagagtttaatggtggtggttcgtcagagttctgccaaagtgtgtggagcgagtttcgttggctgcacttcccctttcgtgaaataataaaagtgcgggccaaggcttatgaatctatttttgtttcattaatattatttattatgcattttattaatatttttaggagggactgtgctctcatttgaccatttgtagttataattaatacattccgtactggttgtaaaaagtgtgcttgcatttaattgcaagtcagggtaaattaatggatatgatttaaaacaaaactcacttaaaatattcttgcagggaatgaaggaaggggcagtctctgcatttcatttattatacgggtgacagtggagggtgtatgggtctaagaagatggggtgcgtgtcggatggtagaggaggaggggcacccaggagcttctttcttctcttcagcttctggggttgccaggagggacttaagcaacagtggtcaagtccatctgctctggagaacatggtaaagaaaaggttagtggcaagaaggagggagcacaaagagaaattgtatgtcgggagccttgcttccctggccatggtgtagccagactggtttagcagacagaatgatagattgttttgtcaagggtcccagggtgcgccttgaacttgaagcactttgtttatcttgaatagaaaggggaaagcgcagacataatcgatgtctagtttttaggagctccaaagaggtaggagaacagagaagactttggggaggggcagggaaggtggggggaggggcaagactggattgtggnnnnnnnnnnnnnnnnnnnnnnnnnnnnnnnnnnnnnnnnnnnnnnnnnnnnnnnnnnnnnnnnnnnnnnnnnnnnnnnnnnnnnnnnnnnnnnnnnnnnnnnnnnnnnnnnnnnnnnnnnnnnnnnnnnnnnnnnnnnnnnnnnnnnnnnnnnnnnnnnnnnnnnnnnnnnnnnnnnnnnnnnnnnnnnnnnnnnnnnnnnnnnnnnnnnnnnnnnnnnnnnnnnnnnnnnnnnnnnnnnnnnnnnnnnnnnnnnnnnnnnnnnnnnnnnnnnnnnnnnnnnnnnnnnnnnttgaggctagtcttttggctacatacacaggttctatcatctttcctggcttgccactggcggggataaagactggtgatgatgccagcacccagagggcctgggatgcaaagggctatgtgtgctggggaggacagtgtgtgtaagctcctgggtgctgctggctagggcgtgcctagtgggcctgcatatgcaagtaggaaattgatggaaacattttttttaatggctgaagttgaacttgttggaaagcacttgtgaattaatctcttggtggctgagaaagataatctgaaagaaaggcccagagagtctaggggtggggaaagtgccctcgctggcagcccagcattccctacacaaggctgatggcaaacctatgtgttggggctgagtttgttctatcttatctttttcagtctgtttctgtgttttgagcttattgtgatattatgcattccacatatgagtgttggcaagcatgacccgtcagcccaataacttcctgacatttttagctcttttaatgtgccatcttggcccccctgccaccagtcagggaggtaattgaatttccctgttacgtgctggcaggaggcgtgttccggttctcaccagaggtgctgttggggctcaggctgggctgaagctgggcttgtaggaatcctacaagctagaaaatactagggcttccaagtggttcagggacctgtctgaaaggctgttcacacttttttttaacgtcctcatcctatccttgcaaagacatcatttcaaatatctgtataaaatgagatgaatctacatttctatccccagcttcatagggaggtggattaaaaagaaatctccttatttagtagcaaatagaaattgggaaaatttgggggcctgtgggttcatccaatagccacctacaaaattccgtcttagatgtggtctgatcctcttccaccaggatgtctttgtaactgaattggtaagaaagagaagcaggaccaaaaggggaaaatggcccttaaaaatgtgtttcatcttctctcctttcttccccagcatctgagcacatgaaacacagtagatggagggtagagagacgctgtcagttctagtgatgtgaccttgagcaggttttgtctcttaggcctcagtttccccaactgtaaagtgagggaaactgtagaacctgcctcctggtgatcccagtgaggatggatggagtcggatggatggaatccttgggcttagagcaggacacttgataaaggccagttaccgttataaccataactcagggttagaactgggccttagtatagtgctgtaggtgtgagataaggaggcagaggatgagatgggggagcagctgggtgggggtgggtattccttcttacgtgagcctgtggagagggggccccaggtagggacaggtcagtagccattttggatctgatgagacagtgaccccacagagcatgggcatttgctccttttgcacaaacacttgttgctttatgaggagtaggctgctgtgtgtgtgtgtgtgtgtgtgtgtgtgtgtgtgtgtgtgtactggatggagggagttatgttcagttcacacttctgcctcaccaccaactggctggggaaatttggcaagccatttaacctctgtgtgaaaagaaggcaacctaaacttgctatcttctagggtccatcgaacaggtaagagagagttgaagcaaatcccatgcttcagacatggaaatgtgccttctccagcacacacatgagagttgctgtgtccctccacatctgctatgctgttgcagcccctaaaagaagtgttcctgttggtgctattagttctgggagaaaacagaccggtccatcaagggttgggcagcttccttgatggtccatagctacctaagatacagtcttttgatgaaatcctgctgtgttgcctgagctgtctttctagcactgcagccttctgcagtggggctgatatctactgggcagggagccctgctgctgggcagccggctcttctatagctcctgtggtcaggttgtttttttttttttttttttttttcttctagttttcaggaaaggggaaggcttttcctgtctactctctggcagggtgtcataagcatactggagggctgtctagggtgtgggaacactgcttttaagtccctacttcacatctatccagaaggagccagacattagatgacagtcttgtgcagtaggaggaggaggatttattacctggtgttgtgtgacttggttagggtatggtagtgggctagaccaagaaaccaaacgggcttttgagggctgtgaagactggcaattgtttccttgtctccgcctctacctggtgtgtaaagtgagggttacagtgtgtgtgagtacgtgagtatgtgtttttgtgtgtgcatttgtgtgtaggtgtgtgtgtgtgtgtgtgtgtgtgttggggtagttactggggtgactgggagtaggaggcatgacctgcttcaaggaggttttggatctggctgaagacctgttggttgggcaagtcgggaaggcaggcaagatttgagggaagttttgaatggaaattaagagtcaacaagtccattcaatctcctctggctttacctgaggcaaatttttagctccaccaggctctctcccagtgttccacacatgcacactatgaacattttcagaaacaagacctgagacttcttgtaaagggattatttaatgtatcccagaaccaaatggtgctttctttccagtccccattcattcacacaactgtacctgtttagaaggacctactatgtgtagaggcgccccagggaggggaaggctggcagaggggagtacagtttggaaagctctgctcctccccaaggaggctgttcagatctaccaccaaaatgttgtctttggcttgtccccaagggttcctgtgagttagtggtgggactggcagtggctgttgagtacacaggcaggcaaagagctcgccacgtgttggcttcccttctgttggctgacagcatgtgcatctccagtggcttctggtcaaggccctaccttccactctcttcactttcgctaccttgtatggctgatatctgtaccggtctatcctaggtcaggagctcggtgaggctgcaggactgccccagaagagaagcctttagtgttattagttggaaagcaaaatgatacaaagaatctggttcctttagaatattcgctttccctgctgcctctctgtttattcctttaagaatcaggccagattgctgatggtggccttttgtctttttttcctttttcttttcctttccttttccttttccttttccttttctttccctttcctttcctttcctttcctttcctttcctttcctttcctttcctttcctttcctttcctttcctttcctttcctttccttttctttccttttctttcctttcctttccctctttctttccctctttccctctttccctctttccctctttccctctttccctctttccctctttacctctttctttctttcttcctttctttctttctttctttcctttctttctcctctctctctctctctctctgctctgatctcggtctctctgccttctctcctctatctcctgcatacctctccctcaaacctcccgattacttgcgcccggtacttccgcactcgacttcctttgccgccgccatcacccttgcgcgccaaaattgccgtaataaattctcttgacgttagacttcgtctcttcttacccggcccataagtcggctctggtacttcctacttaattttggcccctgcccctatgcccaatcgaacccggccgnnnnnnnnnnnnnnnnnnnncaacaaacaacacacaacacacacaccaccacaaccggtaaaaaaaaaaaatttataacaccactgtctagacttggcaggcctgcgagtcgatttcaaagtaccccctttctttctttctttctttctctctctctctctctctctctctctctctctctctctctctccctctccctctccctctccctctccctctccctcctcctcctcctccttcttcctcctcttcttctttgttctgccttccttaaaagtaagcatgaatttaatgtcccaagaggcaggctggtgacccttcaagccaagtgcctggatgtggcaaaactacaataaatattgaatggtgagcacaatagaaatttaacaaagcatgacagaggagacctcagtggggccaggacgggctcggaggctgctggatgaactgggcagtatttctacttcaaccggattgaaatgtcgactaaaaatcaatgctgttgactactgataatttacaatgtttctggcgctaagtaattcccagcttaagaactcgttggctgtgcagacattagtgcagggagtcctgtgtgtcaggacgagtcaggcacattatgggtcagtcctttatctgtctcatcatgacttttacacagttgtcatgtaatttatggctgctttcacgttgtcaaacattttcattgtgtcgtttccttaacacactcctgacatagacacagaccgaaggcttggcgttgtttcctaatctgagaggagacctataaaccaccaaattacatactatctttgggctagtcgagatgtgctgcagattaaactcagaactcatttgtccccgatgcaaattattaagttccaattacaaatatccatttaattaccccatacatttttgttttgcagatgcttttgaggatgctgtcctgggtggaaggagggtggggaaggtataggagacaaatttatggcaattaatgtacacgtcccggatggtaaagagtaaacataagagatgttgtctgattacttctttgattagatgtatagaggatttggcatggggatgaaaaaaggttgaaaaccttttaaaaaagtggacactttaaaaatattttaaggaagagggagcaaaatacagttaactagtagctgtctgctggaacacttctcttacaaatatgtaattctgcatttgatccaatcaccccactttggaatttgatcctatctagcgtttgtagaagtcgatggtaagtgccaccatgcctatgctgtgcctaggatatgaaatcattattatagaaagaaaggcaatttgtggagtggcaagccatataccctctttctgctgtgacccttgtgttagaaagtaagtctgcccactatgtgaagagatatcagtttcgataaactgtttgtgatcaacaaaaaaataaagtaggtgataaccatacaaagccagcaaaggttttacagatcaatatttactttcccataaaaataatggcaaaattatcaagacttgctaaaaggtcataaagatctgagatcttttgggcattgtaggtttttcttgataagaagtattaacctcaaatattaaaatgacactcagggttggagagatggctcagtggttaggagaacttgtgctctttcagagggcccagtttcaattcccagcactcatattcacaaccattcgtaacactagttcctggggatccaacaagcatgcacacggtgcatgtacatgcatgtaggcaaatcatttatacatgttaaatctaaataaaaaattaagacaaaaaagccactgggctgatagccatggtatctgatctctggctcctccaggagtcttgagctctcatgacacccattttcctaaaagattaaagatgcgggctggtgagatggctcagtgggtaagagcacccgactgctcttctgaaggtccagagttcaaatcccagcaaccacatggtggctcacaaccatccgtaacaagatctgcctccctcttctggtgtgtctgaagacagctacaatgtacttacatataataataaataaatctttaaaaaaaaaaaaaagaaaaaaaaaagattaaagatgcctcctttttttaaaatgatgtgtctgcgactgtaggtgcatgtgtgcacgtgactgctggtgtcctctgatgtcagaggtttcccattttcctggagctggagttaaggctgctgtgaggtgcccatgatgcagggagaggagccctcagctgctgcaccatctttctcccccctctgtcacatcttggtatcctgctctttctcatgtgtggatggggtgtttggaactgggtggctccttacgccccatcaggacaagcagcccaccagtttcctcccttctctctggaatttacatgctgagtgtgtctcacctacaaagagggctgagcatgtcttgacttgcctcaaaggtgggagctctagtgggtagtaggatgcaaactggtatctttcaaattactgaaaggaaaaccgaaacactgaataatggaatggtgacaagctacagaactttccaccttacgcagctctatcttttaattgttgcaagctgtttttgataaactccaaggaatataatgtgtattttcttcaatcctgcttttttcccttggcaactctaactgtatcaatatagaaatacactttaaaaaaagtcacttgcattcaaacaagcaggtattttaaattcaattaactggctgaattcagtgatattttgctccttccttctcctaaaagctggcttctctgttatggacacagcctgcatatgctgagttcttggagtttcacattcttgcttgttaaaggcatccgatgcagcaagtttagcacagctttccctctgttattgttggaagacagcataagttgaggggaactgttctttttttaattcatcatgtaggtaaaagcatatggcctgttctaggacatgtgatctttgcaggctatctttctaaacactgtgtttacaactgactttcagcatggacgaatctaccttctctccagtccagaaagtgccatttatatgtcattaagtcagatgtaagacaatattttcagaagtgtgccaaaaagaaatatttgcaattatcctttgggtaataattgtctaaaactttctcttatgatcctctgtgctcagaataaggggtaaatgagcccattgtgaaatgtgtgttccttgtcggatgagacacacttgagatctataatttaaataaaaagtaatttatttcaattactgccttcctaatttataatgttttgggatattttttccctagatgtgctctgtaagggaactgatgataagttgtctgagatttttaaatgctcttctacctctgacaattataaaaattaaaatgaaagccctctgaatgaagaagaaaacaaatccagaaaggaaggtaacaggccagatacatgtatggtagcatcatgggaaaaagacagcaaccatacaggaagcttaggaaagcccagagccctttcttcttcccgcccatattgcgcagatgtctcagccaagtgttcttcacgtaggtgggaagcagttgctagggcaggcccagctcatggatgcggttggctcggtcacaatgtgataaatggattatgtttaccatggcatattttgttttgagctgggctgtgagatgggagcaaaagataaatgaggagaccttcagttttcacattagttcctgtggtcctgagtttccaaaataataaagcccttttgaaagcagagtagtgatgagggcgctgattgaccttgaagtctgagctatgatagtccattaaaacaatagttttgcttacggcttctatttgacttaagtaaatcatttagggttgttgtttaaaccttggtaaactcacgaacttctgggtttggttgaaagactgtctgtctgtctgtctctctctgtggtgttctctctctgtggtgttctctctttctctctctctgtgtgttctctctctctctctctttctctctttctctctttctctctttctctctctctctctctttctctctctgtgtgtgtgtgtgtgcttgtgcccaagtgcgcgagcgtgtgtgtgtgtgtctgtgtgtgtgtgtgtgtgtgtgtgtgtgtgagtgtcttatgattcattttcttaggctcctgttagtgtatttctaaatttaactcgaagtttcatctggcaatgaatgatgtttttcttattggaatcagtgtggtacacctatgtaagactaactgtgttctagaaagaaaaatcctcaaagagatcaaatatcattacaagacctgtacacacactcgcacatgcacatgtgcacacgaacatctgtctgtcaggtgagattggatgggctcatggtggtatggccatagtatgttattatcaatctgtcagctgtgtaggaagggctttagaatttgtcatgatctgttaagtcagtattgaagtttttttagaatgttagccatggagacaccactttcctcaaccccagctcaggccagcattttgtctgattgcctgccattcgcatggcccagctcagagcccctgagataagtgtaaatatacagctgcaggcagaagtctgcctgacccactaagtttctgggcagtctctctgtgacctgcatctgcatttggttaaagggatgtcagtaatctgtacacagtttcttcttacttactgtgtatcggaaagatatcaagtccagtgtgattttacctgctgtgtctacagagaaaacggccaggcaatttttgtttctgtcggtgtctctctggagcactagctccaaaggctgatcaataggttttattgtagacctcactgtctctaaaagcattgtgaccttatcctgtctaaaaatagtatttgctcttgcctgcagaaccttgacctgtgaaaacccatttggaacataactgacatatctagtcagctgtagatcttagacgagctctatgaatgaattctgtgcagatctgtccaagagaacatggtcttgggagaaaaataaattccagttctgaacactgggagcgtgcctgcttgtctgatgccttccttgggcagggttgggagttaaggaagtgagtgcccgggagggtgcatttctctctaagtggccagagtgggggctggtgtgtaaggtggctttgaacagtcactcatgcttccaaacatggattctctgaatgctttccttagaagcttctgtctcaagtgtgggtggatggggttctccagtgtatactcagatgggaaaaggtggttttgagtttagagttgttctgccctattgggtaagaattactgtcactttagcattattctaggtgtagtcatggttttgtggttgtgcttaaaaggaaaataaagaacccttatctaaaaaaaatacatattgaagtatttactgatgaaaagatctgatgtaagggaccaatttaaataatccaccaggcagcagagcaatggggttgtagataagactgcacaggtggagtagacggtgggcgcacagccccgatctatgccatgctctctatttgtatatatttgaggtttccttggaaacatgactagtaggacctaacctgctttgggcttacaggactcagggtcaggaaggacaagggatcctgtatggaagcaagacctgtgagctcagtccagtatccagaaaggccactgttaaggggaaaggatggaacaagatggcttcggggtctttgctatcatggtactccattttcccagaagaaaggagagtccttgccatccgtggtgtttctgtggaagagctgggctagggtgggactgcgtcaggctatgcctctttccttagagtcctaggaagcagagctggccatactgatgaagacaaacaagactttggagctgtggcactatgataaaaatactccatagagggaggatgagagaacccagtcaagagctctggagcacctagtggcaggtgggattggggtacagccccaagcaggtgtggagaacaggcagagcttgaataggcattccctgggtagtaaaagccaggactcactgtatgacttcaaaacagggtcagtgatggggaaaagctttgccaacaagagctgaggtggacccagccttaccagcatctgcttcatggaagctgaggccaagttttccaggtccttcgcaggcctgcagcttcacaaaatgtctgctcttgcttgcttcatgcagaggctattattagcaagtgtcattcagttatctgagagtggcgcttttagctgccatctaagtgcctgacacttgggcttactgcaattaaattttaggctggcttggcctcactggcttctgaggaaatgtaacatggcaccctcaaggacctgtgtgtgtgtgtgtgtgtgtgtgtgtgtgtgtgtgtgtgtgtgtgtttgcatatgtgtgtgcacgcacgcgtgtgagtacatgtgtgtttccagtctgtgctctctgtccatctgggagttttgagcatgtaagtgactcttgggagattagggaacggattaaccttttgcatcactggtctccctatcacacacactactaagggtaatagggatggcgctgagcgctagactacccccacttttcctccggtcctgttccattactcccccaaaggttcagacacatcatttctcaaactcagtttcattatcatgcttgatggacagggaatacgaaactagagtgattctttttgtttttactgtttcacactattctcatgttttttgttttctcatgctaatgccactgggaaccaatggttcctggcttgagaggagcagcaaggtagtgtgtgtagagtccttggggtggcaggaaggccagtatgggggggggggggggagggagcatctgcttccttgtgatgcaaatatttttgctctccttggtgttctgtaactgcctgagaatttgggacctttatgcttcagagtgttgggttggagtatagcggtgtacatcaaagctgcttatttaaaattcttcacaaaactctgtgggaataatttttccttcttagacacagaatgcaaatgtgtgcattactccatcaaagggcaggggtctttattttcatgatctagatttttaagaattctgtggctcttgatttcagttcatccgattccagaatttatactcaccgattagcaatgcattatgcaaatcactcagcttccatatccaaatactgttttgcatcattcacacctcatgtcttgaaaaaaaaagtgaaatgtttcctcaaaataaacaaaacctgcaggagagtttattgtaagggtgaaaatgaaacacgtgcccatttgcctgggaactttgagggaaactttaatagtcttgtataaatagctttgaaagttttggggcccctgctcataggaagtaccatgtagagtatattacactattattggcttttgaattgttcaaatttgaaagaagatgccctaacactatatcacatacacatttatgcacacattgctatggctatgcatacgaatctcaaggagaattattaagtacaattatgcttccctgacatgtcttgtttaaaagaggggagaataaatagatgccaagagagcgttagccaagcatagtcattaatgcctaagtcatggcttggcaagtggcattgccaagcaaaaatgttcttgctttctgtgggattttacagttcctagagccgtgagtagaaatgcactaagagcctgcctcagaataggtgtgtccccatgctggggaagtaagtggtcgtggcagctcctcccaaccccatgtgtcagaacacacgggcctgggcgtctgcacagaattacagtggttccaacctcactatggtgagtgattaatttgctattgcaaagcatgtcagatttcagtagcaatttctctcacaaggaagaaagaggaagaaagccagtaaggaccttagtttccccttcagcacaaacacgctgtctgtctcctgctatgcccgaaactcatctctccttacatgttatagacacatttttggcattgcacagagtaagcgttccaacatgtttttaatctttaacttgcacgttgttaaaagtctgatgctccgactttcatctacctgcctagagatagttcagggccctgcacctgacaggtgtaatgtttctgtgttttatgtttttccatatagaggttaaagaaataaaagaaagccatgagatgccttaaagatgttaatgggtgtaggtggagccaggagcacacagtcctcaggttgcaccccctgctctgctccccaccaccaagctcccctcagcatttggatttaaatgtgctctttgcatttggctaaaaaggagctttctgccttgataccacctatgagagactccctgcactctgcaagagttgggtgaaaatcccacttcccaagcatggctgacactggtgtcaggtctcagtctgactgatggcgtcataaccattatactctgagcaggaacatttcatggagtctttccagatcatcttgaaacgtaactgctgggttctggaaatgcccatcccagcgtgccttgtggcaccctgtctcatattttgaatccggatggatcgatttatttatttatttatctatttatctatttatttattttactttacacaggaggcagaggcaggcagatcactttgctcctgaggtcaacctgttctagatattacggtccagtcagccaaagttacataatgacagccctgtctaaataataatagtaataataataaaaaaggtttgttggtttgttttggcttttgagacagtgtattttgtagctccagctggcttgagatttgtggaaatcctcctgcctcaggtctggagtactggctggaattactggcatttgcctctgaatgatcttttagggggaattccatagtgaagagcagacagccagaactctaactgccttcacggtcctttggaaggctagtgtgtcacctgcacccactctggtgtgtgacgaggtctggtgatttagatttgccttgtccccgtgttgtgcacggacctggcatccttgtgggtggggctctcccactcagtttgcactgggtccccactgctgacaacttcccttcacttgaccactgtggtccaggtcagttgcagccatttcacaggcatgatgttaaatctgctctgcatacagatctttgcaaagcacttttaaagttcccaaggcctgcctcagataagctatgtgggactgtagtctgagttgatgctttccttacctgtgatctttatgcagagtgggagcccacacgtcaggagtgggacaagatgagatgagctccagcccgggcttgttggttggatctggagagagaaaacctgggtctcattcctagattaagatggctaaaccccagtaattattttaaactgttgttaaaagttccatcttctaagaaattgacttttagggcaaggctcttttgttcctgtagttgacaggagcatctggggggatcatagaagaaagaatagatatttgagaacaggtattttccatcatagaagaaaaattttgttgaacattagggccaaagtataactcactgatagagcactttgcctaccttatgggaagccctgggttgtagttgtagccacacacacacacacacacacacacacacacacacacacacacacaagcacaatgtacagacacatagacacacacatatatagacagacacacacacaccggtgcatacacacacaaacacactcacacacagacacatacacacacatagacacacatagacatgcacagagatgatgtacagacacatggacatacacatatagacacacacacacacacacacacacacacacacacttactttgatctaagaaaccgaggacacttggagggagtggtgggcagcgaggttgcttgctaggcagccagagccctgagctgggtctccacactttgactgcagtctggctgtactagctctttacccttgtatccagcaggagccagcaacgctgctttgccttgtgtagcttcggtgtgtgatggatggagccctttcctgaccctgagctttgctcaccggtgcagtttggagcattcatgcctaacttagaaagacatagtttgtctgggtaatcctccctcggtcccgtcttctccctgtgtgctctatcctggttcagtcagcttcccacctgatacttttggatattccgggtgttggcagttctggtgtttgcacaacgtatctcctggataggttgcctctcttattcagactgttggacatctgggaaagatggagttgggtcagtgacctcctctgaagcagacaagtcttagactcagctatcttgacctcttcctaagcatacagttctatttttaaagctgcctctcaatagcaggaaatccttccttttgtctaccttcaatctcttatgcttcagtgtagacccatttcctctgtatttcagagaagacagactatctattcatcagcacggggctaagaccccctcgtatttcagaggtagctcctctggggcctagtgcacatgaacttgttttccctgtcctatctatcgaagcttctcggggtggtgcagaattatgatcctgtccccaaagtgcctcttcctcagctactctgctggtgacaacttcacggagatggagaaataagcgtggcctttcttgtctgctgtaactcagctctggtagacttgttcataactttctgctgacatgtggagaacaaaggttttggtgaggcagagcctagattccaggagccagcaaggccgagtctttttacttccaacaaaacccttgttaaaacaacaggagtcggtcactgtgtttaatggtacaacaaagcccaaatgcatgggataagtacatcttttctgtgtgttggggtgaggagaggtgacggtgagcgcgtaggacgataggaaaaacattacagacatgggaaagcatttcagagtacacagacgtggtgtgagtaatcacaggcttatagccacgaggctgacttttcagttcccacctcccttgttggcactcagttcagtgaagatagattagctgaagtggtgagcagggccacctgccctctgacttcaaggaccccagggcttctgtcctggtggagtggagagcagttcctcatgggatccttgtcaggttgatttccgcacttcccaccttgtccagtccagtgaagactctgacccccacaggatgacctcacagagggctcaatgacttgggaacttcttcctcaagtaccaagtctgggagcagagatgtggggtaatcagcaattatcaagaagccctgagtcttacatctgcctttctgtgcagatagcctctccctagcccgagcgatggccgggtcccacgggttcaagttcagtgctgctgtattttccaggccattgaggtaataagagtcttgggctggggtttggccaagtttgactctaacacaaacttctcctttgaagagggattagtaaaaggtggccagtgctgtccccacagccccacagtgacaatattgtcttctagattatgtataccctttgtggaggacagatcttgtttttacttttattgttgttactcttttgtattttccccacataattctggttcctatttggtgttcagcttgtaatttgctcaggtggatggaatggaggctgagctttgatatgaatatcctgactccctgccactgcaagccacgagactggggcaatcatctttgtcttatgccatgtctcttcagatggagggactgggagtggggatggtatcttggaagctgcactccatggctaaggagcttgcaccctctgcctctaattcaacttgagtcaagggcagggcttctccggggagcagaggaaggacctcagtggaggttggaaggtgtgagggaattggagctcacctgtccacagtcctgaagctgcctctaatgggagggcgtatggcctggactcccaagggacagaatgtggcctccccagggtatctctggctgttctggtagttgtttcaaaacattctctctgtttctgtttctgtctctgtctctctgtctctcttccctccttctctctctgctttctacatttaagtagggtaaccctcttatcaatgggattcacttactctctatgtcatagtgtatagagtcagccagaccaaatagatttatttgatatgtctgataactttcttaatgaaaacaaagtaaaacaaaagccaaaaaccaaaccaaattaaatttagctccagtattagacagcttgttctccaagacttagtactgtcataataataataaaaaaataataataacagcagcaacaacaacagtaatgtcaacaagagtaatatgttgaccatgtgggacagtggtttcaaacttaggagcccaggacaggtggcccacactctgagggtgcaactggtctgcctgtctgactttacctgcatactagaggcagcccagagtgaaagcttcctcttctagaggcgtggcaggtggctactaccttctgcctgaggtaatcagttgggagaagtgatgtgtatggcctgtagcctcctgcatgcctcacttcagcccaggaagctactgcactcttctggggacactaacgacctgggcaaagaggtatgagccagtgaggtgtgttggcagttgctctgggctttagttttgagtgagctcagtttgccacatctatgagctaaagctcctttctctgtgtattatccaggaggttgccgtgtaggtgggccatatggttgagtcagttaactcactttaggtgcgtattgtaatgaaacctgcttgttctcctgcccctgtcaaaggtgactcatagatgagaagccaggagagagtgaagcacctgtccagggctgtgaataccaccagactttgaaccgacttcaagtaaacaattatgtcattgaagccaacttaaatttgataagcaacacgtagttactggggatcaaattctctttagatctagtgcagagttagaagagataccgcctcatgcagtcttgtcagtgagctctctaacatttgtttgtagagcacttactgtgtgccaagtgtgatggttggtgcctgaagagaggtgaaggggccaaggcctcctccctttattgatgccagtgttctcatttgaggactggatgcgtgtgggaggcagcgttcaagtgaagaggacaaatcctttctgcctgagaccaagacttggagccagaaaggttaacgcgcacaggcctaggggagccagatggcttgttctggccacctagctactttgcagaactcagctacaaattcaaacacaccaagtctccaggccatgctttctctatggcctcaggttgtcactctcagcaagttccagagttagaggtggaggtatgaatgatctcgagctgtcccttcagaaccaagcgactaactaagcttgctctttcgactgctgtctagggtggtgagcacagtggttcctccctggctctgaaccttcagctttggtgtcctgccacactctgaactggtggcatggagtggctacatacatacccattttggagctcctatgacattgggaagagctgccacgtgctcagtccagtcagtctgagatgttccatttgctttccctttgaggagtctccatcccaggtgttggagccgcttggttactggggccacttggtaactgtgcctacatatttgactgcagcgtagcatgcaccccacctacctcacgatgtcattgatctgttaattgtgggtgagagatctgttcttcccctgctttgccattcactcttgctgccatagaagaaagcagaggctggagaaggggaatggccctctcctccaactttccatcccaagccttagacttagcacgcacagcctctccatgacttagggaacttaggttgacggaatggtgcttgttttcatgaaactgcaacaggagaaacatgatggttactgacagagttgtgttcttttaagtctctgactttgatcagatttgttaacctaaagcatcttggtgggggggttaggggggaggagagagaagtggggagggatgtcagaaatcagagggaagtactagcagcacaaagcatgttaacaagtggccattagtactttacacccactggtaaggaaacagtcgagtatcatcacatggaattctcttccaaactggcaagttctttcaatgcagtttctccatgttattgtctaccaaggaacatttatgtatgtgtcacagtgtatgccaaggtggtgagggcactgcagtcctggctgcattctggcccctgggtaggggttctgttcccctctccttcagcccctttcctggagaatctggaggcaccgtggtatctgacatttcaggggttcgtcctggctggtgacttggtgtgattatgggctctctgtgcaaggggccatgggacacaggatgtccaccaagcagtgtgttgaaatcaatctttcctaagtttctaaccaactttctccctccaacggctcctcacaaaccttaggaaacagattctcatctgatctttctgccacccccacctcacattttttctttcctcaaaccagatgaaccccttcatttatattataatgcaaaatgctcttccctctaggcctcagggcctgtggggaaaatggaatttggctttaaaccaaactttaaatccaagtgcccaggttgggctgcctggcagttttatagatgcgggctgagcagccccctggcagtttgggatggggaaggttcccccagtcatttttcaacaaatattttgaacacctgccacacagagggagctattcttggagttaggcatagagcggtggtcaaagcctaaaaatttcttcctctataggggcgtgctcttattctagctgagaagacacactgtgtaaatcaacatgtgtgttgtttgctctgtcagcgccttggagaataataaggtcaggaagagcaagagaaatggatggtggtcacactgctggcaggatggtgagggagggcccatgtgaggaaaccagccgtgtgtgtctgaggaacaagcttccagacagagcagtggaggacaagctctccgtgcagagtcaacccggttgccgggttctctggagaaggttgagggggaatcagaagtgagtggaaactgaggccagggatgtgggagcagctccttgcgggctgtcctgcgactttggctttggttgaagggaggtggaaatcactggtgggagaggtgacatcatgtgacttgggagtctagaaggccacctagaagcagacaagcatgacccaggcaaggcgatggttgctggagccaacagaatgaggatgtgagaggaatcggagtctccacagactcaggataaaactgacagactttgttaacaggtcgggtaaagggcatgagaggaagaacaaaattgagcggagatgtttggcttggggattgggaggggttgagttagaccttgggggtgggggtgggcacggaagaccataggaggcctgagggtgcgtgggtgcttctacccacctctctcagtgcaagactactcagcctcttctcgcagaggcctatgggagaaaacaagccaccttcagatagagctgctgggagacctcacttaccaactccagctcagattcactctggacttctttgggagaggcagttacccctgtgccttgcacctccggagtcttcctggtggtatctctgcattgtgctcaggtctgatggtcagagtggggctgaaatttcctgaggcatcctcctgactccttcccacagaccctatttccttcttgattcctaaaaagacagagctggcaagtggaccaatttcccttgcaggagcatgggaaccctctcatggaaaagtcaaataattcttggaattctcacaacacctaagccagccaaagctgagatcaaggaaatttatgtggggttaatttgcgaggaccagagtcaaacaaatcgcttctttgttctgacctccgctcagctctccagagtagacaaccatgaactggcaaactcagtgagaaatggaggagccctagtttctgtccaggccaccttcctcttgaggaggtcttcatgtttgaaggctgacaggtaggtaaagcacccacaagttccttccagggcagtacttttcttctctgtctgaaaaagacccgcagtacagcggtgcagtgtcagcctccatttctgctttggtctccagtctgtccgggccatggtgctaagttgtcaaccatagagcaaagtgaatcagaggtgacccagaggagaacccattgaagcgatcataggtccagccttgttggcacgggctaggcagggagatctaagggcctcagctgtccccagggtcctactaaggctagtgtcttaagtctgtgggtgcatgacatggcttcctgctatgtttgaccccgtaactgtgctctgagaccagttttctggggtggctgagggtgaagttgttcagcagccacctgctctgcctgccggaggaaagtgaagtgctgtgcagagaaataaaaacccagcccagtgcctcagagtgcccttcccaagccttacagtgtctgttgaggatgcctgtcccagagcagcagttggctgcttccatgtctgtgggatgtcccatcctggttggacttttgggcctgttcttgctccagaatgtatcctggcccagggcggggtggggggtgggggggtggggggtgtattggtgggggggggggtgcatgtgctctcagaaaccctttcccagagcttctttcccacaggcttttgcgtttggaaccaaatgtacaagagtccagtgtcctcttttcttcatttgtatactttgttcttgttggagggcgggcagacaaaccctgggtgatctgcgtttcaggctggttctttgagatgagaaacttagtagcggttgctcaactgcttgtgtttgtgaaatcatggacaatgagcaccacaacaggagagaactgcagcgttatcatgattctgtagaaggtggggttgcatggtctcgccaagttagggtacagccaaccctgaagacgggaatggtttctgaagccttagaaagcagtgcccgtgctttcttctgtttgctttagcaatttcaatgctagcccatagtgcagcatcccgtgctctactatcctttgttaagagagcattgaattagcatggaaacatgtctgggatgcagcttcaacagcttgatttttgccccctccccattttctgtctggtgctgttcggacgatggtttgcatctttctgccatatgtcagaggcagcccaagagttaggatggtgagctccctcaggtgtggaggacaccaagcatgacctagtgcagggtgcagactgtgagcttttgcaacagctgcatttggaagcagttcttcctctctttttcttgcgagattgcaaaacatttggaaatgcaaaagtactcagccatgtttttaactgctggcttgggcagaaagcagcttcatgctagccagtgcaagcagccgaggagtgtttgtatatactgcccatctttttgagaaagacatactttcttttctttgatttcctccttgctttcttgctgtcttccttttggcatcttggttttatattctcctgagctggaagaccatttaatagatggcctcccagtctgtggggatattatgttttttttaatagtgcttgtttatgaccaaggtcaaagacagtatttcagcacaaaaattagagttagttcataattgagtacatatgtatgctactgtttatttttatagtttgctaatttatttttaaacagctcagttacggcaacatgtttacagctctgcccatcacgtgcattcccagtcagggtgttaaaagacgcatgctattcaatagtttgaatcccaagttaaattagataatgccatcaggtagcaatttaattacattaattgaatgtttaggcagaaaagtagtttttgtataggctataatgaaataacatttataagtacacacgtgtaaatctcagcattacagacattatttgaggtcactgacagaaaaaaatggatgtacatcaggcatcaaggagaaaacatgagggggctccctcactgggggcaaatgcttccttcacaatgtaggagggtactgggcacggccatggttgagtgagctgtctctgtcattagtcctaggagaggttgtacacagtggcactttgggtgctgtgtttctgtgtttcctggggtgcagaggaccagctgagattgaaaacataagacactgcccaaggaggcctgcaagctgactcacaattcaggagagtttacaggccagtccaggagcctctagcagagccctgtgataagtcagataaataagactgcaactgtctcaaagtgactttccctttagaaggaagatgctccccagagaccagagtctcagctactggtcatcacggaccccagcgccctctggcagggaagagagctaatgtttagagtcctgcaagttattttgggtctatgtgttctttcttccctctgtgattgagtctggtgggtgtcaaatggtggctgaagaagcaggatctttaagtgtgctaacaacgatcggttgactatgagtaattcatcgtcttcttgaaccatctggtgtcacttgcactttggagtctagtgcagtgtcccatatccagcaaaaaaacctacttgggttatttgccaaatgccaccgctccacccccacagcgtctggcagagaattaggtgtggctgctgttgatcccgggtgggtgctggcggcacattgttctgttcatcattgtttgagggtgcttgttcccttactgaggtggagttagtctttcctatgcaagggctaaccatgaaaagcttaatctaaaattacagatgtgcatgttgtatgttcatgcgtgttgcttgtgcgtgtgtgcatgtgtgtgtgtgtgtgttactttcccactctcgtcatggggtggccatcttgactcctgttcttgggagatgggaggggacattattttacaaccttcctgccttagtgactgagagggtactctgccctccatagagcttaggaaactcaagatagggtaggaggcatgtgtacggtaaagagaaggagggttggtctggagtctgaggcaagacaaggaagctgctgcccctggtgcccacagtgcagttgtgtttgtccagctgatggcagccccactctctgactacctgatgagtgatttttccccaagctgacttctgctccaacacatctcacctacaagtcccgacaaaggactgtgttcctttggggctgttattactgcagcaggccatttggaaaaatctgcaagaatggaactcttaaaggacaaccttgaagaggtttttctgtgactgcttcaaatctaatagttttggtttatgaaaagcctgctccatcccacttaacaaccaccatgctgttaataatggagaggggggaggatgtgttttttactggtcccttcatctcaagtgctaccttgtgtggaagcaggagaaagaggcatctcaatccaaagatggccagtggcatgtcagctttcttagagccgcagatttgggttttcagctgaaagctggattttggtgagtgacatattttaaaggtttggagaagtgaaggtgatagaaagtgctcactgcccattggctctttcagggtttaaggggacaatataacatcagaatttcttatcacgacagctccaaagccacagcagacttggagaagcacagtgagtgtcccaccatctgctttgtggcttcaccatttcttgttgaaacactgagggaaagccatgaatgggctggcttcaaggaggcagacatgacactggttgtttgagcagacttgttcttcccttttcttttgctgtgaacttgacctatcttgcttccaggctgagaccctatttcaaggagtgtgtagtttaagtctagaaacacagatagtctgaagatgacatttcttttattatagctctttaggagagctagttggcaggttcaagtgtgtgtaagatttttgactttcagacatgggtggcttccttggcctttatggtgggtggttgggctgggtgaggccacagagtgacttagaggaaggtagattcagttaggtctggaagactgtgttttgattgctctcctcacagctcggccagcagttgagggccagcagttgaggggggtggggtacagggtttactgctgtgtgggtaagctcagggtcctattttgttctctgctaagtacctctgcttcctgtggggagtcctgcctgccaggcaattgtgaagcaacaaggagaccagggtctcttggcacaagagcagtctaatctacatgatacttttcaaattcttagactatcagcagtactgggaaatgtggggttcagtgggtattagtacttgatcttttactgtccctctcctcttctttctccttctttttcccttctagaatcaataaattattatcataaacctcaggaggcttagatgaattactgtctaattaaaaaaattacaaaaaaattatactctgacaaaagattcagaatattctatcaacagatgctaagtttgcctattgcccttcagaccctctgtgaaggttcagtcagtcctcacaaagcaggtttccttgaacaagggtcatctgggtatttggtccagatttcttggtcctgggctagcagctttgaagtgtagaactcactaaggctttgtaaacttgggaacgccagtagcatcaggagcgtggttagcacttgggtctaaacccaagctctgtggctgcttgtgccagactagggcagtgcacaggcaggcaaacctgtgggtgggagtgggtgcccatcctgggagttggtggaggcggcagtataagggaactgttagttctcaagacgtaagagccagctggccctgggcagtagcttgcttcttgtagtgcctgtctgggctgcagtggtggtagtgatgggggtgggttcggggagggagctttatttaatacttcagattccctgggtaatcttcgcagctgcccttcagcactcaggctgtcctggtcccctcagttggagtgagtgtgtctcccagctgtttagaggtactgctgagctgcaggatggggttggcacaatctgtgaagtgtcctccaaggagtaggagcgttcaggttgggagtgagtgggtcctgagctgccctttctacatagacaccttcattactggccttaaaaaaagagcaaaccacatagcatatattaagatgacacaccatagttttgttccaagtcagtagctatccattctacatagacctgggtcctggaagacaggtcagaggtaggtgttgggaagtttgtttttgttgttggtggtggtagtgtgtgtctccatgtctcgttttatcctcatgaaactcaaacccctggccaaggagctccttagtgacagaactagaatttctgttctaccattacccgataggtgtgtcctgccctttgggttaccatgttagctaattttgtgggtttttttcccctctggtggtgacaatttaaaaacagtttcaataatgtgtcaagaattcctacttttctgagacaagatcttactaagaagttttgaacttggactctccctgtctctgcttccctggtactcacattacaggtgtgtgttacttgatgattggctagaaaacttttaaatgtctatttaactcctatctcagaacatgaactcagttcggtgtgatggatacattttgtctcatgaggggaaagttcagatgctctgttcagcgttgtggccaggcttgctggtacagctctctgtgatgctgcagggttccacaggagtcactctgcaatcttatcatctgaggcttttccttcccaaggatttatctctctatccattctcagcctatccagtcagggctggcctactgggagctctggtcagcctatcgagacagaactggcctactgtgagctctggctttggagagcaacatatctgctgtgcacctttctggttactgtgaaaaaaaaattaggactataaagcgtaagcccataagccatgcgaggggagtcatcttctgcttgatgcttggacgagtgtctgcacaagtatttacgattctgatggggctgagttgtgtcgttaggacatgcagtgctgccagatttccagcacctctggtgcccagcctctttgtggagccaactctgctcttccttccctggagctccattaatgtgagatttcacccagaataacacaagtagtagacacgatacttaccacttccagccttcactaataagttaactgcaagacagaggcaagcataacttttctgagtatgtcttcctgctcttctccccagagctttctgtgaagagtgcgctggctgggctgtgaggaggcatggcggtgctcaggaaaggcctgtgcttcttgccactcaaggcagcacctgaggagaatacacaagacaggacaaacattggaaattaatttgtcattaatcatatgacagaagtctctttcatttcccaaacatcccagactccctgggacccctaattcacatgtacaaaattggctgccattgagtacaagcaagataaagatagcatttcctaatgaatagttgggaaaaaaaaaagcacagttttcactgacaactctttagaagcaggtctggtatgggatgatgctgcagaggcatctcatttgggaggaattcctgaagcaggtgaacacctccagttttgaattagttaactgcaggatgggccaagcaattcaggtttccccctatagtggatgagtgtaagggactcaccccacctatctttggtcctgagtttgggggactagggggttcctgctctgggcttggctttgtagacagtccctaagaaacccaggcggtttgaaataatgccaagtcacacattttattgatgaggaaactgaggcttggagagatcaaagagctgtccgaagtccacagccaggaagcactgtaacaggattcctgcccgctgaccagctttgggagtgttcactccactggagggccaggacttggaatagagtgggctggtactactctgcctttcagggccatcagctcagtacctcagagggactgcctgcaggtagcagacatcagattgctctagatggacgtctaattcagagggactaggaagtgcccctgttgcctccttccccatttctcagggccgcactcttcccctgctttggcttaggattcctgctctgatgcccacactggttgagtgactgtgctggccaggcccccggccactccctgccttgctgggaaggcaagtctgtcagtccacagaggttcctgaggtggaggcctcagaggcctcagaatctggtctcagagagagatccttacctgccccatgtcctctcttcacccaggctggtcttgggatttttacccctgtgacaagttttcaaccaacagcactgctctaccctcagaccatagcagacatcctgggtagcacgacactgggagctgtagccctcagtgcctggggcatggccctgtaatgtaaccacactggccaggagcctcaagcaagcctgggcagaggacagaaagcaagagaggggggaaggcagtcaggtggaccagagacaaaagccagctgcagtaaacagcctgcaatgggggtgggtgccctggctgaaggggctcgcccaggctggcctgccctgggaacaggcagattggtgccagctctctacccttcttagtcctgtttgacacctgtcagctgcaggagctgcacctgaggctgatggggagagggagggagaggggagggagagagggagggagggagaggggagagggagagaaagaggggggtagggagagagagggtgagggagagagggagggagggagagagagagggtgagggaaagagtgagagagggaaaaagggggagagagagagagcgcgagcaagctgacatggcagagtgctcagaaattcagaaaatatctcccataccctgtggcccctttgtggcccctcagtttgtggggcttgttcctggggctggtgaagaagtgcagggcttaattaattgccatcttaaggcaagaatcactgcttagccagggccccaagggggggaaaggcatggaactctaaggggcttgggctccaaaatggtgtatgtgtgtgatttttttcaggggcttgggctcctatacataaaacagagctagcatcccatcttacttctaggaacaatgtatgcccaggcctgcccactgaagtagtgtagatcatggagcctccccagcaaggtgtgtgtgtgtgtgtgtgtgtgtgtgtgtgtgtttcttttcgagacagggtttctctgtatagccctggctgtcctggaactcacttttttttagaccaggctggcctcgaactcagaaatccacttgcctttgcctcccgagtgctgggattaaaggcatgcaccaccatgcctggctttttttttttttttttttttttttttttttttttttttttgttaagcttcagtctttgacataggacagaagttagagcagatatacaaatatgtctgtgctctggcagcccactgaggcctcccttcttaatatgcatttggctgacctgggctctgcttggtcagacactgttccccagcgcatttgattggaccccaaagattgaaaagatagtagaagccatcaacctgagtaccagggggcatgctggagaaccactcccaggaaagcaggggagctgggactggaacattctttcctttgtgtccatgtgtgtggactggacagagtcagaggatgggaaattggaagagacatggcccatctttctccccacacactggcttcctgttcttgtagggagatgtacttggcgggtgaactggccaggtctgcagttcaaacgcctgtttgaggcacatcagtactaggacatgcactctcaggcacagtctccaggcttctgagatgatagctgttcttggccagcaatggggtgagtccaaacactcagacttgtaagatggcctcactgcctcttccctttccctttcttcagccactccctgcttatgctttgatgagtaggtggggagagcagctcctctctgcttggctaggcccagtgtccctaacctatttgctgctgaagttggagataaccaggtgccagaggtgaccagggtgtgagtgtgccaggccacttctaggaaaggaggtagagatgaggcagcctaaccccttcctggtatgagggtgatgcaatacttggagattggggtctcactaccttctcggggcacacccctcaaccttatggggacctctcttgtccaacccagtctgggtgtgtgtcttatagccttgtttggtactgataggggtcgaggttagggaggtggctttggagcacactgatcttcctgtgaactgtccttgtgcccagcctgtaatgtccagggcctcttcttctagggtcctctggttatcgctgtgggcattatctacacctaccacctctctgcccagggctgtggtgttccctcagggagcttcacacccatctccccagaggctcatctttctcagagtccaaccctgttccccctgcccacctactaggactttgggtgttcacccgacctgcttggactcctttggactccaaaggacaagagccaactcttcaggggttgccttgtggctctcccagttccttatctttatggtgttccccagttccacgtagagcagtctctgtcacatgaggatccttaggaggaaatgcatgttggtattgaggtggtcactcagagaaaggggaaagtagattgggctggaaggttttcaaggcaaataaaggttgttaaattgctccacaagctgcaaagtgccatccagtggaagctattgttattattgtgatcatcatcataacggtcattatcattaccattataggatgtggcagtgggggaggtggtgactgctgagctggcgaacgctgatcaagttttcagcccattcttgacgcttataactgcaactctgtctgcctgtgacattgtgatttaatttcagggctggtgtctgaaacctcacggtgaagttttctgatgcatccctggtctgctaagccagaagcaagctttaggatttactcaaaacatttcttggatatttatagtctaaaacaaatctaaatctataaagcagaacatttaactgatttcattttctaaaattttctccactccgcgctcccccccccccatagtggtataccttttcatggactgtttctctagctcagtaactaccctacgaaaggatgttggcagagaaagggaaggttgcaaggaaaatgtctctcatttctgctttcttagaggatgctgctcaaacagggtttggattgactggccaacaggtgccagtactctgctgtgctctgtgctggagggaggaagagagaccatgaatcttctgactctaccgtactcctggagacaggcattgagtggtcagcactattcactccggtcttgtggttgtctgtagtgtgtcctgttctacagaaatcggcattgcagacaggaaggtgatctgaggaggggctaacctcagattcctcttggaagcatagagagagctcatgttgacatccagaaagtgaaaggctactgactggccctctttcagaaggcggcctgctcagttccggtctgagggcgggtaggtgttctctcccactttactgaaggcagcttttatggaattgttttccttgtgtccagagctaaccagagggcgttggcagacaccatgagacgcttagcggcctatcactctgcctctgttctattatgcttgcttcataggactaaccactttgccggcccctttgtatagccagggcttcccctgcccccttgtctgtggtgctatgcacagccccactagccaggcagtctctaaatgcttgttagacccccattgcaaagttcctgcttcttttcagcccttggaacctctcagtcctggagttctgggatcccacagacaagtcccagttgccttcatgtaatcccttcatggaacttcagtttatggctttcagccttgtgcctgcttgctctccctgaagcctgagttcagcattctcactgggggtgttctctgacctctggccttggcctgattcccttcttggctgcaatgcttccagatctacagtatgttttgtaggtggcttttaaaaaatattctaaaatgatggaaatagccatgtgtctgaagccctagctttgctcttagccgtgtgcactctgcctgtggcaagggctctgtgttgacaaggggtgttgagttacttttctttgagcaggagggaatttgcctggctccttatatctgtgcatgcaaatttgggtccttttcaaacagttaccatccaggggaaaccccaaactcaaaccacagggaccacaacatacacagggtgtctacaccccactcagagagcagcctgacagtgctcactggctgagctgaacctgagtttgcttcaaaggtgttgggttctgaggtagtaatggagcccgcatgctgtggcagaatttggcaactgtgtagtgataaggctgaagagaggtactgggtcgacctctgccccagatgtgtatgagagctcgctgctgattcaaaatcctctcaggtatgaagtagccttggctagggaggcagagagcagtgctctggttgacacagtgcaacaggctagagaaacctacctactgctggcctactacaggctgacagttgcttctcttgtgtcgagatgggtttttcggtggaaccctcgctgtccaggctggtctcaaaaactctcagagatctgcctgcttctgcctcccaagtactgggtttaaaggcatgcaccatcactgcctgacaagagttgctttatcacaagctccaaagaagggtttgccacccctccctgtgcccccctccccctgcaacgcccctccgtgtttaggatggaagactaatggttgggtatctgggtctatggctgattgctcaactgccttctttccgaaggctcttgccagtggagaactggattgtatttctcaagcagaataaaatgatttatatgccctattggttgagtaggtcatccttccccaaactgtaagggaggggaaggatctgttgtctgtacccctacaccttattaatgcccagccagctcttgcatgtctgtctgtctgtcagttctgacctctgaccttctcaccatagccttcaatattgctctttttctctcccttttctatagacccaaatttgctattgattgggaaaagggcagctcacctcatctctactgaggtgtaagtaataaatagcaggaactttgaattttatctcacaagctcagagctttcttactctgatgtacattataaatgtgctcttggttttgtttgttttcctgatagccctatgaagctgttcctgtcattatttctattctacagatgagcctttttcttttttttaaagttctcattgaagaaccaagtttatgtgaatcctcaggagtgagccctgagttatttatcataacagaaccgtgctgtgttgcccagtttggctatgcgaactgaagagtaggcaggtggaacggacacttctcattaccttgcggcccatgtctcatcttggctaggtctggaccactttaactcttctctccctattctttcgtctctgcaaatggcacatgacttataagccatcagggctattagacacagtttattccaacttgcttgtttatggtgggtgcttggggttcagttgtgtaaagagatgtggtcttgatcattggccagtgtacaggcaagtacaggcctagttcctgctgcagggttatagttattacagttctacctcattcctgggatgtgactccctccctcaccaactttctctgtttatgtcccatagcagtctcctatctgtttctgcttccgcttgagctctttctgtttcaggtgccccccttttgtccacaccccatctgttctgcatattatcccttggtctatttctgccactgcaacggggtcactgcagctgcagtcctgaggccccagctctcccagggctctgccctgagtggctgatgagggaagggaagcagagtgtcttaggctcctgtagtggttctttacccgttcattgctttgggcagtagctgctcccttgggtgttgctggaaggattgatgaacagcccccccccccccagcccccagccccaggatctttagttcaattttcctgctaatgggagaagcccaaccacctatgctttgaccagacaggggctctgagggcatcatttttatgtggttgcatgtggcctaaaggatgtctaccgtgtggatgctttgggctctgtacccatcgtctcctcagtgtattgggaggtttctgcttgatggaagatgacatttggttgtggagattaacagatggctggagcacagacctaagggttgcgctcctcagggaatggggtggaagtggagcagacaggatgatgacacactggggctccctggactctcaagcccagcaccttctctgcgttctcgaagtgccttaggtgtatttacttaaggggaaccaagatatgcatacttgtaaatttaatacataggcaaaatgtttattgtagcatgatcattacagtccaaagtgttaactcagctgtcaatcagtaggtgagcagttgcatgataactgttccctaacagtaaagaatgaaatagtaatacatttaacagcatgacgaatcttaaaattatcttgctccatgaaaaagaagttatgtatgagaggtactatgcaatttcatttatatgaagttctagaagagtcaaaactatattcataggaagcagatcactaattacaaagagatagggcttgtgggtgatccacagcaaaaggtcacaaggaagcttttcagagcaatggaaattttctttctggattttggtggtggttacaagactatatagacaaatgcatcaaaccatacactaaagcaatggtaatggttacatgactatatagccaagcacatcaaactgtacactaaagcaagtgacttgtatgtgaattatgctctgtcaagctgtctacttgagccagagcagggcggaaggctgcgtgtctgtccatcaaccatttgggttttctgaagacacaccagctctgaagggatccaaagcatgaccatgcagtctgggttctgaggaggcaccactgggcactgtgagagagctgggctgggctatctaccctgaacagtgtgtgaaagcaaaggagactcgggaggcagaggcaggcagatttctgagttcgaggccagcctggtctacaaagtgagttccagaacagccagggctacacagagaaaccctgtctcaaaaaacaaacaaacaaacaaacaaacaaacaaacaaaaaaaccaaaaccaaaccaaaccaaaaaacccaaccaaccaaccaaccaaccaaacaaaccacccaaaaaccaaaaaccaaaaaccaaaccaaaacaaaaacacccaaaaaacaaaaaagcaaaggagaaagggaatttttttcttaggatcccagtgggtgttacaaaaacaatgagaatcagattcattcatatccatcgactgatgccccctttccatgggaggaagcactagctatgtgactccctgttttcctgaaagtgggagggttttttcctcaccttctctaaactgcatgtcatagttctgatgcaatggcaaacatgtggcatctgaactttgtccacttattcaataaaagggatgccttttcttaacacctggctgggtgttaaaggctctgtagatttgggtctttattgtgcaaaaacctgtgtggtcaagtgctacttggtggctttcccaacttcaggtcttggctttcaaggccgggtaaggacatccaggatgctttgctagggacactcgcctgaggagaatctgttacataacactttcagtaaaagttaaattattcgctgccttcagttctgctaggagttcctcttaccagtccctgtagtcactggacacaagagtgtgtatgctgcatactggcttcaaagtgtgtgtgtgtgtgtgtgtgtgtgtgtgtgtgtgtgtgtttgtttggattcaaaagaatattaaaaatgcattttttagggctatgcttggttgtcgccttataaccccaacaactaaggcagagagattgccttgaattcaagggcaagctgatatacatagtgattccagactagctagggctacacagcaagaccctgtctctataaaacatacaaaagaaaaccattctttctggtgttgtacccagggcatgctcatgtagaagctgaattctttgttgatgcagatgtgcatggttgaatcacagctgcagagatgtaccaccttgaatgaagttgggcttcacataaagaagatggtagtgtgggggtggagtggggtggaagggtggctaactcctacaagtcagacttcatcactcaaatgtggtctaggtggcctataaagttcacactggctcttccctgggtgtggatggagtggctgttgaaagagggtgggcattaatgctaatctctgtgtagcataacatgtaactgccactcgccgctttttatctgggagttcaaacagatatcggactgggactgtttgtggtaactaagaaggttaaaattacgattctgagcagaaatgatatttggaagagtgacttccctttactaacgtaaagcagtctttcactatatttgcttgcattccttgagtgtcatatatcagatgcttttactgtgaaatgaagcaaaatcaagtagaagacagagcccttgcactgagggaacaggctgaggaggcatgtacttagaggctacctcaaaggagctgtaaggaaggagtggtctctgactgcaaggctggatggggaccatctttgtgctcaagtggctagactgaccttcagtgtaaatctgaagcatgcacaacattctagaaacttggagagggagaagaaaggcagacagtaaatgaggctagaagagggtgttcactcgaacagactatttccattggtggatacagggagccaagaccagaatagcagtttggacatgaattatggaactcaggaactgcaggagtcggtttacattctgcagaccatggcatgctgttaagatgctctgagcaggggtcaaaggttgcattccggaaggtgctgtagggcatggagtgggttctctttggcagacttgtccattctggaaaacgaagttagctgggtttcctttcttaagtgaagtgggagctaagtgctgtgggagaccaagaactgactattactaatgtagatgtttcagtgggtgtgggaatgtgtgtgtcactcttgtggatgcagaggaccatctctggggctatgtatgtgtaataagggcccagcagctccttgtcgggctcacccctgtcctccagtgtgtcacgatgggatttatctttaaggtggtgtggatgaagcaaggcaggtaccaaacatccatatcatcatgtgccctctataatagaacccttctatttgggggtgaacaggttagcctgagtgtgaatgaattgtcggaatggaataaaagtggggctaataaagaagataatagataagtaattgaaaaggaaaggggcctggaatctctagagattagctagcaaacaaagaaagcagacagcctagtggcctagaatagtctagagaaggcttaggtgccttttggatttaaaatgttagaacttctttcagcctcttactgttacttccccttctggttaggttcagacaagtgttggtcaaatgagcttttgtttgtggatggtcacttggccagctggactgtcctggacaataaggaagtttttttctttgtcaggcagggccaccatgtgcttatggccagggaacaacgccttttagaaggtaacagggaaagcctccagaggcagaagtatggaagaaagcgggtggtaccacattccaaggctgttgctccacagatattggagtgctgcggccccaaggagcaagccttgtgtgggccagcgccctcagtgtgagtctagctgggtatctggagtttgagcctcctaccctgtgtggcccacaccagtgtctcctttgtctgaagacaacatcatttgagatgggtgactttgggctagtttgtaatcttaggcttttaacacaagatttcattgttactatttttacatcaaccaaagctacaaagttgtaccaaacccctctgcagtgtggtgcatccaaaaggcaactgttacagccgcaacaggctttacagtgaatcatataaatgatactgactcctgtgtcagcaaaaagtgaaccacaaactgatcatagatgacattatctaaatgacagtagctatgtgtgtcctctctttcacatttgctgtaatcctgttatggcattgtcctcttacctcaagtactgtcaactttaaatgctgtcatattataactgatcgccaaggacagaggagaggatttgggagaacgaagtggtgtttcccaatgctcaacagagattaagagagtatgcctcccctctgataggccgaattcttggagaaattgagttaaaatcagaaatctcatctttcacaggttatgatcaattagtcagattcactccttcttaagaaaaaaaaaaagagaaacagcaatgggtaaattattttagaatagtttagtgcatcttcataatggaatgaatgctaggtatttctgttttgatctgtgcatacctcgttatgtagttagtcaggtctacctagtgatactccaggcttacttagggagactgcattctggagattgggaaactgagtgagaagaccttcagaggcagcaatttgagagtagctttgtttttgttggtgtcacttgaccacgttggtctacacatatgtcaaccaacttcctgctcctctcttccatcaagggttcgtgactttcttgtcttaacctttctgtgcttccttagttcgactggctgatgacatcactggttaaaatcagtctcgtgcttcttgtattccactgcccacaagaagggagtaagaaatgagcgtggacacccttgttaaaggctggttcggttgttagagagtgaggccagtttaagggcaccagttgaggcttgcttttcatgggtctgggaactttaacttggaattcctaagaaccctgttcagttttccctttacccaattctgtattaacttttaaatatatacttactattgattagtatttctattgtttatagccttccccaagatcctgaggggagattgtctccatttgagattcaagtacctgcccgacgtactgtcccatctgtgtgtaatggcacagggtacagacacctgaaagcctgactggaggtgcattgtggctgtgctgacattagtaagaggaacttgactaattgacttgcaaaatataggttagggagttttacagaatatcaaatcatcttacactttcctgattaaagacacaatattatattaagtagatcattacatggctaaaaggttgaaattgtgtgcgctgaggggcttgccctcctgcctacagcaggtggcagacggaaggcaggcagattcaccattcacagagctctgcatggctcagcagccaagttttaagggaaagttgtttgcttaaactttgcatttcccaggtcttttttcattcagacaggttatttttaaattatgtattaatttgctctgaatccgtttctgttagcaaggaaaggtgaagcagtggctaggtttgaggcttacagtaagcgtttctggttgcccgtgatagcattcacaatgtcactcaaggaaaggatgtagttggtgttagttccccttcctggcggtcgctgctcctgacagaagcaagttaagtgaaggaaggttattttggcccacagctccagagaatacaatccatcacagttcggaagacattggggcttggctgactccttttgtaaacacaaatccagagtaccagaggaaggccaggctcagggtttcttcctagaagcctctgtcttatcatagaccctaagtcagtgacttttcaacctccctgctgctgtgtcagtacagcttctcttgtggcgatctaccccaaccacttttggttgctacttcataactgcaatgctggtagttttgaatcataatgtgaatatgtgttctctgatggtcttaggtaaacccagtgaaagggtcatttgacccctgagaagggtcatgaccctttggttgagaactgctgccctaagtccttacaaccttccaaaacagtgccacctgctggggattagtgttaaaacaccggagcctgtggggaactttcatcataaactgtaacactgtcctcctgagtccgtggtctggttctctgccaccatcttttgtccctgagccagttgtcagttgttatcagagcctttgtgaaagcagctcctggatcaatcctgtttctgatctggcatttccatgtgctcagtgctgagttttaaatcctgaggaccccacttgtgtccaccactgggctcatggtgcttgaaaaaaggggagagaaaggtgaaggctcttctgggtcaggcacacccattttcttttaatatcttggactggtaagtctttataaatcgtctcctgcttgtgtcatgctcaccaaatccagctttttgagcttctcacattagtccttaaatgtacatatgtgtatgaagtggattccagatttgagccacagttctccctctatgtataagaagccagctcaacacttgttggttggaggccaggaaaagtggaccagtagagctatgattggtattgggatctgatgtatgggggagagaaccaatcaccaagtcactttctggaagggagccttgttccacctacagaacaaggaaggatcctgagacatcctgtagcagcccccacagatcaccttggcccagcagccatccggccaaatctatcgtacagggctgaggccctggcatagctcccactctgctgctagaaggctcctaggagtctttgggtacatgttgaagtgtgtctctggatatactaaatctctctcccatcagttgctttttttaccttccaatggaggatatagtaaagcagaaaatctcattcctcctatacatgctaaaaatgggagctgcatgtggtcctgtatgtttctgtgagaaggaaaagccatcctttcggtgaaggggcatgtgtggaggacctgtaattgctgtgtggccttaggcaaatactaacattctctgggttgagttcatcttattgtccaaaaaagggcattgctactatttatagacactctgggacagtccccaaagaaaggaaacttgtcattttttactctagaatagcaagtgacctttctcatatctggactgctgggacagcttcctaagaacctaatacctggcagcttgatgacattagagtgaggcttttcattaaaggaattgatcaagttttgctatttgtacattattttcggagtctaggtttgcttttctctcataggcaggatctaaaagacgaggggtctgctctggctcacatagagcttagaggcacagggggttttcctgggactagtatccacatgaggatggctgggtgagccattagcaggaaggctactgaggccaccgaggctctagactgcagccgggggcgtccggagtgtccctaccatggatgccttgctacactaaggatagatcctgagtcatgcaaatccagtttgtatgatgcctgcagcaccctgccacatcccaagccattgaatttcctaagatagctgctgcaaggctgaagtctgtccatgtgtagcaacctcaagggagaaggaggctgtttagggaactgagagcactggcaactgtggttcctgccttgcttgtccctcccacagggcctaccttgttgttggggacaagtgtacgcaagcagttttacctctccaggccgaaacacccagtcactgtgaccatgtcctaagcaggagacataaagacctcaattaaatttagagtattacaaattcacatgcacattggccctaggcagtgctccatctccctgcatgtctgcatcctaccccgatctcctcaaggggaggggtcctctaatctcagccccatttgcagtgttgtttgaaccgttgagctttctttctttcctttccctattgtctaccccctccaaagtccccctccccttaagggaaaaccacgtgaggcacgctagaagtatagacttgacttcaacctcaccaggtgcccctgctgaccactgtgtgtgtgagagagagagggggaggggagctggggtgggggtcagtttctgttccacaatcactactgtttaaatgaaaagcagatgggctgtctctaagtctgagttccctttctcaaaagtgtgtccatttcccatagttgaagttcacaataggggaaggggcataggtgggatagggaaggaggacgggaaaggggagttcaaggaattgggcaaagagaagcagagagatttgaaactggagctattttcagctgaacgtgaatgtagattccttgaggcttcacggctatggggaaacagactgtgcgaccttcctgtaacttcctgtgaatcagctgtggtgaccgaattctctgacactgtcagagtctggacaaccctgccagctcctggaagggcagcccaacaactgtcacaggcaaagcatcagaagcatgagctgtcgatagtgacctgcagtcaaggaaatctgagggcttcctaattaacagaggagctctaaatgagagtaacgtgctccacaaacctcctcacactcggtaagtgtcacggtgcagataatcattacatctaacaagtgtctggtttcagcagaagcgatgggacccacttacttggcctaccatgaggctgttacaagaggggaaagcaatcaagaatcaagggagagaagaaaggannnnnnnnnnnnnnnnnnnncggtagtgaacggaagcggcgaggggaaaacgccaaactgcaacggaacaagaagcggcggaaaaactaaacgaatgaaagacgacgaacccggcaaacggaacgacggacgaacaagaaaacggcacgcaaagggcgaagaggaacgggggaaacggcgggcaagcaaacgacacgagcacgcgggcaacgcggaaaacggcaccgaaacacccgcggagacaagacgatcccgccggggaaaaagagaacgacacaacgggagcgggaggcaccgaaacggggatgcaaaaagcggcaaaaacgcgtgcgctatcgaggacgaggtacgcgcgttctaaagatcaacggacgtagaggcggcaaatcgttcgcccaaagaacaccggggcggactacaggataagggaaaaagagaaaaaacgaaacacgcaacagggaggaacgaacgacactgaggaatagggtccgaacagccctcgaatcgtaacacaataagaaaaacaagaagagctgacatgggaagcggagagatgaaacaccaccccctggtcgagagctcggcgcgcgcggcacgacccccccccccgccccagacggtgggggtgtgggcacacacacacacacacacacacacacacacacacacacacgctaaccctatccttcatccagatactgtaatctataatctgctaacacaccagctcattcattttgatgtttcctggagatgagtatcctttgagttatttctgaccgtagcagtattcaatggggtctaagctgtcaaactcagtgtgtcttcttgagtactgcaatcataatgactgatggagacaacgattagattgggttttgccttagatggagaaatggattgaagctgagggaaggaaccctgttgctgcagtgggagtttacctgagatgagtgaagtcttgctggacctcagacagagagcttcaggctttctcttcagagagggggaatttgagttttggtctaagtcattgatttctatacttttcaaaggcctgcatgattatttgggtatctttacctggttctctcctgtggagaccatttttccaccctgtgatagataatagagggccaagggatggctcgagagccactagtggagctgagggagagcaagcttgaggagcaggggtccttctgctcacatcactttgcctcactcttcctctctactcacgcaatgattcatgggaaatagcccaaatcatgctgctcgattcttctcaaacatctcacagaacagacatgcaggttttcttgcagtttgtttatcagtaaatcagactttcagcatttatcagcaaaagttagatttcagcatcgctcttgcaaggtttgaaagaagatttgtttggtggtggtggtggtggtggtggtggtggtggtggtggggagtctgccaatcagctagcctccagcttgactctgccatcaattaatgctgaaattatttgtctagttggatatttaaaatgtcatcagaaagagatgattacatattccagaaaacaaggcactgtataatcagatgaactgattccagttaaatgtagtgtgggaccaacctgtccttcaaagcagaatttctgagctaccacagtagtagccgccttccgccctgctcgggaacctgagctggagttcgttgcagcatgctggggtcgggcgatactcaattatggggaatttttccagatcccaaaatggaattgctccttcagagacacgagaagtacggtttggttatcttgttcaattcatctgcaaatctataaataagcagtccctctattcttcctgcttcctgtggatttaaatgccaaatcctgatttgtggcaaacttgtcacatgccccttccccactctctgtgcctggtgcccaggcactaagcagtggtgtggaaattacaactgtgtggaagccaagaaaaagctctgtttctcacttttctccagttccggatattctcggccctgctccaccgctcagcctcctccccacacctcctcccactgctcctcagcctcctccccacacacctcctccactcactgtgcaccctccttctgtccgctccatgaacaggaaactgaaaaacagatccaatttttataatggaggaagagaaaccacaatctgaacaaacaaccaagcaaactccaaccgaactcccccagaaagagtggccttaaaaccgtactgtgcgcacagacatccacttctgctggctcggccctcctagagcatgccaagcgccccacacccgcatgtcaaatctgaaggtgagggcggtgtttcagtcggtgatcggcagcatacccttgtccttaggcactgaggttaggactcaccacgggtagcaggcacagtgcctgaatgtcagtggttggccgttggacaagcactctgacccttgaggctttccatagctcactttccaaatggcagatggcgctctgctcattctaagacactatgttggtctgtcagcccccttgccacatgaagaaaatgtcttttagaaaattcatttgaggacagaaagatgcctttggaaacacttgaaccaataggttatatgttctggagggtatgggtaagaaaattcgtggttgggtggaacaccagagacactcaaaaagtcccaaggcatcagagtgcaaagagcccctcccctcctcttcccttgcagcagaggctggctgtagagctggttcactgccccttaacctctctcctctgttaccagctatgctcaaagcatctcctgaatcagcttatggcctgcatggcctcaggtgtagctcagggtgaccaaggtcctgctattcctgccttcctagtgcagacatttctttggccttaaaagcatgttctcgagagacagaggcaggtggattcctgagttcgaggacagccagggtctacacagagaaaccctgtttcaaaaaacacaaacaaacaaacaaacaaacaaacaaacaaaaaaacccacatgttctcatgctccagctgggtgtgttgtgttgtgttgtgttgtgttgtgttgtgttgtgtggaggctgctctggagctccagtggagggccctgttaggtcccaggagatacaagccatggcctgtgaaggttttcatttttcttggggacctacacccatttaaaattttatgaaacatgctgctttattttccggcctccccgagcagagatgtattgctggacataacatggtgaaaagctgccctccctgcgggaggctctcccttagcctgctctgcagactcagcatcccattttgtggtccttgagggtcatttgactgggaagtcctgaccatcctggggcctctcttgctctcttccgcagaccgtgatctggggaatctgggtaacagatgtgggctgctgcaggtgttgcatctctgccctagggccacagctagctgagtgtgccttccacggccagtttgctaggatgatttcaagccctctttgtggagaaaaaccactgtgttcccagtagtagtatttatcatggttctacctttgagggggacagaaagattggggttcaggtgacggtgagaatagagaagcaaggtagaagattgcctttaaaatttgaaaaggggagaggaaagcatcccaggttagtaattggggcgaacttatcaaagactgaggaaattcgacaatcattgcagctcttcttactgtgcaactacacagcatttacaaagtgaattattaacctgattgtccataacaatcattgagtaaagctacaattacagatcaccaaaatagcacagtgaaccgatgggctggtaggcactttccagtcaccttctggttcaagggtgactcaggctccttggctagtgaatgatttactcgggagatgtgggtgccttggggaagggaaggcttcctctctggtcactgtcagctctctgatggattcttccagcaactcagtgacagtacttctccaatagggagacacattcttcctgtgccagactcctgagaacttaagcactctccttggcctgggcaacatggtatctggccttcagagctggacaacatagttttggttcttacaaggatggaccatcagttggtgaaccaatggaaggcacatgctgatgacaaggacctaagtgctatagaggacaggcaaatactctgtgacccctgcattgtctaacctgtgggcctcataccttcagccctctggactttgtgacactcctcttggtacagagagggccatcacctcagtggggcctcttcctggggaagtccacagcttgctccacactggaagaaccattaaagtcagccaagagccgcaggccataaatgcaagatgtgatttaacaaaagcagcttttgagtgggaaaagctgagtgcagttgtcccaacctgtcaacttcagagctctttcctcctctccataaatcaaaaaacggttggtggaaggaagggatagaagcgtttcattttcggattttgtaagaaaataaaatcaaatcaaaagagcctgtcccacgctggtaccttgcatgccaggtttcagcctgaggcaaatttttgtggccatgtaataagcctttttaaaatggtgacagacccttgactctttggcttgaattatattgataaaagacatttgattgcgttagagctggggcaggagcacaggacgcttcttgcccggtcggcctctttgaaacagtgtcagcctgctgtccacccgatgtatcacctgacaaggtttgagtgccatggcggcagagatctgtggctctgtgacagggggctttctccttggcagttgaaggttgaggaactgaggagaagggatttcagcctgaggggcttgttaagggagagtgcagtgtttgacattcacagcagagttgaggggtcttgacactggggcctcgaggttgggatggcatggaaccagagcatttctggagaacctctccccaagcagtctcagagttttaaaataaatattggcctgtgcgatctcacaagcttatagtgctatggccaacagattctttattccacactccagttcccaagtagatgtttctagggcgtagaaatagagtagatgaatgtctagtcttagtgtgagggctttgaaggtattgggtattgtaggtacccctccctctacatcagcagaatcagtaagcctcagaagagccaacagagccctacctctgaggtgactggcctgtaccggtccaattctcccttttgcccagggactgctttttggattggtcagttgtagaagagaaggatttgaagttgaattaaaaagtgaggaaaataaccaagaagttaagaaaacaggcctattgttctatgagagaggttaagactgcccctgtgccttgactgtgccaaagtgctgagggattgaggcagcacggtggctgctgcctgtccagagcagaggcctgctctcaaagaatgagctgtcacgggagaaggccccgcctcacagtagaacctcctagattgagccttgcctcaggcgaaagggcggcctagttctgatcccaaggaaatgtcagaacctgacctgctagaccgttttctttgcctttggagctttgactccttaaattagctctggtaatttctgagtggctctctgttaaccatggggcataagagattttaattctagagaatggccagttctggttcttggaacctcttgacaagaatatcacaggatattcaattcagtgctggacttttcccatttctcctgaagtgcaagccaagcaactgtctgcagtgtctgacagtgtcctgcagtttgctgtggtccatcttgaggtcttgaggtgaatggtgaggagtcatgtgctcagaaggtgaacagggctctgaggtccagccttgacggtactactcaaacagctggatactcctgagtgtataaagcacacaggggccaggacacacactttcctgaaagggaccagctttgaagcctggtattctgaccctgtgcaggatgcctgcctgattcttcttgagggtctgccattctttaaaccccacctcctttaaagagttgttcagctcagtcctggagtgtaccctagaaatttccccagccagctgggttgtgttgactgggcccttaacatgtatggtccatggtctctcccgtgttacccttgaaaaagcaagtttgttcttttagcttattctgcattttcacaaggctcattaaatggctacacagaggtatacaaacatttgtttgagttgacacagataaagaggctagggtgggtctcttcagaggagttgggaagttgtgcggcttgctggctttgatagacgaaccctcctctgccttggcaggtattatcagaactaaatggcttctaaacaaatgactattttcctggatctcacagcccagatacatactttcttttcagctcagctgaaaatggctatccacctcttctggcatctaatacttaactgggggtgtggctctaaaggcttccaggtgaccaagacaacagtttcctaccctcctattcatgttttgggggtaggatatctatgagcatatttctttgaggctagaccaattgactacaagaaccatgctcggggccgcttcttaggtctgctcccatgggcactgacagcaattttgcccaacttccagaaggtccaacacacaaccaagattccatcacttttaactgataaagtaatttttctcattaagtaaagattgttaactttcccaaaggtttctcagcagggtttcttcactagcgtgctccccactgaatttaaagtgtttgtttatagatcattagctccttgacagaggggatgtttgcagggggaggtgcatatgtaaaaggtagaatgttagaagccctgtcaagttttggtgatcccagtagagtggggaaacttctctgaagttgcatctgttagctgatgtgattcagtttatacaaattggttttacattctggttttccatgctgattgagggcaggaactacagggcacctgggccttgccaccctgtcgaaggtggctggggaagagacagtgcacgcttcactgagcaatgttgcaggctctgcctgtagctcttgctcggccactgtcctggcatgagctacagggaccttttctcttgacatttcgcctgggtatgtgagaagtttcttcctggttttctgaccttccctctcattggctcaggactcacttctctggcttccctctttgtcctgcagagggtgaactttgcaaacctgtgcccacagaggttgaaaaccagggtcactttctctgccccacccccaaattagtcatgaagcccacagtgtcccgtaggaccccgcagccagctgccaccatggctgcaaggagtcttggacaggcgtgggaaggagagagcagtcactcagttgatccagtcttctttttaaagttgagaagacttagtgccagaaagaggatgggatttattcaaagtgagaaatggatgggatttattcaaagtgagaaatagctggggagttgcagagctaggactgaagcactaaggttcctggctttgttccagcaagagaagaatccacggacaggctgtggtaagactcggtgcattgactaaaggaatctttgttttttctaaagcctgaatcttatagctcagactggcctagaactcattatgtagcctaggctagcttcaaattccccatcctcctacatcagctttctgagggctaggattacaggggccacagtcttcacaaaccttgcagtgtcattgttagcatctttaaacgtcgttcccaagtcatctccatttccagaaacaagcaacctgggaaatgcattcaatagagtcacatctacaatcctccaataaagtcctccagtggtcatcaaagacccctgctttggctcccctccccatggattccaagagaagaaagggtaagtttggagggagaccatattgatgatggaagacacaaggaagtgtagggaaatctcatcatttttccaaggttgtttgttaaaaatggttcgactagtacaaggccatcttaaactggcaccgagacatctgaaatagattacttaagctggggaggcaatggcttcagagaagaacatggctgtcagcacttggcttgtctgcctcaggaataaagcagtcactttagcagaccacccactgctgttaggagaagagaacttcaggttggggtgggagtgaggcaaacaagacaggtgagctttctgggagtttgaaagcactccacatgggcctgtcccttattttaagaaaatgtggtatttcaaaggatggagctaaagatgtcacatttggatgaccaaacccactgctgtcgcctggatgaacggctgtgcagtattttagcttgagtcctttgctctaggtgccatgaagctgccttctgcagagccccaccatcttattcttgcttttctctggactttccaagtctatcttataagtcaacctcttgcccaaggcccctcttctttcttccaaagtgaaaaacacccaggaatctcagttcagtagcttctgtatccaaagattcttccattgtcagattaaaagtgctcttaaaaactgcatctatcctgaacatgtactgatttttcttgccattattccccaagcagtacagctcttttcttaatcattggcaacattttaagagatgatttaagaatatggaagaatgtccaaactatgtacaaatattatgctactgtataggaaggatttgagcagctgcaaatttgggaccctgatgcctgtggatgctgatatgccacaagaacttttctccctttgggtttcacagtctgtgcctttcatggtttctatgctgagagtggggcagcttgtgctcacgctttatcttctgcgctgtatgcaggctttgcaggacacactgagttttctttgtatgcccacagaagccagaccatagctttgggcattgtgggcatttggtaaatatgtaagaatgaatgaagggaacatattctgaaacacacatttctgcatagggagggacatggttaaacaatcaaaaaaaaatcattgtaagacaatttgtctctttattcagctgcccttacagtctcctcaaaaagccccactattctaaggcaaaagcataaagtgtaataaaatttatctatttcacgatcaagtgaaaatactttgggcccagagccaaagaatattattggagtgaacttttttcaacaccctaaatttaaccagctggaattctttttttaagaaccatcctattcaaccttttgaaatgaaagatttgccttttagtgggaaatctgcatttcaacacagagatggaacacaatgtttctctggttagttattcttcagaaaagcaagttcttcctttttttttttttttgaattatatgctttgcttatgttaaagacacagattgcaaaaaaattttgtttaggcctgacagattggtagcttgcatttttatagataagggggcatggaagatggcatcttgtccttccttgttgagaggaggcctagcacgagacccctgaaaaggggacattagcagcctgcttggataatcacaggtctgaaagaggagaattgggcatagaaataaaaagtagacacttaaaggagtggtgcaatcaagccactgtgtagcatcaaatactgtaacaacaaccaagcttcaaagagcgacatcccagagggtggcatgcaggttgtgttctcgcttctgcatttgcaggacggattttaagagactcaccggatgtggtggtgcaataattcaatcctagcattcaggatgcagagacaggccaatttctatgaggcagagggcagtctggtctacgtcgcaagttccaggccagctagggctacatagtgagacgctgcctcaaaaacaaaaataagaatgaacaaaacaaagatcactttgacttagtaagacctcagccagtggggaaaaagaaacagagggtaaaacacccattccagagccaaaagcagcagaccttggcaatatcagaatgttaattaggagttcttcatgcagtgacatagctgccatgtgttcaagccaagtgaacacagctcaggacatggtctgatctgttctagcatgcactggtaagtcagaggccttgggaggaaatggtagccagtgtaaaatgcaggtcaggagctagaagtagctgaccatgaagcatatttaagggctgggtgtgattttcagttagataaagaaggttctagactagactactttttaggagaagggaagactggaggattgtggagctgaagggactgttctgtgttctggccattacctctcacagcggtttgtcatgcattctcttatggaggatgtaagaagagagagggcatagctctccaagcttctcacttggaggcacagtcagctacatgtgcacggttaaaaggaagatacccacacacattttagagaacagcagacttcatgtattctggaaagaggaatgggatttttattttaatattacttgagggggcttgctgggcgggggcgggggggggcaaacccagggctttatacatccagactagacaagtgctgcagcactgagtcacaccctcaggccgatgttcggatcctgaagcactgatgaagtgtgttggaaatggtgctcaggcttagctgttcccacgtgctgttgctcggtgattgatgagcagacagccatgtggctggacttagctgttcccacgtgctgttgctcggtgaggagcagacagccatgcggctggctgtattacatgcccactgcttagctgcagaagcaagcagcatggtagcagtcaagaaatccttgagatgttcttaatttaataattttcaatttgagaggatttcgctgaggatcaccttgtgaaaagttaatatccagtgactatagaaatgcaaagtgaccaatatataacaatatacaacattcagtcagaatcactcccaattgttgctttttagtaaggcctggaaaacaaatcattatttttttattcagtcataggaaaacttcacaatctaacactatgtaagccatctctgagaagccacaagggtcttaaagggacctttttgaagaggcagtttgaaaagacttctactcaaggagcaggaagcatttaggaactttcagaaaaagttgatacaccacacaagagagtctggaaagaggaaggcaagtccagtcttacttgtatccatgtggcaggtcaccaccgttgccgtaggaagcacttgaaaactcctgtctgcctgacggatgataactagaatgttgtctcatgcaggcttcttacttggtgaggaacctggaccaattaggtgagtgatagatggacacaggatagactagaactttgaactccacggaaggacttttaggaattcccctgagtttgtctcttaatcctaaaagagtagggtcacggaagggacaatctcatggtccgtgggtctctctgcttatgactgtcaaagcttctggtttcctacctactctgtattttgagttaagttgtattagactgacggctgcttaatgtagacagtcctccaccctgtgcagcttctgatctggtgactctgaggtcagtccaaagaatctgcatttccaacaagctccctgatgaagctggtactggatctgggtctgcaaagaaacaaagcaagacttaatacatcatcatttcccagacagctaaggagcccacttctccctggggagaggaggctggaaaggaggagtcctcagccagctcagcgctcctgctcttccagggaaggcagaccggctcctgagttgatgctcagaagcattaattgtgacactttactttgcctaagctgtgatgaaacaactcaaggcatcatagcaagaagttaaaccctagggaggctattaacaatttagcatttccagttcgtgtggaatgtcgattatccttgctagggagaacattaaagggtggttttagtgtaagaagtagcagagccacttgaccctcttcctggagaggacatttaggctgtccccagccccctgtctctgtcatgatgaccatgaccctgtgctgttttctaaaaacagttactgactgggggcactactttgttccccctgaactggtttgtctgcaaaggaagcagaggtagaggatgtgatagcagggtggctggtcacaggctcttgctgccgagcaggtactgtgttccggttcaggacactggggctcagtgtccttaggccttctgaatgtcttgccacaatgctaggctgacccacaccagtagaggttggcaattctgctcagtgagttagaagaacgaggacttgcttttcttttggaaaattagtattttgtaactttggtacgggttggggggggggaggagggctgcacatgtgtcatgacatatggagatctgagaacaacttgtgggagtcagttctgagactgaattcaggttctcaggcttggcaacaagcacatttatacgcactgggctatctctctggcccaagagaaccttctttatgggcacttcccagcaagtgaagaccacagcagagggaacagagaagggggaacacacattgaaatctgggaactaaatcaggtcttaactgtgttatgactatgcacacgaccacgggcaagacctttactgtcaagctcctagtctcctatctgtaaaataaagacacagatgggtgtgagcaccgaggtttcatacaacgccaagaacaaaactccaaagaaactcttgagtgtggatactcgcatgctttggtcactgagacctcactggtccttgctgctctgaaattaccttgtttcttgctaacaggttagcaggcatctagcagcgcacgtgtaccatcaagctggaatttgtctaacagctctctcatttcttgttggaggtactggagtaaggtctctccccaacgtggcagggagtttgaatttggactctccccatgcaggggttcaaggaccttgttgcttttgtgctggggtcacggaaatacctcaggtgtgtggttttctgagaaaagaatttcatgctctgccacagagaagctgagacaagaacaggtgcaagagtggattctcaggtttctccttgggagcttcaagaacttagctggcagctgattttttttttaaacctcactcccaatttagcacaaacaacaaaagggacacatatttgtttcttgaaccaagtctcccacagttacaggttcctttttgtggttttatttgggctttggtctgagaggagacagtgtcttcatagatggtctaaggcagaggttttcaaccttctgaatgctgtgactctttatttattacagttcctcacgttatggtgactctaaccataaattattttcatcgttacatcataactgtaattttgctactaatatgaatcgcagtgtaagtatctgataatgaaggatatctgatatgtgacctatgaaagagtaattcaacctcccaccccaggggtctcggcctacaggttgagaaccacttggtcctaggcttggtacacctccatctcagcacagcgatagcaggtttcttcttcaggctgttgttatccgtcaggttcctcatcaaagggagtctggtcctgcagtcctgactctcacttggtaacatgtgtataatgagatcacaatgcatttcttaaacttttccacttgtgactgcttttcaccaaagttttcaaacgactctcagtatgcacttgcataaaacaaataaacaaatcaaatttacttaagatacattataaagaaatgtatttttaagcaattatttgttatgtatataatcttaacatttactaacgactaaagcaaatttgcatactaataagatggatggggtgtatttatttttacataaataatgaactcttggcttagtatttggtactataaaatggagagcatctcagagtttttcagagttcattgatattttgattttataatcactaatattaagaaccaacttcttataaatatgtagttcaaagtggcagaagtgtatttatgactgtttcaggagatgctggaaattctgtactaatttaaagactaattctaagtagtttgttttttcttctgaaactcaaaagttagtgattcaagtaatattttaaaataaaatattctatgtatcaccatataatccaaagacaaactaatttgccatactgaaatggcagtgggaaagtgtgaggtctttgttttctgtgactaagccattccatttccataagaggagacgactctgtgtgcagcaaaaaaacgctgcagctaagagcatacaacactgtggagcctgggtcagcaaggcagtgctcctggtgcttcgaggcctgaatggccatgcacggtgtgacatgcacatgctgtgttttggaaccaagactgcagcaacacgaaacactgggcaacttccagctacttctgagacagccttcgacattcttctgccactctgaactaagcatttatgagaagtgggttctcagtgttttgagcccatgtagggctgtgacccacagtggaggaaactctcctacacctgctcactggcaacgcttcccagtgctgttactattatttgccatgctcattcaccatcaaactcagcttctctgaccttcacgtctccctccaccacagggtcatactctccaggggcagttagctggggtgtattgggggacatgaatactgagcccaggattcccagggctaaaggtgcttatatggctctgtgatgcatcctcggtgagaactcgccttgcctcagggcatgcagtggggtgcagagcagaggcctcagggcatgcagtgggatgcagagcagaggcctcagggcatgcagtgggatgcagagcataggcctcaggtttgatgctgctgctggatactggtttttgttttttttgttttttgttttttgccttgtcactttgtcacattatccttcatctgaagggatgtaagggttttgtccaaagtcatttaaatactaaaagtctaaccttcatgctcattgctttgtattgtggagaggcgtacctccatggggtaggcactgacaggactctagagtgcggtcctgagtcctagatacctgcagtctgaggaagctaaagagtgctattccctgaaagagagagtgggtcgcaagccttctcatttcctattagccgattaaacaatcggctttgcatggggtttgtctaaagttggtggatgcatgtaagccagccttgcagataaattctcttttcccctggtctatccatgttattaccaaccttctccttgctatttatatagatcttgtaacaatcaactaacaacaaataagcgaagggacgtgagaaacagcccctgcctcatacttcaaaccaaccccttccttgtccaaaaaggccaaaattaaagacaaaccgaagctggtgggaaacagctctccactggggttcgtttggggccctgggcctggtactatctgcaaggctgctgtaatgatgttaatctattttaatggaagggaaatgtgatatcctgtggtttacgatgctcattgtttatggcggtggtgcttgactctgggtttctttcacagataaacttctgcactggaggggcctgtcctctcctcggtctgcacacggagctctaatccccacgcccgggatgagtgcagaatatgccccgcagggtatttgtaagttgaacattatctcttctacaaatgtccatgtgtatggagatgagagtttctagaaattagccttattgtttaagcactgaagggggtttcttctaatacagactggcacctgctatgtattactctattaatcacttggtaccagccctcaccctacctgtagtagagagagagagagagagagactttccctccccttacctggcaccatggctggtggctagactatctttgtgttcacagccaatcttactgctgtacactctctcctactgcctcgtagatgctttgacttgattttttggtatgcatccttcggagaggccagaatcacaggcaatttacagttagtccggaggtattataatgcatgttacttaggcattcacatgtgtatctgaacatagtatatttacagatacacgtggtatattatgtgtacatatatacatacatacagatgcacagcacatagaatttctttttctccttattttagagggagatatgcagagatgtaggtaaaatgtgaagagcccactgtcgccttctcacacacatgcctctaacttttatagcagggatctctttatgaaattcagatttatttatttataaacatgttttctgaaagatgtcttagaaaccaagttggctttcttctctgtgtaaaagtgtgtggtatgagtcacacatggccaaagtatttgaaggaggagttcatccccccccccccccccacacacacacaggctcaggagaaaagggatgcataatatggcagctaatgtttattttcaagaaatcagaaaagagcagagcaaggtgtggggcacaattgctgaggctatgaatacctcctctcaatagccggtcactaccctcagccatcttgcgaatggtgtctgcaagggaagccatgcaccttgaaagcagtttcaaagcctcctaggtaatcccaggtgacagagacattttataggatttcacaagcctctgggtccccagggctgagggtaggggtgtgggcgcctcatcttctcccccattcccagctgggcctgggcctggcttaggtcacagaacacagaaagtttaggtgttggctttgagtccctgcatggtagctaagtggggagcagttttcctttgctaggggtgtctagggtctgcacttgactgagaagggagactgagggggtcagtggagggcagagttgagaagccaaggacagcttagtgctctgaggcctgggagctctggatgatggttagaaaggcctaatgtggatggaggtcctacctcctccacaatacttgaatagtgcatactgaccagtacaagagtaattagaagaaggcatgtggcattgggctgtgggctccacacagccctatgacaaagctagtgcccattctcattagctacatggaccagccatccttggcattcagagcccttgacgttgtggcctccttggctatgaaagtgtaactgacataatccccgacttgcctctgttgccaaagcctgcattgaggctgccatggacattcctttccaaaccatgctgggagtataatctggttaggtacacacacacacacacacacacacacacacacacacacaccctgaatgcacacatacacttctttaaaggtcctgtttttaatgttgtttcacatgtaggaatcccaaggcccagggacatttcggttgggcaccaagtcacaagctaggaagtgacattcaggggccttatcatagacctcttttgttctttcaaattgtgaggcctcagccacatgactttctcatattgatgacacatttagaaatggagggcatttcttctcataaaatgaaataaaatacaagacagtaagtaggttggctaacagctgggtttaaccctttcagtgccttgagttcttgtactggggaggggcagggctcagtttattgctttaaatcaaaacaatcctggtaaatgcccaatgaagctctcaaagtgagaagttgattttcatcagagtaaatgaagaatattattatattttacacatcaataaatcaatgtagccctaattttgccacgcaggaaatcaattctggtctttctaaaccatcaaagatgttatgaacaaagtaatttcacaaattgcagcgagtaacacatttattgatgactgcagtttaggaatttagaatctgtgagcaccgtaatacagtgtggtgcgccagcatgagcagagagaaatgcagatttcgtggtgaaatggcaatgcatcgcttgctattagtggactggtaataattaccagcttctgagcggctctttccgtgtaatcttcagtcattgacatcgtgattacagtaggtgcccttgtgatctagaatatctagttgatgggaacatgggaaggcgatagcgaaggctgtgtgtgtgtgctcattataagttcaaaagctgtttcctctggctccacgtgtgaggggaaagacagcgccgtagtgttaaccttctgtagcacaaccacacaactggctctggaaaagaaatttttagaaagcaaaataaaatggaccttcgttaagcctcatgggaagctaacagatgagactctccatgtgcttagagtgcccagagtttggctcgtatcaggggctccatcttggcacatttgagaccgtcattgctaattacagcccattcccgggctttaagagattataagggtcaaaaatgattttaaggcatttggagtgatgaaagtattaagggtttgcttcagctgagtgaaactccttcgttacagccctctgattgttaggctaaatacacgagcaggatccagagtcctagggaggcaaagaggaacgctatggaggatcacagtcgttggaaccagatttttttcctgaccatttagagcccaagtcattgttcaacaacaacaaaaaaatatgaaaatactctcattgaagctttttatttctctttgaagaaaagaggcagataatgtgattctaatgtcagcattttctttcaaaatctctgcctttcttcctccctccacattagacaaatgtttgaaacccaattttggtatcttaccatctaatcttgttaaggagatttccccaggagtgggctatattgagtgagattataaatgcattgtaaagtaaattacaaggtcagggcaggagtccattatttagacaagcgcttgagcgaggctggcttgctttggaatatgaatgtttggggctcctgagaagaccttggcagcttttctttctgacttgctaaatggaggaatcatataattgatgaattccttgtgcccactccttagctccctggtgaattttgttccattgaaaaagttacttaggaatgctagctatgggttaagggactgttctagcctcacataggggagaaagtgtatttctcagttatactttaagccctggcatttttttaaagtgtctgggacattagctagactcatccttgtccctaggccattgtctcttctacatccttaaatgttgcagttggctggtaaactgttggttactccataaaccccatatatgtgtgtgttgggttccttaacatacatatatatagctacgtacatatatgggaatatatatttaaatttagctatcagaaaaaaaatgaatgaattttgtgaagtcaagccggccacctctttgccaaagtggcatttaccactcttgggttcttttcagtaagagagaaacaatgtgacttgagcagggcccctctccagacagcttggccactggccaaagagttgactagctgaactgtatctttctgtttctttctcaactggagcctagtctcagccgagggcgcaggatgttgtataatttggttcacgttgttagcctctcaaaataatgaggctgcggctagggtagcattgctcagcctgccgcctgtcatggtgctggctgccgccactgctcctacaaccagcatgctgggtctgctgaagttggcaccagccactcctaacttctctactctctcttttgttgaactggggagaatgcctaaggattcaatacagcttttcagttaaatcagaattacatttttcttttgagattttaatcacaacacccccttgagattaaacatggaattataggatgttaaggaacccaagacagaccaacaattagtgtgtttccagttgaaccatgtagggtcagagaattatattgatttttgaccttctttttgatatctctatgcagtaatattgccttgttagaaagttaagctctcctgcgacccacaggaaaatggactaggaccagaggagtcagggtgcaaacgttttcctgcgagacatcaaactgactctggctttggccttgtctcagtaccccatttaaccaatgagacagtggcacagagctgaaatgacttgctgagacccctagaatggagtgttccttttaactgagcctggaccagttaggactttgtgctatggggcttgaatatggaactcttggaactgagtaaaatgtcaccaagactactaatttgacaaatatttattgggctccagacatggaaaacagcacgtaggcaccagggtaggtgggtgaaggctgaggcttacgagatggggccaggagaggctggttgttggaacatgaataagcaattgctgatgcctgcctcaatgattaagcattgatgttggtgttgtattgttttgcaggtaaagatgagcccagcagctacacatgtacaacttgcaaacagccattcaccagtgcatggtttctcttgcaacacgcacagaacactcatggattaagaatctacttagaaagtgaacacggaagtcccctgaccccgcgggttggtatcccttcaggactaggtgcagaatgtccttcccagccacctctccatgggattcatattgcagacaataacccctttaacctgctaagaataccaggatcagtatcgagagaggcttccggcctggcagaagggcgctttccacccactccccccctgtttagtccaccaccgagacatcacttggacccccaccgcatagagcgcctgggggcggaagagatggccctggccacccatcacccgagtgcctttgacagggtgctgcggttgaatccaatggctatggagcctcccgccatggatttctctaggagacttagagagctggcagggaacacgtctagtccaccgctgtccccaggccggcccagtcctatgcaaaggttactgcaaccattccagccaggtagcaagccacccttcctggcgacgccccccctccctcctctgcaatccgcccctcctccctcccaacccccggtcaagtccaagtcatgcgagttctgcggcaagacgttcaaatttcagagcaacttggtggttcaccgacgcagccatactggtgagaagccctataagtgcaacctgtgcgaccacgcgtgcacacaggccagcaagctgaagcgtcacatgaagacacacatgcacaaatcgtcccccatgacagtcaagtccgacgatggcctctccacagccagctccccggaacctggtaccagcgacctggtgggcagcgccagcagtgcgctcaagtcagtggtggccaagttcaagagtgagaacgaccccaacttgatcccagagaacggggatgaggaggaagaggaggacgacgaggaagaagaagaagaggaggaagaggaggaggaggagctgacggagagcgagagggtggactacggcttcgggctgagcctggaggctgcacgccaccatgagaacagctctcggggcgcagtggtgggcgtgggcgacgagggccgcgccctgcccgatgtcatgcagggcatggtgctcagctccatgcagcacttcagcgaggccttccaccaggtcctgggcgaaaagcataagcgtagccacctggccgaggccgagggccatagggacacttgtgatgaagactcggtggccggtgagtcagaccgcatagacgatggcactgttaatggtcgtggctgctcccccggcgaatcggcttcggggggtctgtccaaaaagctgctgctgggtagccccagctcgctgagccccttctccaagcgcatcaagctggagaaggagtttgacctgcccccggccgcgatgcctaacacggagaacgtgtattcgcagtggctcgctggctatgcggcctccaggcagctcaaagatcccttccttactttcggagactccagacaatcgccttttgcctcctcatcagagcactcctcggagaacgggagcttgcgcttctccacaccgcccggggagctggacggagggatctcagggcgcagcggcacaggaagtggagggagcacgccccatattagtggtccgggcccgggcaggcccagctcaaaagagggcagacgcagcgacacttgtgagtactgtgggaaagtcttcaagaactgtagcaatctcactgtccacaggagaagccacacgggcgaaaggccttataaatgcgagctgtgcaactatgcctgtgcccagagtagcaagctcaccaggcacatgaaaacgcatggccaggtggggaaggacgtttacaaatgtgaaatttgtaagatgccttttagcgtgtacagtaccctggagaaacacatgaaaaaatggcacagtgatcgagtgttgaataatgatataaaaactgaatagaggtatattaataccctccctcactcccacttgatgccccccttccaccccttccccattgtccttccagccctactccctgtaggatttttctagtcccatgtgatcaaacaaacaaacaaacaaacaacagaggtaatggaagctaagaatatgaatgagtgcttgtcaccagcacacctggttttttgttttgtttttccttttttttttctttttcttcttcttttttttaaattttaaattctttatgttctcaccgtttgaatgcatgtttggggcaatactattgcattttacgcaaactttgagcctttctcttgtgcaataatttacatgttgtgtatgtttttccccccttaacttagacagcatgtatggtatgttacggctattttaaattgtccctaattcattatgagcaaacatgttgttgctgtttccagttccattctgagagtgtgagggagggagggtagaaaacaacgcatgctgcatacataattctgtaatacagatcatgtgcagctttattttataacacgaggagggaaacggtgtctgggttgactaaccctctgcagacagagcagatagcagtgaaaaaaaggtgctaaatgtctgtctctaaagggttacatgtattaattggagagggaaaaaaggccttgaattgacaaattaacagaagaacaagtttattctatcatttggcttttaaaatgagtgccttggatctattcaaaccatgttgatggttttttttctgcttgttataaacttgtagtttaatctagcattgggtgaggtaataaactttaggacctagcatgtaattctgtgttgtatttctcacaacaatggctacctaaaaatatgacccattatgtcctagttaatcattgatttttgcctttaactttgtgaacaaaactgattataccagtataaaagctactttgctccttgtgagagcataaaagaaatgggctgtttcgcctaaagttttattttattttatttttaaatggttatcaaattgaatgtgaaatgtgcaaaggccctggaatgtgatgaaatacattagcaagaagttcatcttgtgacaatacttgtttaaaatgatgcatttaatgaaattctggcgccaaaagaagtagatccggctctagttggttgttgagtggacaataaaatgataaagccctttagaggacatttgaaagaacaggctgatatgatgagagagagagagagagacagaaaacggtagtgattggttagcacgatgtagtactgtttgccatttgaaactagaacaggtgtataaggggccagcgatacaatgatgattaactctgaagctctaagacttgcatttaatgtgacagtcttcaaaaagaagaggaagacctttaagagcagcagtatctatgtctgtgctccctggaagttgtacttcatttcttttccatacactgtgtgctatttgtgttaacattgaagaggatttgtttttattttgttttattctttctttctttcttttttcttccttctttgttttaagctagcatctgccccagttggtgttcaaatagcacttgactctgcctatgatacctgtatcttttctctaatcagagatacagaggttgagtataaaataaacctgctcagataggacaattaagtgcactgtacagttttcccagtttacaggtctttattaagggaaacgttgcaagaatgctgaaaacaattgaacacaatctcaatgatgagcattaaaaaataataaaaaaaaacaagcaaacctaaaaaaaactaagacagacgttgccagccattgacttgactattgagcttcctcacttggatgcaacattgcaagcgctgtggatggaaacaacacacttaacatagaaacgaatgactcctttgcttctacagtgcaaggatttttgtacaaaacttttttaagtataaatgttaagaaaagaatttttaaaaagacacttcattatgtttaggggggaacagcattttagggttccattgtcttggtggtgttacaagacctgttatccatttaaaaatggtagtggaaattctatgccttggatcacacaccgctcttcaggttgtaaaaaaaaatgaaaacaaaacaaaacaaaaaaaaaacatacatggggaaaggtttaagattatatagtacttaaaaataggaaaacgcacactcatgttgattcctatgctaaaacacagttatggtcttctttctgtatttctagaatggtatttgaattaaatgttcatctagtgttaggcactatagtatttatattgaagcttgtatttttaactgttgcttgttcactcaaaaggtatcaatgtacctttttgttagtagaaaaaaaaagacaggctgccacagtatatttttttaatttggcaggataatatagtgcaaattatttgtatgctgagagagagagagagagagagagagagagagagagaggtgtgacattgtacagagaagccatataatggcggtttggggagcctgctagaatgtcacatggatggctgtcataggggttgtacatatccttttccccctttcctgctgccatgctgtacgcagcactgcaagctaatagcgttggtttgttatgtagtgtgctttggcccctcctccccgctcacccgacattccagcatcttaccttcatatgcagtaaaagaaagaaagaaaaaaaaaaaggaaaaaaaaaacaacaacaatgttttgcagtttttttcattgccaaaaactaaatggtgctttatatttagattggagagaatttcttatgcaaagcatattaaagagaaagcccgctttagtcaatacttttttgtaaatggcaatgcagaatattttgttattggccttttctattcctgtaatgaaagctgtttgtcgtaacttgaaattttatcttttactatgggagtcactatttattattgcttatatgccctgttcaaaacagaggcacttaatttgatcttttatttttctctgtttttattattattttttttaatttggatgaccaaaggtcattgcaacctggctttttactgtatttgtttctggtctttgttaagttctattggaaaaaccactgtctgtgtttttttggcagttgtctgcattaacctgttcatacacccattttgtccctttattgaaaaaaaataaaaaaattaaagtactatgtcagcttcttgtgtcctcatttgacacactctgtaaattactttcaacaaaataacaggttttgagagaaggccagttagtctttttcagggtcatttctatgggcattttgatgtgtgtattataccctaaaggagcataatatacttactgttattaaaatagacatacctcaagccatggaagtacaggtttagatcagttggaaggtaattcttgttcactgttcaaaacttctgctctgtccttagtgggatccactaggtacctgtgagcccaggagccgcccctcagttgtctcctttggattttctgctgtgcctgttgtgtctaaaagtcctttctgttcttccattatttccctattttagagtgtaatgtcaaaaaagggggatccttaaacgaatagctccctattctccataatgacctttcctcataataaaaatgacctttcccctcaaccctaaacatccagaaacaaaggcagcaagtatactaaatctgttaaataataataatgaaaaaaggggagaggaaaattctaggaagaacaaaacagaaaccagcagccaagggtgagccagatcgagctaggtcataggaggccactacggagcacctaagatgcaccgtggtttaccttgaggttctgaaatcctatggtctgtacatgctacagattgttttagatatatgtgtatatatatgcttgtatgagggtagatagataaccttcaattaattatcttttcatattttgcaatggcttgaaaggcaggttaggtctgttttaaaagttcactccttagaaatctatgttgttggttttccaactactgcgtgttgcagcttcagtttgctttattacacagcctgagcctctgtggtgctggctccctgtttccagcgtaggtgaatgcatccaaccgcattttttttttggtaaaaccccgaacaaaagctgttttgttgtcctcccgtggtagcgtttttcgttgcgtggttctttcccaatggtgactgtgaagtggcctctccgtgtaatgccttttatccaaagccaggagacttttatctttttaagcatcggcaaagtaaggtgtttggctcttacttttattttttaagtcatttttagtgagaaaggggacctcgctgatgggagttgggaagacttactgtacaggtggtgagatgggatgggatgagaatcaggcacctttgagaggttggtatttgtcagcgaactgaggaaagatacctgtgttttcagttggctaccaaactaattccaaaacaaatagaaatatttccctgtgccttgtcatctataggtgacaatggatgcctcaccagattaaatatccactcagcttctccgtgtccccatcgtgctttcgcgggagctcagagtgcagctgtgcagattttatacacagtacttattttaattcctcggtatacgatgctcttagtgtaattagattttgcatcctgacaggcagaattaatggtggatacgatatccttataagttgagatatcttaaatcaaattgggaacggagaggggcacaaatatctggtgataaatcacagattatgtttgatttacatggtaccaaagttaaataaatttgttgagagacagcttcttcaggctccatcgtcttccgacatcttgcaaccttctgataaaatattatttctgaagctcagcaagcaatgggggcctggagctcagcaagcaatgggggcatggaactttagaccccaagactaagacttccacgtgacatttcctagcctgaacccaaacccacttgtactaggaaggaatctaaaaacacaagtttcccactgtggcatgcattactgtcactgagatttctcagctaagtttctgtaaatcttggcataccagtagaatgtatgtgaacccctggtgcctagtatgctaaggatttttttaaaagccctgtatttgagaaaaaacttaataagcgggaatacagcaaatgctattattgcacattttaaccctaaatgctccagtgtgagtgggcccttcctgaaaccatgttctcccctcctggtaggctcttcaggaagtctgaatccaacacgttttaaaggttgctaagacatggggtgaacatgagacttctagtgtaccagctggagcaggaagtgtgaagtagttgatttctttcccctggggtgttctgtggataaaactgtttatttaaataccattttgtatatgcaataagtccacattgtatatattcataatggttgaagtgagaaatcagaaagaagtggtggcaggaagggaggactagataccatttcatctgcaaaaataaggagacaaagctgcttatccacagacattgggagcggggctgaaaggtaccaggattatttgggagtgtcctcaaaagaaacagaggaactcctgagcacctcgccccgagagttagttatataccctctccccgacacaagcatgactgctgatccctgtggccatcattatggaatggctactcccttgtccccgggcctagcaggttccagagtattttttttaattgtgaggatttttgctacaattagcagtgttctttcaacctacttggggaattatattttgagagaatgctaccattgaaagccacgatctctattcagtgtcttcctgagcatctcccaaggcttgcccagaactttttgttgttgttgttttgtttttaagaaacagacactagaatgcataggctgtatcccagggctgctaccccagcacactgtagacatggtccttcaccagtcacatttgctctcctgcaactcactatcctgttagcccactatcatttattatagcagggaatcagcctttggggaaggagtcctagttctctgtgttgtgggagcagcagatccctccctccctccctccctgcctccctacctccctctgtccctcctcccaggggaaagagggcaatgccattcacagggattctggctcttatgacaccagagtgagcactgccttctttttctgtctacacactgcctttctttgcctgctgtccaaccacagaatgaatggatgctgcaccacccttttctctgaagaggaccaaacccacccaattgtcgattggaactactggttctgacannnnnnnnnnnnnnnnnnnncccgctgaccgccctctctcccgaccccaccccgggaacccgcccagacccctcaccgacgcgtacacggcccgccgtgacccctccgccagccagcgagcccccgggcgccgggaacccctgaccaacccatccgcgcgcgggcgccggcccgcgggcccaccgccccaccgccacccgggggccggccggcgcgggcgcgccagcccgcaaacccgagccgcggcccccgcgcccgcgaaccgcgggcaccaaacagcccggcaccccgggcccgccggccccggacgggccggggcccgaccgagcgcgaacccccacccacgcgacccggggccgggcccaaccccgccccaaaggggagctgcatccctccctccctccctcccaaatgggaaaaggagccaatgcagttcacaagggtcattgtacttaagtaaccagacttgactgaacacaactctatgattgatccaaatactgtttttcctttctgtcacatggcaaaatctatgtaaggaggacacatgaatctactgcattgttcacagaaacaataaagggcaaattaaacaccatccccaacatttcttctaatgcagaagcccctggatacctagggggctgggtgtgtttttgaataacaaggaatatggtacacacttatgctgtactttgcctattaggtctttaagtataaatagtgggtcagacaaagaggtttggaaggacatacaaaaggcctcaggggcaagtgggttcctcacaatccacctggtcacagaaggcccctcagtccaggtctccactgctcagggtgggctatatgggaagacagctgagctccagaccccaggcctcctgcatcgtgaggtcaggggagaagaggccccaggtccctgaaatttcaggttaccatggcaacgagtcctgtactggcacagtagtagctgtcctccccagcacatctgtactctgaggtcactgcgtcaagtcaatgtccacagcaaaaggggatcctggaggaacattgccactcctgttccttcaccattatggttccccatgacacaaaaaagacaaataaaatccctgcatgtttgaaagaaactacaggcagtttgggtgcaatttgagggcaactcttgggttctggtttcctcttgagagactgttcacctctttcttgtaaatcgttggctgccttgacgttggtgacatttcatgtttttgttgagctgcttttacatcaattttgatttttgtttctttataattttattatcatttaaagaaaatgtctccctcccctcctccctctcccactatccttgaccaaaggactgttttgctactacgttttctcagttgtaaggaagagagtttcctttcaggtgtgtcttaagtttggtaggacttccacgtcttgggatagggagtctgggtccttggggtaacaaggtgggaggtgtgggaaagcaccttggcggtgggactatccagggaggggagagtacatttgagatcacggcagtggctcaacctgtggttgatttaagtcataattttaaaaagctagcacgagaccagaaagtcaccaggccaagtcacagtgtaccttttccttcctctgtctccaacctctttccaggtccttcacacacccccgttcggcgtagtaccccgcgagctcaagatgtgtggcagttttcggatggaagctcaagaacccttaagttctgagaaactttgaagcccccaagggcggggcggacatgcgccgcccagccgacgtcaacgtgctccgttatcctgctagattgtgatgttttctgacagtagcctccaagaagacaagagtcctgccgagtcctcccagcctgggcctgcagtgccattttatttatattttttaataaaacgtaaaaacaaaaaaaaccagacccacattggaacagtgaacccgtcccatccagagggccctaggactgccgcagttggagcgacgtccaacccttttgaaaccagccaacctaattacccgtactgtggaaatgagcatgacccctgaccccttgtttctatacattctatgttgtcttttaaaaagtgtgcttaacattgacataataaatgttggagctttaggcggtgtgtgcttgttttttaatttttaatgctcgtaagacaatgtggctgcttcaggctttatgtctgtgtactttttttccttcagaagctcatagggtgagcagaaggaccagactcaagtgccaggcaggagacctagaaaaggaagtaggcttttcagatggcatacattttcaaagaaaatcaaaatgcaaagctaggggataaatcatagtaatatcataattaatgtagtagtattgctgtttattaatgctgacgtgtgtttttcctctctgacttataatttgcataccattaaataatgcataaatatggcacactgaatcctttttcaaatacacgcttttggtgactaccatgtagggtctgaagttgtctataatgtagttcaagaaagataacactgctggataaatggtaaatgtcaggtgttgcttatgaaatattctgacattaggtaggattccaaatttctagcaaaaaagttttaatacagacaaatatgaaactctaatacatcagaaaatatgaggaagaccttaacaagggagatcattgctggagggaagaggtgcccaccaggacaattcattgccaacacggacgggtgcctcatatgtcagagatcagtaacggtagtcactctaaagataggtgcgaaattcagcaagaacttttctcagtttggtattttccactgtctacagatccagaagagaattaaaaacaatatggcatattaaaataagctcataaataatagatttcagacacctgtgcattgcagatttacatattgtctgtgaacctaagtggggaaaatcttacccattcaccctctggctagattacctaacctagtaaaaaagatagcaaaataatgggcagctggattccttcctgcttattcatcataaataatagtgctctagtttatactctgtgcggtactttcatgtgcattgttttatctgcttgtcgatgggagagatcccacagcttccagtgaggaggagaccagggctcagccagctaaagcttgctaagcctgtgttggtaagaggcttctaacccagagctaaagatacagctctgctgttcagttataaccaaaggccagcctctccctaagcacttctgctgttagtacacaggctgcacaggctcacacacatgtatgtccacacacagaaaacgggatggctattgatagatcaaagggttcctctcctcatttcctctgactcttcctcatcctctgtgactctttctttcctcatcctctctcttcttcctctccttatcccctctgtgactctccctcatccctctctgtgactctccctcatcccctctctgtgactctccctcatcccctctctgtgactctccctcatctcctctgtgactctttctctccttatcccctctgtgacacttcctcttcctctcccttatctcctctctgtgactctacctcttcctcatcccctctgtgactcttcctcatcccctctgtgactcttcctcatcttctctgtgactcttcctcttcctcatcttctctgtgactcttcctcttcctcatcctctctgtgactcttcctcatcctcatcctctctgtgactcttcctctcttcctcatcttctctgtgactcttcctcttcctcatcccctctgtgactcttcctcatcccctctgtgactcttcctcttcctcatcccctcggtgactcttccttttcctcatcctctctgtgactcttcctcatcccctctgtgactcttcctcatcccctctgtgactcttcctcttcctcatcccctctgtgactcttcctcatcccctctgtgactcttcctcttcctcatcctctctgtgactcttcctcttcctcatcctctctgtgactcttcctcttcctcatcccctctgtgactcttcctcatcccctctgtgactcttcctcttcctcatcccctctgtgactcttcctcttcctcatcccctctgtgactcttcctcttcctcatcccctctgtgactcttcctcttcctcatcccctctgtgactcttcctcttcctcatcttctctgtgactcttcctcatcccctctctgtgactcttcatgacaaataactctgatggcacacatttctttgatgagttttttttttttttgagtcttcctaggtcagaatagaactgccagacaagccattttcaagagaaactgtcatcctgtgccacacgctctttctgacttattaactctgagcccaccagggattcagtggcagcatctcctagatgtgctagctctttgttgatgcctggaaagagtggttcctcttccaccgggagacccgggagagacatctgcagccttgagaacactgtgctgatgtttccacagtttcaggtctgctctgtttctgtgcccactcctcttattccttctaagacttgttggaaggtagtgcaccaaagtgggtaaggatatctttttctccttcctctttgaagaagaaaaacccttcactaaaagtaaacaaaaatttccatttccccattcacatctttcattgcaagaaaatgaaaatttacatgtggggctcattgcagaagggtgttatggtttgggtagaagttttgaagcctcatatggggttgatgggttgggaagtcatcttgtgtgtcaaggtcagggttatttgaagactgtggaagccaggaaaaagactgacaaacctgaccagggcttctctgaagagaggaacttcaaattgcagagagcttaattgcctgcccagaatgcacttctcatacattagagacacagtgttgactactggtgtggtggggaccaacaacatagtcaccacccttaacgtcttcttggacctggattacacaaagtagttttgtcatctgtccaactgtcacacatacaaagtcagtaagactttggaatctgtgatgtcagggagccacttaaagtgcttccagtaccagcccgttaaatattagaaatgccagagaaattatgcccctgtgatggtttgatagagatcttgacggaggactacaaatttgggttctactgagatcacactgagtgcccaaaccttggcagatcaaggcatttttgagagcctctggactacagtcagatccttccaatggttaggatacctttaaggtttgtttgtttgtttgtttatagttagaatagcattgatctgaagaagctgacttaatattactatggattttaagcctcagtattaatattcatcactataacaatttttccctaccaaatctctgtcccaactgtagtgacagggttccgattagatttcaagggctgtactggctatcgttgtttttcttgcagtacctggcatgggtgtggggttggctctttcttgggtctggagtgagggcaacagagttgagggagtctttgcttagtgcaaactcagttcaacacatgctgcaaaatgcatctgccctctttcaataatccatcctgtttcagagaaacagtactacacttctcccctctgagtctgctgtggtgacaccactactcagcttgccctcttcaagttttacatcaaaccagagaactcatttccagtaaggtccagaagcagagattatatccctatagcctaagcacaaattaaaactccttacttttaaccacatagcttttccccttgttacgtgtttgcctgttctataaaacactttcatgtgctcgacaatcaattttcctcctggctatataaatcctgtataaaaagaagaaaaaaaaagttgaaagaaaccatagcaattattcatgttacaaactggacaagtgacctgaagatggagaagactcagtgatcacatggtgaacaggacagtgattgccaaacaagaaagcacagagcctcagcagctggactggaactggaattcaagtattccagctctcatgcaaaaggattaaaatgacagagcctgtcctttgacctgctaaaaacagaaacctgggtggcagggaaaaaaagtgcacctaagaagaaaagaaagaaagacaaacaagcaaaggcttgtttggtggtgccagccctagcagggggcacgtatatccgccctatgcttcagggtcacgaagtagtgtctgtaattggatagaatgatcaggctacttccaggaagggtccttgaatctacacctccaatggtagaaataaatgtatagaccaagaattgctgagtgatggctttgaaagttaaaagggcataaaaaggagccactcatcaaaccaaactcatcacaaattacttaaatagatttcacaatctgttccattctctagacaggatttaagagaaacacccacttgatttgaatttcaaggctgcatcacatcatgctaggaatccagagagctaatagtatggcttgaatcttgttactggaggatattgagtttggatgtcgaggtggagaagtgggacgactggcaggtgggctgacgtgatggcccagagcactgcgtggtgaggcatcttcctcttgcctctctatttgtgctgtctgttctttccctcttcaggacaaagccttcatcttctctttggatcaggcccctggatcgccctggagatgtacatggtcagcctcgccctcacttcaacctggtgttccactcttctgtcatctctcttcttgccttgatgaggacatgggttgactctgagtgccttagggctgcagttgtcttcagcatttgcaagagccaagctcactctgaaacagaaagggactggggttggacggtaggacccctggacagcagcaagtgcattatctctgttgaggagaaaggtttatttgcctctgtcccaccctgaggtagggggattcatgaatttctcttgtaatgcaagcaggcagctcccactgccctgtctggcctcctgtctcctctcctcaaagaactagccgataggtgtgtggagatcactggccttcctttgctctctagaagtagcagaggctatgtctctgtttcagagagactagttctgcccttggattccctcaccatacaatgcaaataatcctcatcagaaacccacccaaagcccacaactcagggactgagatgctgtcccctttcagctgtcccactgtgtagacgtgtctgtagtcactctgcctcttcttgtctttctgcttctccaagagcgttttcccacctctgacagaagttgatgggccaggatagcctcttgcacttttctactcagactgttgagtttctttggtctgtgagcttgcagatcagggtgctgtcccgcctccttaatgccaatcagagcctgcacaccctcttagccctcactctccagcagcacatgacagtcacaacagtagagactattccatgttctttgattctgtgatggatttggagtaccagaattcagtattcatggctgttctagggatatatgctttgcttttgacctggcacatattctttataagtttatgtttcagggaaaaaagcaatagtgattttggcttggaagcttaagatgctattgtgaggccagttcattgggtcattttatctgtgccctgaaggtagaggtctttctctggcctacgctctgcaagaatagagaaggtgaatctcaatgcttctgatgcctgtagacagagagattgacatgtctcacaggccatctctgactaaaaacataacccctctcatccttgagctggcaagctgcctgcctggagtgcagattagagggcaatatgtgttaaaatgcaaataatgctagccagcaattattgagggtttcctacaccaaggaaagactggctggtgttttagtttcattcttacgacttcttcatcactttcttatgggctgagtactattctcccattctatggaaggaagctgagagagaccagacaatctacgctgcttccacagtatgaccacaaaaccctaactttttctctctggtgtgttcacatgtgtgggtgtgcatggacgtgtgtgcaaagacacgtggaggccagaagttgacatcctgtgcctattgttctgagacagactctcccatcgatgctagagcttgatgactctgactgggctggctgaccagtgagcccagggctcttccttgctcaagtttcctgatgctgggattgtatacccatgctcatgtacactcctttatgtgggcgccccaagaaccccaacccttaaacttcttatttccctctgcatgctagctcccagtattgatctcatccaagagttttgttcacatttgtagacttccgaatcatatttaaaaagtcaacaacagagccgagcgtggtggcgcatgcctttagttccagcacttgggaggcagaggcaggcagatttctgagttcgaggccagcctggtctataatataaagtgagttctaggatagccggggctacacagagaaaccctgtctcaaaaacaaacaaacaaacaaacaaacaaacaaacaaacaaacacacacacacaaaagaaagtcaacaacagtgctaatcagaattaaaatggctttgctatgaaggttcagatctgttgaatcttgagcaaggcctctctgtttacttcctgtgtatttcttcgcattctcactgagaggaaggaccactttggttttgtgtggcttttctaagaatttactcagaactttctctatctgcaacaaggctcattcacttgttcaatcaacaaatatttattgcgtccctgctagaggcagctgactgagtaaagggacacaaagaggcaaaaggcacagtcgctgcccatcagaaatcgccaccagtggagaattaaattaattagaagcccactaaataactggtctcagttaagctgatgtggtgagaacagtgggccttttaaaatgctaatatataattcactttgccaatgtagacagcagttcggggggcgggtagctctgtgggatgaacgaggatgctattctttatgtagcatcattggcatgcatacttacaaacggcttttcaaagggcagaaatgggtgtatcttggtgtctcctcgtggagctggcccagtcttgtttataaataccagcaccacaggatttagaaagaaagtagtaatggagacatagcctttgtcctgcaatcagagataagtgacctgtacagggatggagtccgggtattttaaaccccaaggttgaactgcaaccattcacctgctgctaattcattctaatggaactcaacaaagaagtctgtatttctcccatggtcagtattaaaatgtctctcagaatacccacatacaaagcttcttcaacactctgcagtatgccaggtggtgtcccagtcactaaaagaacaatcaggaggtacaagaccaatgtcccttttcagagagtggggtctgtcctattggtgggcaagattgtaagaataaaaacacatgatgatggaggggtctgaaattattaattcataaacaagacatgaaaactggagggatgcaggagtcatttcctggagtatgtaaagatggtaagttttagtggtctttgaaaatagtctagggtttttgtgatatgtagaaatgaccagcataatccactctgaggaaacactgtggcgctttggtggtgataacttttccagtgggactggtagaggattatctgcaaaagtgctagaacatcccaataaacacagaacatgttgaaaaccaacttggaagcttattctagaggtcttttaatagtgggctgagcggcttgtatttttatcttacagtcaatacactaaaacaatatggtcagtagaggattttcagaaccttgttcctgggcaagttttaggcattggatagcaagatgtcaagtggcctgacggggactgagaggaaggaaagtgaccaacaggagaccagatcttgaagacattagccggttgctctgactacagcacttggatcaaattatttagttatctttggcagagagcaccttctatggtccaagtaaatttcctatctgtgcttgttagatccatcccgcactgtcttttaaaaccattcaaaactctaccttggggctggcaagatggctcagtgggtaagagcactgactgtttttccaaaggtcctgagttcaaatctcagcaaacacatggtggttcacaaccacccataatgagatctgatgccctcttctgaagacagctacagtgtacttatttataataataaataaatctttgggtcggagtggggttgaccggagcggagcaagtggggccgactggagagagcagaggtcctaaaattcaattcccaacaaccgtatgaaggctcacaactatctgtacagctacagtgtacccatatacatgaaataaataaatcttaaaaaaacaaaacaaaacaaagcaaaacaaaaaccctcttccttactgattgaccattggcctgtatgaagaagagcttaaagacacagcagcaagagcccacacaggacagtcagttcctagagggattgtttttacatacaaagggcatcatttcttatcaagcatttaaccctttagcatcacgcctgaaaggagaacgacaaacccaaccagaaaaagaacaaaagccaaaagatttttgtaggtcatcaaactccgagaactgtgaaggggaagatttaaaaatgagtcaagaatttaattcaagaattctccattcagtgaaagctcattacattgcttcttgaccttacttgtctatacaagccgtgttccatgatagtatcttattaccatttgatgtgtcattaaatgagtttcacaaggattgtgagtaaacaaacttacagcccatcagagaagtattctctgcctaaagacagagcaggtcagggcgtttctctctgagaggcaatatttcaaaattggcgacttcatatttttaagctttggttgtgagttgtatcatctggtgtccttccatacctcccttcccttccccccactactgtctgtcttaggcataggcctagcctgcaactgtccagtgtcgtaagtcaggacatttaaggcacacaaaggatttgcttttggcactgggctgccaaactctctcttccaccctagattttcccccagagtacaagactgatttctcctgtggctccatggtggcttcatccttcagatggtggcttacaagcaaggatgtaagtatgcactggtggtcagtaagaaaagtggaaatatcctcagagatccaaatatatgtcaaaattacaaagatggcccgagtgtcccctctcactgaagtacagtaaagatcagctgagaaggttagtctcccggtggaccttgataggtaatagagagctggggcagtgggccttggagatgaaagcttgtgaggaaataaagccctcttctttaaaattctcctcttctaggttagtgcaggctttaacccacatcttggcaaagacatatgaacttgagttagcaagcacatgtgtggatatcaggggcatgtttgcatatagttgactttccctttttccaactgagtaagagtgatggtttatgtatagagaacatgtatatatccatagtcacacaaaaacatttctataggtgtcttatttaccatattcatgttgtgtgtcccacttcaaaacagaaaaacacacctcacctacagtagctgagaggacctcagtaacacgtggggccttggtctttgttcatcattaccctcttgtttctaaagtattcctctcagaaagcaaacccctgggctcccacccttcctctctaagctgccacaagcaagccaggctgaaggtcagcttactcttttttgagctagaggaacctctgtgtctatagaccagctgtgagctggatgcaagcagagtaaacctgtcccatctcctactgaaaaccacactaaagtctgacccaaagggcctcctggctgcaaatggaggggcaattaagtcaccagactaagctctgggagggaagaggctttagtttttcatatccagtgtatgttttaaagagcagaggatagaggtcgaagaggcagtagaagccttgaagaaaatggaaacgagatgacaggtaggtgttggctgtactgccactaggtgttatggagcaacagaaaacatttcaaaataacacgagatttaaaaagctcagagtcctac

SEQ ID NO: 2684 - DNA, 3696 bp, Mus musculus
tccctcccaccccgccgcccctttcttctctccgggccacgccacagccgcggcgctcgctgcggccactggtgagctagccgccccagagccccctcccctctgcccgcccctccccccaggggccgcgtctggcgcctgcggagccccccgccccgcacctcccccgccccgcactggccattggcttgtcctggtctctttttcatgtccagcccctgatgtgtgtccattggtgtgagcttccccttccctcctccccttctctcctgctcgccctgcccatgttttgtgtgtctctgtccatccagactcctgacgttcaagttcgcagggacgtcacgtccgcacttgaacttgcagctcaggggggcttttgccatttttttcatctctctctctccctctatccctcttctctcttcctctctctcttttttttccttaaaaaaaaaaaagccatgacggctctcccacaattcatcttccctgcgccatctttgtattatttctaatttattttggatgtcaaaaggcactgatgaagatattttctctggagtctccttctttctaacccggctctcccgatgtgaaccgagccgtcgtccgcacgccgccgccgccgccgccgcccgccccgcagcccaccatgtctcgccgcaagcaaggcaaaccccagcacttaagcaaacgggaattctcgcccgaacctcttgaagccattcttacagatgatgaaccagaccatggcccgttgggagctccagaaggggaccacgaccttctcacctgtgggcagtgccagatgaatttcccactgggggacattcttatttttatcgagcacaaacggaaacaatgcaatggcagcctctgcttagaaaaaggtgtggataagccgccttccccttctcccatcgagatgaaaaaggcatccaatcctgtggaggttggcatccaggtcacgccagaggatgacgattgtttatcaacgtcatctagaggaatttgccccaaacaggaacacatagcagataaacttctgcactggaggggcctgtcctctcctcggtctgcacacggagctctaatccccacgcccgggatgagtgcagaatatgccccgcagggtatttgtaaagatgagcccagcagctacacatgtacaacttgcaaacagccattcaccagtgcatggtttctcttgcaacacgcacagaacactcatggattaagaatctacttagaaagtgaacacggaagtcccctgaccccgcgggttggtatcccttcaggactaggtgcagaatgtccttcccagccacctctccatgggattcatattgcagacaataacccctttaacctgctaagaataccaggatcagtatcgagagaggcttccggcctggcagaagggcgctttccacccactccccccctgtttagtccaccaccgagacatcacttggacccccaccgcatagagcgcctgggggcggaagagatggccctggccacccatcacccgagtgcctttgacagggtgctgcggttgaatccaatggctatggagcctcccgccatggatttctctaggagacttagagagctggcagggaacacgtctagtccaccgctgtccccaggccggcccagtcctatgcaaaggttactgcaaccattccagccaggtagcaagccacccttcctggcgacgccccccctccctcctctgcaatccgcccctcctccctcccaacccccggtcaagtccaagtcatgcgagttctgcggcaagacgttcaaatttcagagcaacttggtggttcaccgacgcagccatactggtgagaagccctataagtgcaacctgtgcgaccacgcgtgcacacaggccagcaagctgaagcgtcacatgaagacacacatgcacaaatcgtcccccatgacagtcaagtccgacgatggcctctccacagccagctccccggaacctggtaccagcgacctggtgggcagcgccagcagtgcgctcaagtcagtggtggccaagttcaagagtgagaacgaccccaacttgatcccagagaacggggatgaggaggaagaggaggacgacgaggaagaagaagaagaggaggaagaggaggaggaggagctgacggagagcgagagggtggactacggcttcgggctgagcctggaggctgcacgccaccatgagaacagctctcggggcgcagtggtgggcgtgggcgacgagggccgcgccctgcccgatgtcatgcagggcatggtgctcagctccatgcagcacttcagcgaggccttccaccaggtcctgggcgaaaagcataagcgtagccacctggccgaggccgagggccatagggacacttgtgatgaagactcggtggccggtgagtcagaccgcatagacgatggcactgttaatggtcgtggctgctcccccggcgaatcggcttcggggggtctgtccaaaaagctgctgctgggtagccccagctcgctgagccccttctccaagcgcatcaagctggagaaggagtttgacctgcccccggccgcgatgcctaacacggagaacgtgtattcgcagtggctcgctggctatgcggcctccaggcagctcaaagatcccttccttactttcggagactccagacaatcgccttttgcctcctcatcagagcactcctcggagaacgggagcttgcgcttctccacaccgcccggggagctggacggagggatctcagggcgcagcggcacaggaagtggagggagcacgccccatattagtggtccgggcccgggcaggcccagctcaaaagagggcagacgcagcgacacttgtccttcacacacccccgttcggcgtagtaccccgcgagctcaagatgtgtggcagttttcggatggaagctcaagaacccttaagttctgagaaactttgaagcccccaagggcggggcggacatgcgccgcccagccgacgtcaacgtgctccgttatcctgctagattgtgatgttttctgacagtagcctccaagaagacaagagtcctgccgagtcctcccagcctgggcctgcagtgccattttatttatattttttaataaaacgtaaaaacaaaaaaaaccagacccacattggaacagtgaacccgtcccatccagagggccctaggactgccgcagttggagcgacgtccaacccttttgaaaccagccaacctaattacccgtactgtggaaatgagcatgacccctgaccccttgtttctatacattctatgttgtcttttaaaaagtgtgcttaacattgacataataaatgttggagctttaggcggtgtgtgcttgttttttaatttttaatgctcgtaagacaatgtggctgcttcaggctttatgtctgtgtactttttttccttcagaagctcatagggtgagcagaaggaccagactcaagtgccaggcaggagacctagaaaaggaagtaggcttttcagatggcatacattttcaaagaaaatcaaaatgcaaagctaggggataaatcatagtaatatcataattaatgtagtagtattgctgtttattaatgctgacgtgtgtttttcctctctgacttataatttgcataccattaaataatgcataaat

SEQ ID NO: 2685 - protein, 765 aa, Mus musculus
MSRRKQGKPQHLSKREFSPEPLEAILTDDEPDHGPLGAPEGDHDLLTCGQCQMNFPLGDILIFIEHKRKQCNGSLCLEKGVDKPPSPSPIEMKKNPVEVGIQVTPEDDDCLSTSSRGICPKQEHIADKLLHWRGLSSPRSAHGALIPTPGMSAEYAPQGICKDEPSSYTCTTCKQPFTSAWFLLQHAQNTHGLRIYLESEHGSPLTPRVGIPSGLGAECPSQPPLHGIHIADNNPFNLLRIPGSVSREASGLAEGRFPPTPPLFSPPPRHHLDPHRIERLGAEEMATHHPSAFDRVLRLNPMAMEPPAMDFSRRLRELAGNTSSPPLSPGRPSPMQRLLQPFQPGSKPPFLATPPLPPLQSAPPPSQPPVKSKSCEFCGKTFKFQSNLVVHRRSHTGEKPYKCNLCDHACTQASKLKRHMKTHMHKSSPMTVKSDDGLSTASSPEPGTSDLVGSASSALKSVVAKFKSENDPNLIPENGDEEEEEDDEEEEEEEEEEEEELTESVDYGFGLSLEAARHHENSSRGAVVGVGDEGRALPDVMQGMVLSSMQHFSEAFHQVLGEKHKRSHLAEAEGHRDTCDEDSVAGESDRIDDGTVNGRGCSPGESASGGLSKKLLLGSPSSLSPFSKRIKLEKEFDLPPAAMPNTENVYSQWLAGYAASRQLKDPFLTFGDSRQSPFASSSEHSSENGSLRFSTPPGELDGGISGRSGTGSGGSTPHGPGPGRPSSKEGRRSDTCPSHTPVRRSTPRAQDVWQFSDGSSRTLKF

SEQ ID NO: 2686 - DNA, 121813 bp, Homo sapiens
agatatcatgtcaatcttactgagggtaaaatagctgaaaacacaagtatggactcagtatttaaatttctttcttggtcacattaagttaaagagatccagccccttaaatgtgaacatcagtggaaagaaacgatccatcttggaattctgaagacattactaaagctaaaatcatataatttttttttaaaagaaaggagttcctttttggttggaggctgcctctgtttgatttatttatgctaaaataaaagaaaaaaaatggaaagctgcatgttcccatgaaggagagttgatttcttataaaacatgttttaaaatgagcatatttaaaattttctagaacctttaaatcaatacaagcaaaagatctataatctttagcaaaacccccttatgtgcttaatattcaaataatgtatatgctttcccctaatatatttgtagtcagaagcttagtttattttaaaaatccactaattaagctctgagttcaagattcaatattttgagaagagaaggtcatacttctttactcatcatatgtcaagagcatatactgatatttcccttgctccctgagccaggccagaaaaaatcactgtttgggggtgtatgggaagggggttgcccatataaagctctgtgagctttgcctgttgcaaatgaaaaccagctagacaggtcttgatatttaaagaacgtagtgtctggagaatcagcctccagaattagtctctcagagttactctgttatgatgctcttgaaatttggctgtttgaatattttgctgcatttcaaaatctgagaattgagaacaataaaaaggacattttgtctatggtagataggattttgaagttcctgggaatctaagtggtttactttgtaagtctttgttcatgtaccagacattttcctaaggttctactctgtgctgagggagagaaagatgaaaatgacagagactgtgccctataagctctaacaacttaggacttgggtgatgtggtggcttttatgacatatatacaaagatattatacacacatatatacacagatattatatggaatatacacagagagacatgtaattgtttccccctgatggaagtgggtgtggagtttataatatgtaggttaaatagcagtgcaaatggcccatgtttcttaactatttaaaaaatgaaataaaataatataattttcaattattgagtacttattagtgagcaacgcaaatacccatgtctttttcactggcagcagcaactgaaaatatatttgtggaattcattccttgattcaggaaatgtattaagtgcctactatgtgttagggaaccaaaacaaaaaattggctggacgcagtggctcacgcctataatcccagcactttgggagactgaggtgggtggatcacgtgaggtcaggagttcgaggccagcctggccaacatagtgaaaccccctctctactaaaaaaatacaaaaattagcctggcatagtggtgggcacctgtaatcccagctactcaggaggttgagggagggagaattgcttgaacctggaggcagaagttgcagtgagccaagattgtgccactgcattccagaggtgaaagagcgagactccgactcaaaaaaaaaaaaaaggcacattcacaaatacatgctaggaatagtccataatattgcctacaaaacaagtggtagcacagaaagctcatttctcaaaagtaactagttaagccatttgaaaacattataaaaactgtgatagagatagatgatcacagatatctatgaccagacctcattatttaccattctcatttatgggaaatcaagtttttctccagaaagtacaaatctggtgtcagagtgaccagagctgtgttgcctcacatagatcctcgctataggtttagaaccgctcaaattagtaatatgaagctagggctatacaaaataggataatagtgtgcatttgtatggctttggcatgtgtgactggtgaactttatgtgacatgcttgtgcctgtgtatgtgtgtcttaccgccttaaaaaacaaaacaaaacaaaaccaatcatccaaaagcagggaccacatcttatgtttgcacagtgcagtgctccataaagaaggaaagaataacaattcttaggaccagattcttcattttataggaatctggaggttcagataactgaacttgtgcaaggatttttttttttttaagagaaagagaaaacaggcaaattgtgtgcaactgggaatgggagaatagagagatttgtttattctctactaagctgccaaagaaagatgacagagggataggtattttctcctagaaaagttccctttgctgaatttgacaagaaaaaaccaaaaaagactattgactatcacacacaaaaaaagtcttaatttctagagaagggaccagaatagtctgggctgtgcagtgctctctgggaatgactggcattcagctggagtggttatggggttaggcaattatggggtttatgagacactggtagagaaggaacttgagcctggtgacatgttttgatgactgcttcccttttgtcactcattgaattccagaggagaccaactaaagctattgtgaagtgagaacgatcaaagcctgtggtcctcagtggcctaatttggtggtctgatcccagtcagagggaatagaggaaaggaactgctcttctgaaagtgaaaagatttctgaatgcagatgtggttgctgcatagctcttggtgggcctttctgtgtgaagtcagtgaccttagggtctgccaacaacatccagccaaggtcacattttggtggaggtgccatgagctgcatgcatttaaaaacttcactttaacttgtccgccacctgatgtttatggagtggcttttctaaagcaacaagatttggagaaacaaagtgttagagcttctaaccttaccccatctttcatcctatttctactgccctctggtggacatgttaattagagaaactgccactccccaccccatcagcactaccttctccatcaccatcaccaccagtatcatcatcaccaccaccgccacctctatcgccaccatcatcatcattaccaccaccatccttgttttcctcatgcatatactcagcatcggccacatcatcacccataaacattagtttcatattatggtggtggtataccaggttaatagtacatatttcaaaactctggtccaccggattatacaaagtaaattcttcatcaatctgtcaacagtcaaagtcaagcagagaaatacatggtgtttgtgtacagtccttgggtaactcaggatgactgcaccatgctattgccttccaaacaaaccaagtgatgccaggaaagctgtaccttttatgaaataagatgtgaatactaactcttatttttaccacacagttggtagacaggattaagatgatctgaggtgctttatttttcctttctggtaagttcatactttttcatcagaaggtagcacagaatgcatacctctgtgtatatgtatgaggtcgcaacattccttggcatatagtcttgatttttaagttgtttctttctgtgtgtgcgcctatatatatgtaggaacacacacacccacacatacatactccaggataaaataataaaaacttataaaatcgcaaagagtacttgtccaaataaaggactaactgcctataaaatttcctttcaggcagtgaagtcatagctggaagttggcaataagaccatctgaaactactaaaaacattctgaaatgttctggaggagagagagggagagagagagaaacagaagagatagagagagagagaaacaggagagagagagagagagagagagaaagaggagagagagagatccaaaagcttcctcagctgagttattctgccttttataaaacaagttcacatctggactgataacttgaattctacccagtgccatttaaatagcccaagttataaacctcttaaacttggggtttataatagaaacactgacagacccttaactatagtgcctctatagtaatgaaagcacaactatttcattatagcagtgtctggcagggctgctataattaagagtctgtcagcgtttccattataaacccaaattttaagaggtttttaactcacattgttttaaatcacattgggctgaagctggctgtacaaaatgtcagaccagatgtgtgtgtgtgtgtgtgtgtgttgcttttttttttatttacgagagagagggaaagagagaggcatataggtgaaggttgtttttaagattgggtttgaaaaacacgtattaaaaaattattcccttgctaaaggtaaaagatgcatggggtagggaagcatagagaatcaagtttgaaataccttttatttttggttgttttgattgtattttttttcctttaaaagtagtctcatttgagaaagcagttttgtacgtatccaaaagcaatgttaaaaaaaaaaagaaatcatttgataccagcttattgatactggcttatttggaagatatttgataatgtatgctgctggagacgatggaaatatcttgtattgttacttgttcagctgctctgatattcgagataatcttttctgagctcaccatccttggtgggaatcacttttatgtttaaacacactcttggaatagggttgcctgatcaaagccttattagttttgggggaaaatgaatagaatttggatggttatgttggtttcatgtatgtggtgataggatttattagtttattatttatcaaattattatttatcagataactttattaatttattatttatcaaagaccatttattggacatctactgtgtgctgattattgcattaggaactctctagtgcagtacattcattggactggcagcattgcccagcacctctgtgtctttgatgtcaatattaggaagctaaactgagcatttcattcagtagcgttctaactagaactctttgtctcttccaaggggccccttacttatgtggtaagactactgctccctcttccccatacattattgacttagcacacagcagcctcatctagaggaaagtatagacttagagcaggttcagctcgctccttccttcctccctccctcccttcctccctcctttctttctttcttccttccttccttccttcctccctccctccctccctccctccttccttcctttcttccttctttccttttcctttttctttggataggttcattcaggtgtttgaagcgctgactgctagctagctaaaggcccagggagcctggagagaaagatgccagactaatggttctcccaggagcctccttgagagatgtctgtgcctttgtagaaggtatagatactgtcctccagggacctcccaacctgtgggtcacactgggagtagaggaggaaaaagaagctcatcctcttccacaagcaactccctaacatttttattattatttttttgagacaggctgttgcccgggctggagtgcagtgatgtgatcttggctcactgcaacctctgtcccccaggttcaagcgattcttgtgcctcagcctcccaagtaggtgggactacaagcatgcgccaccatgctcagcaattttttgtatttttagtagagatggggtttcacattgttggccaggctggtcttgaactcctgacctcaagtgatcctcccacctcggcttcccaaagtgctgggattacaggtgtgagccaccacccccagccattcccaacattttaaaattcatttttcctttgtcttaacaacagcctagcacttccatcattgagacccaaaatacaaaacctatgccaagcatagaatccaaacctaagttttatttttatgaagatgactgcctgttctctattttgtgacctgccaattaggaaaaacaaaaaataaaaattaaaagaaaagaaataaaaagaagaaaaaaggctaaagtaaaaatcaagaaggaaatgattgtatttttaatcattcattcagtcattcacttatttatctttgagtctatgaaggtgtttccccctaaaggcagacagtgaatattttattttaatcttgtagtttccatcctgacagaccttttaacccttcatcttccagctcagcccgagttcctcgcgccaggcgatcctcggtccgagggctgggactgtattaagtctccctcttcgagctgtttgttgaccacattcacgttcagagcccttgagctaaaagcactttacaccataaaataaaagcactgtctttttttttttctaaaaggttacgtctggaggccacgcggctcatacttcataccgaaaactactgaaaggactatgaaatcctgtatgatttacactctctcactgcattagggtatagatctactcaactctaaaaatacggtgggtttctaaccgacgtgaatatatgtgcattatttcagaaagtctgttagaaaacttgtcaacacattataaagcataaactaggacttggctattaagtacggagatcagaggcagaatatatactgcaggaagtcctggggcgtctcctccgcgggcaagataaaaagggggaggagggaaggggaggggtcgtctgctggcctggagtttacacgcagtgtcgtcaccaaaggtttgggaaagagcccacggaacgtaattaccctttcaatgggagcagcaacagctctacagccccaaacgaagttaactgaacggccagaaaataattttaacgttgtcataatttattactttctaaaagccacttctggaaaggtaaatatacttattgtgtatccaagtgtgcgcatttaaagtgacctttcaccccctctacaaaaccacctgcatcattaatcaatacttacgtaatattttaaaatctcttaaaacgacacatctttctttaaacacacatacaaaccctcccctcccccactttcgggctctttagcgagcatccagcagtgctgagggaggggttgtcgccctaggggagggcaccaggggccggggaggggggtcgacgaccaggagggatcaaatgccgacacacagccgtggttttctggactgggtgaaatctggctgggggaggggcgggagcggagggcacttcccatttcaccctgggcatattatgatggtgaaattaaatatatgtcggggaatcgtcgctgcttacctctcctttggcacccagggaaagcagctgcaaaactggctttttaatgtatgttttaagatgtggtttaggaaggaaccccctggaatctgaaacaagtgcaataacatagcagacctacttgtaactaagtgcttaatttcctatgtttttttttaaaaaggaaaatcaataaaatgttgccagttatttattggaaatagccacagatagcagccctgatagggtgccgtcgtcagagcgcacacaattgtgtaatgaattgtaattcagaagactgttaaatgtgaaccacagaacctttcagaggtaataaagtcattactttttacactacagccaaccccgaaaagctttatacacaccattatatataaatcatacatatatatatatttccacaacactcactcgctcatttatatatcttctctatagatggacttttatggacgggtgggaacaatattcaaatctgaaaagcttggttctgaaagaatctggctcactattgttacctgaaggggcttttcttttatttatttatttttcaaaggcctcccagttgcactttcttcttccctctcttcaccttccctccaaccgtcccccacgtcgtcctcccccgccaccccccaagaagacattcttttggtgactccaaggctggtttaacaagacaaaaagcagactgtggtggaatagagatgctgacctgctctgaagaactcagtgaaaaggggaaatggtgtcacacacaagctacagagcttaacttctagtgaatcctcccgcttcttaaacagaatttgaggtctccctcccacaaactggagggaaacaacaacaaacaacaaaccacattgacacaatcccagtacagcccacatctctctcaatgttgagcatcaaaacctccttttcttccttagaggggtccgaagctccgccgagctaggcaagccagtcattttctaacacagtagacttgaaactttactaagacgaaacaggaataaacagccgcttgccggcagggctgcgggatgggtgagcgcgtgcaagcccggggccctcgcttaaaacaataaagcccccccaccgggtgggtgagtttacggaagcgacaccctttagactgaagagggggatgagaagacgggggttgtggaaccgctccgaggagagggaaggagggctcctcgctctgcagacacactcacacatatccacctgcagctcagggtctcgcgggccatggcgacccgtctccaccctgcaccctccgcacctcccttggacctgagtccattctcctctccccccaactccttccagatttggaatcggactgcgatctccccggcggcggcggcggcggctgcagagtggtgctggcaggcagggaggctgggaggcgggaggcgccaggggactttacaggcacgtttctgaataaactttccaatcgcagggggtgctgttgctgtacattttacgtaaaactgaaagtatcccacgccagagtgaagcccgctttttgacagcggcagcacgcgcgtgtgtgtgcgtgtgtgcattaaagagacagggttttatttccaacaggtcttccctaatttccagggaacgtctgcagaaaggcgagagggggctgctggctcctgggtgtgcgccttggccggcggcgcctggggagcgcggcggtgacccgaggcggtcatctcaccaccgtggtctccccgctgctcctgcgagcctgtcgctctctctccattcccattttctctttccctgggtaacagcacaggaacagttgtgctctgcccgtaagaaacattttcttcccatccctctgtgcttttgcagttgctctggagtgggagggggtgtgtccctcccagggacccggctcggggacctcccgcggcgccgtgagcacattcccagggactgggactcccgggactgcccgcgctttgtcctcggcctctcagagaggtggacgcctcggtgcctctcttgcccaggcccccggcgctcccctccgggggccagactctggctcctcgttctttattcctcgggctctctttctgcgacccttaggagccggggactcggcgctttcagttgcattcagacccagtcgcttggcggggcgctcagattcccggtccctggctcggccttgggggcgccctcgggccccggcctgcgccgcctgcctctccccggtcccctctttccaggccgcgcgggctcctggagacttgggcgctgcccttccggacccgcagccctccaaacttaggctggattccgcgttgccgtgcgctccctcccacctcccctcgcccgctgcggagctgtaacttggaggctcagctctcaacttcgggtgatttttctttgctgtcctctcctcgggcaaagtttcccgagcgcagccgcgggctcggggcttttacttcggcccctggcgtccacacgcggggagcgagcgcggcggcggcggggaggggaagtgggtgtgcgtacggaggagggtgtccgggagcaactctacctggcttccctccgcccgcgcttccccagcccggggctgcagcctcccggtgcactctcgctctatttttttcttttttgaataatctttcattttagagtccgcgtgtgtgggggggagcagggcgcacgtcttgctcccccccaccctttcctcccacccctgccacccctttcttctctcccggccacgccaccgccgcggcgctcgctgcggccactggtgagcccgcggccccagcgccccctcccctcggcccgcccctcccccgggggccgcgtctggcgtccgcggagccccccgccccgcacctccccctccccgcactggccattggcttgtcctggtctctttttcatgtccagcccctgatgtgtgtccattggtgtgagcttccccttccctcctccccttctctcctgctcgccctgcccatgttttgtgtgtctctgtccatccagactcctgacgttcaagttcgcagggacgtcacgtccgcacttgaacttgcagctcaggggggcttttgccatttttttcatctctctctctctctctccctctatctctcttctctctctctctctccctcttttttttttttttttttttttttttttgcttaaaaaaaagccatgacggctctcccacaattcatcttccctgcgccatctttgtattatttctaatttattttggatgtcaaaaggcactgatgaagatattttctctggagtctccttctttctaacccggctctcccgatgtgaaccgagccgtcgtccgcccgccgccgccgccgccgccgccgccgcccgccccgcagcccaccatgtctcgccgcaagcaaggcaaaccccagcacttaagcaaacgggaattctcgcgtaagtaacccaataatagtaataataattattaataatcacgagagcgcgcaggactagaagcaaaagcgagggggagagaggggtgtgtgcatgcatttttaaatttttcacgagaaaaacctccgagagtcgaggtaaaagagataaagggggaaaaaaccctcatcccatctggaaccattgccgtgtatgcacttttgagacagcacgcaccttttaattttatttaattttacaaaaatttgactcctcctctttcctcctttccgccgctttatttctcttttcgaaaaggaatgcaatgattccactccccccccgccccgccagttttgcaaaataatgaacaatgctaaggttgcgaacaactcacatgcaaacctgggggtgggagctggtggggaaagggaggttgcttcccactcaccgtaagaaaatgggggggtagggagggagtgagtacaagtctaaaaaacgattcccggggagaaaagaggtgagactggcttttggacaccagcgcgctcacggtcaagtgtgcagcgggaggaaagtagtcatccccacaatagtgagaaagtggcactgtggaaaggggcccccggcgctcctgagtccgcggagtcgggagaggggccgcggcgacggggagagccgtgggaccgggaaggacgggagacgcggccggcactgccgccttttgttccggccagaggtgggtgtttgtcccgctgccttttgtgccggctcctcgcgcttgccctcccgcgccgccgccgccgccgccgccgaagggcaggagctagggccgggggaggaggcggccgggggcacgcgggagagggagggagggagcccggactgctgcctcctgggttgccgctgccctcccctcccgaccgaacctcagaggcagcaaggagaagactggcacataaataaataaatacataaaaataaaataaataaaacaaggcaagagaatgtacaatttcttgcccccaaaccgaagccaaacgctctgccaacccttttctgtgacggccttctctttgactcccccaccagcccccctgcaaaaatctcacaatctctcatctagaaaaaaatttacaatcaccctcttcccccaaaccccttcagttgcaaacttagggcgccgacggcacggagagggagagaggaactccctcctcttactattttttggaagattttcaaaaaaagtggaagtggattttgattgggaaaaatctcgtgtctgaatgtttacaagcaccgcgtgtgcgggagcctcctgccaacaaacagacagaggaccgagcgcggcgcggcagccccggagcaggcggcggcggcggcctggcctcgcccgggccttgcccgacctcgccgcgccccagcccagccccggatcgcccacccggcgcccggcgcccacccgccaggcacggcggcaggccacgcagtgtctccgcgccagcctggcccgtggtcctggtccgcccccagcacaatgccgagacctcttctcgacctcccagactgcgaaatcggctgggtgaaactcggctttgcaaagcatttttattttgcagggcaactgtaaaagcgcgttctgcgcctcccctcccctccgccctgggtactttctcagacgtctcttgtccacagctcgggaccgcgaggaggtcaccacgtgctttccctgcccaccccccaccccgcccggtctggtcaccagtccccctgcgccccgagcacgactaggccaggtggcggggttgccggggaagggcaggggagaagtgtgtttgagtgtgcattttaagggcgctggatcctgggaccccgagcacttcaccctttgggtcttgccctcttccccaggcctggcttggtctgaggttcttgtgagtctgtataagagctggtggtggtggctgtctcccgctgactgcgcctggaaaggcgggcggtgggcacttaggaaagtttggcagcaagggaaagaaaggcgtgagggcccacattccccccctactcaatttatgattcttactttaaatttttgatgcagttttaaaggaccacctatacttggttctgtgtttttttaaaggggtggtggtggggggtgcgcacagggaatttaatttttcactgggccctggaacttgtcacacacttcggaagctcccccaccccggcacgttgcgcggccctccctctccccaccccctcgcatccctccctcgccgctctcccccgcccccaactcccccggccgcgccggatgcggatcagacgcggcgcgcggcggtgtgaagttacagcccggccaggtaccggcgggaaggaagggcagtgttcgcaggactcgggaaagtcaggcccttcttcggaaggatgcagtgggggctcaaaggacagaccggggcgcgcagtccaggctgctccctcgtacccctctccctcctgggtccatcttgggacactctaggctgggagggttagtaccccctcctcctgtcccggggttaaagggccagtttgggagggggtgagggggccacttctttctgtcctcattttctgggtgctcagagggggcaggagccatcccggtcctcagtaccacccccccgccccccgcctctgctatgtgggctgaatgagccattcggtcgctaggaggcagaacaagatcaagaaagctcagcgaacttgaacctgtaccagagcctcccccacctcctgcccggcgattctcgtccggggaggaacgagctttgcgagggtgggggtggggggaaagaacggttaggcagaattccctttctctcccccatcaccccgtatgtctttgttcttcattttgactttaaaaatgcttctggccggggccgcggagaagcgaccgggcgcgcggccgacacccccgtgcgcgagctgagaccagcgcgcgccgggctcggagcacggtgcagttttcgctttctttcggggccggcatttttggtagggaggaaccgggagtgcgcgctctagggcttcggggcatggccgaagagggggatatggcaagtttgcacttggtctccagcctcacttcttccaccccctcacccccatgcaaagcacagacctcggtggcctcggctggcttgctgggcggctctgcagcccgacaccccccctctcgcctcggagctcggaatcacaacaatagtaatagttatcatcataatgatgcgggcaggcagcgtcattaataatgaataaccgcagccgccgccgcgcacacccagtgcccagaattgcgggggaaatgcatttgcagagatcccccaaagtaaaaagtgtaagcttgtggacacagaatgaatctcaggacccgcgcttgaggtgtgtgcggagatactgagactgcaccaggttaaccagccgggttttccaaacctcacttcctttttcaccaactggcaggcccagggaaccgtcaccccgcggccgagctggccgagctggacgggcatggaggcagcagtcagggcccctggctgccctccgtctccgggcccccgggccccaaggccccgcggccgctgctgcacgtgttcgcagcaagcgcggcgggagcctgcagccagcacgctgctcgctttgtgcctcagagtccccgcgcccaacttcactttctgcacggtccacccttgccggggcccctgccccgggcctgtagcccccggctttgcttttgtttctttgcttttcctctctgaatttcagcctccgtttgcttctttaccctgttaagacaatcaaggagaaggacttggaaagcaaacttgaagacacatctccctttccccctccccctccgctccccggcagctctcgttttgctcgctccttaccaacatttcctataaggattatttttttcccttaaatttattcttttgcaactacacagagaggaaagagatctcagtctgtcactgagacattgagacgttccaggctgtcttgctgtttgaacgtagaagcattttattttctatttcttcctcccctcgtagagagaattcgcggctaattattatgattatttgcccactcccttccacttcaatcgaggactccctgctttgtagccggagtttaggccggagcttagaaatgttggtattgttggggcgaaggaggatggagttgaattgagggagggggtaaatggctgagggttaggaaggtttttagggaaaggggaatttgcattaaaatgcagagaaattatcagatgcccagaaaggaaatgttgattgccactgagaaaagatgtcaatgcaaatcagtagactacaccatgagaattgtattttcatattttctttgtgtcccactttgtctgatttttaataatataccagcaatgataaaaacacgttttggtatttctctgaacaccactagccaaatgttttgcaaggagaccgatgttaaacgtatttcatacattaggatataattcttgttaattagcaataatttacgttaagagcatagaaaatgttgaggttacaggttttatatctgtacatttgatcatcttgttattttcaagaactttgcctcctataaaattaattaggtgaaatgtggaggtgtaatcagcaacctctgaattaccacttcatttcccggttttgattgtaaatcagttcagtcactacatttagaagactttaaccaagtctgttttgaaccacattacctttaactatttgatacctaggagaatatttccttttgcacctaaataatattcccacttttagaaatgtgtcagaccttgggaacaaaaaaaaaaaaaaaagaatcttaacggtggaaataaaaaatttttttttttgcaaaggttctatgtactagtaagtttgataaaatattttcctaagtcttccttcagtctgtaaacctcagaacttgtagctaatgctaaacaaaaaagccacatttatcaatgtgtacttaaaatccttaattcagacaacaggaatattttgagaatgagttccctattcctcacttggtcaaaatggaagcaaatgtaagagaagaatgacattaaggcacaatgcagaggcacttctgtttgtcttcttttatttgaaaagtatgcatatgtattctgtatttatcttttggccagtatgttgggcaaagaaacataagtgcttactttactgtctttattagtaggaatataaccttcatattcctgtggtgaccttatgttaaattaggaggagtaccagaggctagaaattatgagatgtcctacttgagcacaggtgcagctaggcagggctctctcaatattatttcacctagcacatctgggagttactccagatcttccccctcaatattcagcctgggtagggttgaaataaatttaacctgagttcactggatttttgcactttatcaaaatctgttccaatattctacactcaaattaaaatctattttttgattctctgtggctttaagttcattaaatgtgaaattggcagcttgctaaagaaggtcagactgattaactgtttaagacttgtacattttctgcttcagttttattaactggcagcatcctggatgttttgtattttgtgattttttttttttttttgatagagcaagcataagatttcacaagcagagacttaccaactctcttttcccctttggaagcttaaaaaatgatagaagctggtaaagtagatgctggagtattttagtacaaagttaaaaaaaaaagcaaacaggaaagaaagacatgtctaccttgttataccatccgctggtgattatgtgtgcagaaatagtctcataatgaagcattttggagctcattcagaaaattagtccactttgacaacattaggcgaagtatttcaagtctaaagaaaggacttctcagccttgctctgaaatgtggtgtttgcttgaccattctgatttttatatcatagatgccaccaagtgcaaacatgtttagaatattataggcattccatttctcagaataaaaaaaaaatgactaattggcttattttcttaagtactcaaaagtatcccatttagctaatgtgtctgagaaatactgcccgtgcatttggtatttctttgattttgtggcactgctgagagtgagagcagaaaggtttttggcagtgtgaattatgctgcgacatgattattatttagatccgtttcataggtgcatgcagtcgttttcttattacagcagtgtaaatgtggcacatttttcatgtgacatagtagctttctaatttatgaagccatgtctgtttacttaggagtatatacattcacacacaaagggtgtgtgtgtttattcacctctcctttcattctttggcacaatggacaacttggtgtataggaaaaaagaaacaaatttggtttctatccacttttttttttaaccagtttttcttgtagttattatttaagctttctttatgttccctgtgttaactatttaagtagcattctttctaaacttacaaaccagacacatttgttgctgtgggtgtgtgcatgggtatatgtgtgtgtgtgttctctggagttatgcaaggaagactgttttctttacatatgtgatgatttgcctcattgacaaatttgctctctggttgataaccttcacatccttgtactttttgtatgctcacattttctgggtattatatagagaagcctagaaacactttacatgatgtggtgggatggcatggggttgagatgtgcttctcccctttctgtcctctctggcactctaataattgtgcttttgtttctccaaccacagccgagcctcttgaagccattcttacagatgatgaaccagaccacggcccgttgggagctccagaaggggatcatgacctcctcacctgtgggcagtgccagatgaacttcccattgggggacattcttatttttatcgagcacaaacggaaacaatgcaatggcagcctctgcttagaaaaagctgtggataagccaccttccccttcaccaatcgagatgaaaaaagcatccaatcccgtggaggttggcatccaggtcacgccagaggatgacgattgtttatcaacgtcatctagaggaatttgccccaaacaggaacacatagcaggtaaatgagaagcaaggagaaaagctgtttgcatgttttcttttcattttcagaggtgctgtagccaagcagtaaggagttgtgaagtgctttctctattactctatgtgactgtccatgacagccctgtaatgttaaaataatcatttctgttgcttacgtccagaacacagaaaaataaatattttccacctcactgaatcagatgtaggcaggataggtacacacatcagacaccttctctctggatctgtcgattttggatttcttttcttccccatccccaccttctcattttgaagtattgagctttactacacctagtccagcttccattgtccatttccagccttggtgacgtgtcagaggcaaagtggccatataggcatttgcagttcagccaatgacttgtttgactcagaacatctggccaggcctccttaggggttcagctcgttctcaaggcttccctgaagtagagtgggctggcagggtagttggaggtggtggaaagagttaactgagcttcagggctagccttggatccatattggctgtcagcccggatggggctgtaattaaacacagccccgtggtgggatgacaccatgaccttgactttaagatgccattttcgactggccaggccagagtagagagggcagttgctgaagcgcacagacatgcttactcgaaaagtttaagggcatgttggaaatttcaaaaggttggtttgacaggaacggctgctccctgcagcctgcctcctcagctaaatgataaatgcttctctgtgctctctcttgtctctgatgtggttttgacagatgtatcttgattttgtttgtggtttacacagccacatgtcacccttacaaatgtccagtccagactccactgtttctgctataacacaatgtaaaaattttcttggaaaaatacacacacgtattcaacagccctccctcctttggttaattttagcagggaggcagctaggtgtgtgggtttctcggcagctcaagggaaaaggaattaaaggctagcagtgggacttaaattcccttctctaagtgataaacagtaacactatatagtgaccctcaaaacattttttgcttgagcatgttagacaaaagtcaatgcagattctgtgatgacagacatgccatgcctgttggtggatcgctttcttccatctacctaccacccagctcccgaaaggcaagaggtttgttcagttttaggaaaggtagtgcatatcatgaattgattcactggaacttgtctctccgacctagtttgaccacaaagttgaaccataataggtcagtggtctagaggggattaaatgtcatattatttctcctctccccctctagaatttgatcattaaaaccaaacatggcattttctttctttttttagtgctttctgtgatagcactcagatactttccctttagtgaaatgggaaatctgctgctagggaagctgcatttgtggagtgtatttcttgaatccaccacatttaccttatgtgacatgtaggtgaagattttatctcccctaccccccagcaggatgtgggaatgaccatttccatgtgttgtcttgtgactggaaggaaaatgaacagaagtgtaaggcatgattaatgaagcaagagcaggcggaaggggatttgtcgtcttcggagatccaaagccttgctaaatcaccaaatatggagtaacacttgcgtgatgtaacatcgtatttacatatcgagctgctcgtttaaaagacaaaacacagtgtctgtcaagcaagaattaaaaccacacttcttactgaggtcccaaataggttattcagtcttagattaaccagctcaaaaattctgtgcctctgtatttagaggaggaatctaaatgctggggggaaggccttacatatagttaagacttttactgctatagttgtgaatctatgtagggaaataagagatatttgcttgaactccctggttgtctaaaggttctgttattatttttttaaagaacaagtataatagcagagcctagagaagccaaaaccaaaagcaaatttaaaatatattttatagcgctaataatcaatcatttaactgagacgaaaagctctctaagatgtctaagatattcaatgggcgcacaacaagtgctgtgacccaggtgaggtaaacctttcgtgcatgaataattacaaagtcttgatttctttcattgtgtttaatcacctgttcccaccctggaactggctgaacataaatagtgtggtcacatctcaaagtgagatgtcagtaactagaatcacgacttctcataattcacagtaatgaattaagagtttcctatggtgaagttaacattctaccattgcacataaattccgacgctctggccctcaggtgcccctgaagcgaagttctggaagacggctgtgtgtgtacccccagcccatttctctaaagcacgtctgcacaattccaagtctgcttttctttttatgatgaggaaggaaacaataacagtaatcattcagtagatatttgaattgtgtcacaaaaagaaaggagaagcaatgccttgtattaaggaaagagatatattgatgaatctctagaagaatatgtttggcaaccacataaaaggtagtcatttaagcgtgctgggtaggaaaggctttattaaagtgatgtaagttggatttgagttcactgtgagcctgtactattttataggcaggaagcaagaataaaacagtgacagatcttcttcctaagataaataaagcttagaattcgggactttcagataggagaataaggcagagttctttaaatcttgagtaaaatggtatgcattttcactgtactcaggcctctccaagctgagttttttttttttttttttttttttagacagagttttgctcttgttgcccaggctggagtgcagtggcatgattttggctcactgcaacctctgcctcctaggttcaagcgattctcctgcctcagcctcccaagtagctgggattacaggcgtgtgccactacgcccagctagttttttgtattttcagtagaggcagggtttcaccatgttggccaggctggtcttgaactcctgacctcaggtgatccacctggcttggcctcccaaagtgctgggattacaggcttgagcgaccgcacctggcccaaactgagtattttttagaggattctttttacctggtgaatagatgggtatgtgctcccccacttcatccacgtacacatatgagctgtacacatagatgttaatcaggttgcttttttcattttatttaaatattcaaaatattgtgtgattgtgatccattgagatcattgaagtagtattaatttagctgggaattagcagcttatgttgtgtgggcccagttcatcaatatgtgtgtcaaatatccaccctcagatatcagcagcctttgacttgcagtcagagctttcaataggggttttgttttgttttgttttctttttttttagtctcatattttatgatggggggaaatattcatggaagattactgaatgtgaaactgctgttcccttatagaaaagacccaaacattatcccatcatgtcagatttgaggttttggcttattgcacataggaatctttaaattaggtttgggctgtcataaagttagctttttgagagactagagaaaaaatatgacaagtcctataaaatgtagtaaagtctgctcctgttgatatataacattttttctctttaaaatcatgaacatagacatttatatcagggtatttaaaattatttgcctagacagtatagctggtatttagataatgatatatcagacagatactctaaagaagggagatatagtaattcaaaatggaaatacattagcatgctcttaaaagtaaatcaaatacaatatgcttttcagaatttagaaaatgaacttaccttttctttttgtatccattctgattctctcctagctcagactgaactggaggatgtatttgtgtaccttatggtgtaattgtaaatgagactataaattatagtatgctattatgattacttatttttcttttctctttatttatgtgattctgaataaaaacgactgacttctgaagtgaattttcagcatggcagttaaaacaaaaaaacaccactaccacaaaaaacaatatactggtgaacattttacttaccttcaaaatccagagagtagagaatattgttttctaataagtacctaggattttcatagggagcctatgtttgtgaggccactatccaaagactaatgttcatgaaactgggagtcctatatacaagctgtatttgtaaataagacagagaaaggttgtgaactggcagcttggatgttttgtcaaagtacaatgtcagagaaactctttctaagacaaattgtaaatagaactgtcacagtgattgcatgattgagccgcagaagtgtcctacaattgttggcattgtcaggacttttgaaagcttaattaaacacagtggcccgcatggctgctaaacttactaaggaaagccaaaaggaaaaaaaaaatatatctaaaatgtagaagatcctaaagatcccaaacttcttcagacattacccttgtggtgacacagaaaagatgcattgtgcattttcctagtcatctttataaataatgttttgagaataggtccacgtgatatgaagatcatcctgtgtgtgatgtggagattgtgttagtttttctgtctcctgctgttacagacagttaatgtaaaaatggccttttattggaaacacaaatatgtattcacttcaagaacaggagcagagggggacaaagtttccctcccgttctctgtgtttattctgtgaaagcttaaaaaaacaaaaaaacaaaataaccacacacacacacacacacacacacacacacacacacacacacacaaaaccagtgctgtaatttcttaaatcaccccattccttgttgtgttgcaagttgtgcctttactataaaggatctgaaatatgttttgcacacctttctcttagtgaatgtggcatataattgtggagctgcacatgggctggaaaatgcaactgggtgtagaaacgtgcaggcagggtcaggacaggcaaccttcagctcagggaggaggcgagttggatgcttattaatggcatcttttagagtcctggaaaatcattaatttcacactgcagcttccatgtagtttggctaatgtgggagtactaaattggggtacataaaaaacatgcaaatcctagggaaacattttttagatttttgtgatttctcaatgaaaatgtttaataaaggagaataggtgaatggtggctttgcgtgctggtcagtaagaaaggaaacaaattttggctttcctttggggggaaatattaaatttaaccgaagtagaaagcacagctagggagatgcaccaagattgcgtcactggatgttaatttaatctactttggttggtctgttcacaccctttattgcacaaagaagtcatttgacaaaatttaccccaagcccaagtctgtttttacatacagtagtaccagctttgtgcaataaaaagcacttagcatcaagctggacccagcctggcaccttgccacttttttagcatgagatttaatcaccaagcatctttagtacctttctgcttgttcagatttcatttgggtcatggctatgtcagcagtgttgttatttcaaggattaaaaaaaaagattctaacttagagcccacttttaacattatttcaaatcaagcaggtttttatgttatgtatcaatttggatgacattaatgaagttcataaaatatgttcagactatataatttaatggataatgactactatttttatttgtaatacaaataggaaattgactgttgtctccctccctccttggttcttttctcctacctaggtaaatgggcatccttaaacagcttctcccctttacgaccagggtatagagcactggccaatatcagtaaatttacctttgtaatttgccacgtagtttttacaacatgacctaattaatttgagcacgaaccatattattgctactggagtcattttctgtcacaaacttaatttccaggaaatgtaacctgacaaataagaattctttagctctctacatgtgctcctagagaccaaaggcagatttaaaataataataattttaaaagtgccagcattattaaagccagtatacttgatgccaaactcaatttgaagccagtaaacatcagactgtatttctaatcagttttaaaatgtaacttattccatattgggttcattggaatttgtctccctgctttttactggccagctgcactccctatgcatttttaaaacatttcagcaaaggcttttgctgttcttagcagggttagtaacttggggtctatttctgagctcattcgtcattctgcaatggcattgagttaggttggcaagggaaggatttgaggcatggggggtggtgaggtcacttctgatcccagcagggaataggtgagcttcatttgcctttacaataggcgcacagttactgcaccttggaggagctctcaggtgccgctcagatgggcgcatgtaaatgccctgtcagatgcggagctggaatattaatgcttcttccaccaccacaccataataaagctgtacacagcaagcttaatatgcagctagtctggggaattgtataaacttagatagcccagtgtgaaagacagcaatggaaaaatgctcgatatgccacagtttccattcttgttctcctttgatctatagcgaaatgaaaacatcatccttttcttctcttggagttgtctccccaactctgccacctcccaattcaccaccagaatttttttgcatgtgctggtatggagaaatgcaacataatttgtttcatatggttaattacaggcgtttgaatatttaaaattttaaatagccacagttccagcttttcccgttaaaagtatgtgatttgaacaaagggagtacagtgtaaatatttgtggtgatttgcaacacccctctttccccattacacacacacacacacacacacacacacacacacacacacagagagagagagagagagacattcagtttaaatctagtactgatctaaaggacttctgtaccttcatttgtactttttttaaaaaacaactttcaactggaattccattaaaatatttcaccattatatttttgagtccacattgcttgaggttttaaagaagatttttataatgtgttcctttaacagaatcaacagctgtcagaagcagttgtggtagatccacaaaacgtataaagaaaaatacacgtttcctgaaacaaaacacttggaaaaataagctgctaagaactggcgaattagaagtttgcagacagggaactgaagtgtcatctcttggttcaccctggagactgatgtgagtggatctgatgcaatgctgctggaagatttacctgcacaggttgctcctctaaggcaacgcgcagtgcacgattgacgtatgcaccagagctaggctgggcctcagctcgctccatcttttgccctttttgatctctttagatagataaaataccaagttctcagagtgctaaacaacaaattatatatacctaaaggtgagatgatcaggtttaaacttcctgtaaaagaggcgagaaggcgccttgcacacccttttccagatagggctggcagcatgttattcagaactgaatcagtctctgccagagaattcccagtgggaacctggagcaggtatgttgatgaaggggatacctggggacctttggtcactcacaatgagtttttgtttgtattctcactgttgttagcattgccaatgaacaattgcacctacaatttgattttagttttagatagaggcgaatccactgattaaaaactcccattaaaataaagaatggaattattgtgaaacctgcaagggtgccttcaaaaagaaaaccagtgctgttgtatacctacctcgcctttctatttgctttttgaactttctaaaaaacacaaggaagctttttgctaagcatcagggcatttaaatttatattcatcagttgttcattttcttaatatgtaatgatgcataaaaaggctgcaaggaaatcacatctgttaatttttagggaaataaagtgtagcttggattcttatgttggagcacaaagcactatgtgccaagtctgttcctgtacattttaaatatagagttttaatatttggccaatccctgcacctcctcaaacaaaaacaaacctcaaaaaactaagagaaccaaacctgaagtattctccttcaccaactcaaggtataccatgattttatgatttatttacatttaggggggaacccctcagtgaaccatttactccccattttaactcccctgccccgatcctttcagtttccagttaaaacaatgcattaaccaatgttaaatcttaaatctcgtgagtttctctccatcacaccctaatattttaaaaaaattattcctttacatttaaaactgaacattggctactgaagaatgatttaaaggctgaaaaaaattttaataataaatcgtaaccttctcatgttatgtttttgttaaggagaaaaaaatcaataaggaaaaatttaattctgataaagatactcttggatctttgaaaacaactgctgtccttttaactaaaacatttgagcagcttcaaagactatgtatttcttctgatcttggagctgtgtgactggtagcaagaaagaaaaaaaatcttattctacatacaagtggattgcttaacaagtcagcacagacacgtacttgtttgtacaatagagataaaaattcctgtataaaaataattcagctgctgacagcaggcattgttgttggacctgtcttttgtgcttgtcccagctctgggtccccctcccctcctatctgcttggggcagcctgctgcctgcacactgctgaccagaagttaattgctatatattaagtatataggtattgtatttaaagaggaatatctcaaggcttcctatatgcattccactttactttctgatgtgattgcggtgttgccagcaggggggtggcaggcaaacgctctaatagggaaaatcacttgaaggcagttaggggaaatttggccttcaagtcccatttgctctgtagtgtagcattggtttctaaacttttgtttttaatctaattctgatttgccctgtcacatcccatatcaaccctcattgaactctactcatgtagagtaacattagtgtcaaacggaattggtcaggactgtggacctgtggctcatacagatggttgtggatgtgggttccatgcagctctgcatcctatcctttctaataaatgttaaaatgtggcacatttctgagcagggcccaaggataagagagttaagaaatcagggggtagtacctgagatttttctcccttctctttccgatttccttgataacatccacatttccggtaagatcaactctaggagaaagtctgaggctgggggagagagggggagaagggtgcggagagaggttcttggaatattcttcgatagcagttcaaatgaaatccccacagcagagagcttttgggtctagcagtggagcggtaagctgggacacgtggcctttcgaagctgttattctcagtctgacttgcacaccagctgagataggacttaacatatactttcttgctttcacctgggttggagaggttggggttgggaggaagaggaggagttcattgggaattctgtcactagaattttttaaatgtcaggaggttagcaaggtgtgagttagcattcaagcaaaggattcttctccagactagtaattggaaagcctgcaaatccaggttcccacgatactctctaataactggggtgggatggtggtggtgggtggacaccacaactttctgaatgtcagctgatgtctgcatgacccgttcaccatggattaaatgcggctggtgccgaatggaggaaatcagaaaggcaaatctcaagcaacaggatttgcactcctcagaagtaaaccagaccttgctcctctccctcctgtgcttctcctttcttgctggtttccctttggaagcagaaacttctaaaattaatgccactccaagccaatgaaaaagctgtttttataccacagtggatgtttacacaggagagacaacttgagggggaaaaggctttttggaagggtggagggactcgtgttaatctgttctgttggaggactatgcagtattgcctatgagcgactctgggctgtttttgataaattaccatgtttagagataggtttggctcttaagggcttagttttatgaacaaagtccgtgacgatgtttgcagcctctgtttgtctcttagcccctttggcttgactagaagctctatgtttagtttaagctcagtctggaagatattacaattttgcattaaaaaaatgaggaaatcataggaagaaaaaccctttgctttttggatgaatcttactgataatttgctaaagctcatttgaattttaagcacttctttaatcttcaaaggctaaattgctttatgaatatgcatggtgtgggcagacttcagttcattacctagttgtaaattctaatgaccattaggtccttccagtaattgcgaattgttttgcatttttgattggcctattaacatgtacattcggtgcacatcaggctggcctgtcagcctgctgaaggagaaaaaaaaggtgaaaattgtttatagcaccaagattcttagattttcaatcttgcaaaattgatgatgtaaaaaaattaaagcagtgttttttcttctcaagattaaaagttcaccaagagatttgacatatttaatttacatgatgactttgcactccttcattaatgtaatttgcatatgaagctgttgttaatcacttttgatcatgttttgtgtattagctgcctcagtggctctcctcctcagatgccccagtagaaaggagcaaaatgatgcatcttcttgccaagtttcctttagtgaattgaggaattagaagtctaaccttgagtaattacatatgttttatccgttttcttttaacgttaagtacagtttgtgaacgtgttggctggaaatcgttctcatttggggagaagactgtaaaatttaagtatatgattgaggcacttccagatacatagagaaatatgtattgcctgtttctgttccccacgaacattgcagggcagttttattgttagcagtttgatggcaggaagccttggctattatagtgtattaagacatcaggttcctcctttggaggagggaaggctacagaactacaaacctttctaacaatgctttaggtttcttctttagatagatggctggcacctaaaggacttgggcctgggtttggctgactcttttatcttttagatcaagtaagttttctcattcagctgctgctctgagctacaatgtgtcctcccctcatcaccaaagtatatcctggtctccaggctccctgggctcccagtgtctccctcaaggtacacgagtgccctggtggtgaaaacaaggtgctaactaacggtttccgatttttgagagcctgtgattttggtgtttgcctttgctgttgaataacctgtgctgtattattgatgttcatctttggtttatgagtttatcactggttaacaagcagaatcagaacagtgtaactgatattctgattaaaacgaatgtttaatgaaagaaaataaattgtgatggaaaatgaacagtgtgtaagaaacataactataattttaacctccgagggacctagcactgccctaccgtgacttccatccataccatgctaaaagcatgcttcagtttaaagttgttaatattcagctgggaaacagtatccagaacacaaataaattattaagtgcatgaactttttaggcagtaagatgaactgatggggtccatctgtgagatccaggggctttttatttgtgtgtgtcgagcgattctgccctctccgacttcacagcctttggtctccggccaactgcatgcataattgattccacacgcactatcattttcttgatgtaattgctttactaagatatgatgaaatctaatggataatttgctatttgaaaatggtcaaaaaaaatcttcatactttatgtggggctgagtgggcagtggagaaaggggtattcagctgacctggtatttaagaaaacaaaacaagcaacactaacttatgcatgctgcttcagtcgcgttggctgtggataggaaggtctttgtgacatatggaagccagtgtataaatctctctccttctatcttgcatcacccccttcattccttctctctttctctcctctctctctcccccaaactttacaagaaagggatcctaacaaggtaaaaagtaaacaatttagtcatcacaagccttattattcagtctatccaggagttttgccatgtcggtttatttaacttccaggaatgtaaacactgacacagccctagaagcagcaagaaagattacagtattagagttaaaaacgtgagcatggaggagctgtgctttatactctgctataataacactttacattgaaacataatggtaagtcaaaagtgactggaaacttctgcttatatggagtacaaatttcattctaatagattggcataatctagtgtacccagggtagattgttatataatggagaaactgtataaatgtcaagtacacaaataattctacaggaagtaaataaaaagtattagaatttcttaagtcaccattaaattttgttggtgggacaatctcattagctccttcaaaatcatgtggctttgcataagtcttttgaaaatgtattttcagggaatttacagatggtgaaacattgttttaatccaaaccagttaatgctttaaatctacctttaaaaaaattgtactgtttttcgaagtacttaaagggagtggaggggtagaaagcatataagtgaatccatctcactgtggcaaactgtttttcaagtaaagtcataataatgaacaacacatgatctgaaatttgatcagcaaacatatacttatgccaaggaattttctttttttctttccttttttttctttttcgccattcacataccaaggttctgtaaatcagtaaaccaggcagagagtaactattgtaagggggaaaccaaatcataatacccagagtggcccagaagctgtctttctgaagaaacattaacgccaccaccaccaaaaaaagaaaaacaaaaaaacaaaaaacaaagcaaaacaaaacaaaacctttttaaaaaactggaaatgacagaatagttttaaaaggaaaaaaaaaaaaacccaaaaaccaaaaagcaacaaccaccttctgacgctcaaaacttcaaactattaatagaccaccagtgagatagactgtctttgtgccttgaaatgcaaaatgagggaaataattagcagaggaacaaaattctcaaaatttgaagaacttctgtgattactgggggtacagtgaaaagaaaatgcaaatttcttcctgatcttaattagattcgattgtgcggtgggtgtgttggatttggggggaggggcagaggcagggagtgctggggtgaggcgtgaggctgagtgttgtggagacaggttagcaggggcccggcggtgtggcaggaacaaaggcagcttccaacgctggtgcaggattccgagccttaacccagatgctcatggtgccctagtcttgagttcttcatttaggtgggcttatttcccactgggtctgggggatttcatttgtcctttgaggggcagggtggacactgacagaacagctgcggccggcagagagggtggttaggaagagggaagcagcctgtgggtaacttcccgaccacatggaaaggctgaataagacgttatggaccctgccttgggtactggggtcagcgtctcctggtggtgtctgcacagggccccccaatgccagggcactgccaaaacacgctcttgagtttaatggtagtggttggtctgagtcctgccaaagtgtatggagcaagtttcattggctggactttccccttgcatgaaataataaaagccctggccaaggcttatgaatctatttttgtttcattaatattatttattatgtattttattaatattttttggagggaccttgctctcatttgaccatttgtagttataattaatgcattccgtactggttgtaaaaagtgtgcttgcatttaattgcaagtcagggtaaattaatggatatgatttaaaacaaaactcacttaaaatattcttgcagaacgcaaaggagggggcagtcccagtatttaatttattttctggtttagtgttagtgtgagagggtcgaaaagattctgtgggtccaacgggatttgtgtctgtgtgtgcaggaccgtcgggcaacacagagggaggagaaaaacctggaccggagtagggtagccaggagctctttttttttttttctctaatttctgaggttgccaggaggggcttaagcaaagtggtcaagtccatctgctccggagaaggtggtaaagaaaagaggttagtggcaagagggaaggagcacaaagggaaaattgtacattgggagcgttactctccctggccatggtgtagccagactggtttagcagacagaatgatagattgttttgtcaggggtcccagggtgcgccctgaacttgaagcactttgtttatcttgaatagaaagggaaaagcgcagacataatcgatgtctagtttttaggagctcgaaagaggtaggagaacagagaagactcaggaggggtagtgggaggtgggggaggtgcaggccctggttgtggttgtccattaacagatgaacttggccgagggccaggctttagatgagagcgtgtcagggccccagtgcagccaagccttttcagtgttttttttttcctttttctttctttcttttttaaatacctgctgactgtacatcaaatgctccctggtcttttggctaaaggcaaaaaaataaaaaataaaaaaaaaaagagacgcacagctcaattttttccctcctctgaaccagttgaggccagtcttttggctacatatgcgggttctatcatctttcctggcttgccgttgggaaaaaaagttgtgataacgccagtaacccgagggccagatgggaagggtttggttgtgttcaggcgaccaggtgtgagagctcgtggtgcagtggggtggggcgtggccggcgtgcctgcgtgtgcaggtaagaaatcagtggaaactctttttttttttttttttttaaatggctgaagtttaacttgttggaagggcctgtgaattaagctgtcagtggctgagaacgataatatgcaaggaaggctcaaggaaggctcaagaaaggccaggggtggggaaaaggtgctcttgttagaggcgcagcctttcctgggcaggacccaggaccgatggcaaacccatgtgtttgggcttgttttgttctcgattttcttatcttcttggcctcttcctgtgttttttagtttattgtgacattatgcattcatatatgaatgttggcaagcaggagtcatcatcccaataacttcctgacatttttagctcttttaatgtgcagtctttgccctcctgccacaagtggcgaagtaattgaatttccctgttactaactggcaggaggcatgttctagttcccaccagaggagctgctggggctaaagctgggttcatagaatcccacctaggggacaccagggctttcaagtggtttggggacctgtctgaaatgatattcacacaataaaaaatatttttcccatcatagacttgaaaaggcaccattgtgcacatctatataaaatgtgataaaatcacatttacttcccctggctaggcctcataagggaggcaggatttccttctccttttctagtagcaaataaaaactgggaaaatttgggggcctctgggtttatcccatggatacctgcccccgctcccgcccgccaactcagccaagcccttagaggcagtcttctctcccacctagatgtctttgtaacctgagctggtaagaaagggaggagggacagaaagaggggaaatatgcccttgacatatgatgtatcttctttcttttcttcttctctttgattacacgaaataaaatggtttaggctgagggtaaagaagtaataccatttctagttgtgcaaccttgggcagatttcattccctaagcctccgcttcctcaatctgtaaagtggggggaatcacggggcttgcctcatagggcctttgagcatcctatgagagcatgtgggggcgctgggctcagtgctgggcacatggtaaaacatgtcacaaaagctcattactattacggttatgactcatggcttggaactgtgtgctcctggggtctcaaagtagttcccccattatggggtgagcaggttgggatgagagaagagcagggcaggtgggggtctaaagagctcagggtctcattatgtttctggtggcagctccctcgtgggtgggagtcccctctccccatagacgtgtgttgccttacgagaggcttgtgcctgcctgggtgtgtgacacagttactctgggttcagatttctatgttactgctagctggttgggagagtctgagggaatcatttcacctctctgtgaaatggagataactcaaggtcccttacctcatagagtccatgtgagaagtaaatgagggaaagcacagacattactcgctccgggggctgcacctccagaattgctgttgtcattattaccatgtgtctgacacattgatattccatcccacaacaacctcggaaaggaaacactcccattagcctcatttggtagaggaggaaattggggttcatcaagggttaaatgacttccctgagggtccacagttgttcaatcctttggcctgcggccgccaccctctgctacctcttcagtacgtttgcagctttcttcagcggtgccaggcaacaactgggcaggaagctctggtgctggacagttgtccctcccatgggttctgtggtcaagtttttcaatcttctgggaaagagaagaatgttcccctccagttctgggcatattgaaggagcacggagctgttgggaaaagttgcaatgtaaggaatcctgctttgcaagtagtcatttccccatctgtccagaatgagcctgaaatcaagtgagggtcctgagaaacagagggaggaggttttactgtttgtgtgtggcttggtcaggagactgcagtgggctgaatgagaaactaagctcggacttttaagaagtggtgaggcttggcctgcagcagttctgtgtgttgtctctgtggcatttacttctcggatcgtaccttcaaaggctggggagaatcagaattatacagggagggagagactgagtgtgagtgagtgtgcgtggcagtggtgtttcttaggacgatgggttctggggggtcataatctgcttcgaggaggttttcatttctggctgaacaaggctgtggtaaggcaagtccggaaggcatgctggaaacttgagggaagttttgaatggaaactgcagtcaacagctccatatgatccgcatgtggcttccccagaggcaagttttcagctgcgtggtggcctctcccagtcactccacaggctgccctgacgctattaatatttgctgaagcaagacctgaggttcgttgcagatggattacacaatgtattccaaaaccaaatgttactgttttcctgtattctccatcctttcaaattggccaggctaacatagacctccactgagagaatttcagaatcatttggtagttgagaagcgcctacttcatgcggaggccccgtgggaggagtggaagagttggcctcagcactggcgagtatcggatgggagctctgctcacttggtaagtccttctgctagaaccaagggaggctgttcagatccatcacaaagaagttgtcggtcacatccaggttgtcttctgagtttgaggtgggatggaggtggctgctgagaatccatgtgggtcaagagctccaaagcttcacttttacttcgcactctgtcccggggcatggacgtcctcaatggaggtcatgcaagcccttccccctcaccccttctcttggccctcttcattgtctctacatacccttgggtcaagagtgtagtggttctcccttgtcaccctggaagagaagctcttagttttatttgctgggtctcctagactgaaatgataaagctgaaatgataaaaggcgtatcatggctttagaacccttcttatttccctcgctcgcaccccctagttttccttctcttcccttgaaaatcagtgaaaatcaggccacatctctgatgatggccttttgtttctttttctttttctgtttctgccttcgttaggtaagcacaaatttgatgtcccaagaggcaggccggtgacccttcaggccaagtgcctggatgtggcaaagctacaataaatatcgaatggtgagagcaatggaaatttagcaaagccataaccggggagacctcagaggggcagtggactggttaagaggctgttggatgagccgggtagtatttctacttcaacctgattgaaatgtcgactaaaaatcaatgctgttgactagtgataatttacaacgttcctggtgctaagtagttccccgcttaagaatgcgttggctgggcagagattagcgcagggagttgtgtgtgtcacaatgaatcagacgcattataggtcagccctttatttgtttcatcatgacttttacacagttgtcatgtaatttatggctgctttcacgttgtcaaacattttcattgcatcttcttctttaacaccctcctgacatagacacactgcacttgaaggcttggtattgtttcataatccgagaggaggcctataaaccatcaaattacactatctttgggctaatctaaatgcgctgcagattaaaatcagagctcatttgtccctgatgcaaattattaagttctaattataaatacccatttaattacccgacacatttttattttgcggacccttttgagcactgctgtctgcgatgcagagcgggtggggggagatgcataggagacaatctgcagtaattaatgtacacttcccaaatggtaaaggataaacatatgctgctttgtttgtcttatttatttattgattagatgtatagagactttggcgtgggcacaatctgaagttgaaatccttttaaagatgaaaactatttaaaaatcttttggggaagaaagagcaaaatatagccaaccaatagctttctgctagaacacatcatcccaaaatatgggattctgaatttgatcaaatcaccagtttctgaatttgatcaaatctagattttgcagaagttcagggtgagagaaaccatgcctgttttatatctagaaagtgaaatcattgttatagaaaaaacctactgtggttagaaaaaaaccacattcttttttcccagccctgctgccatcctctaccagaaaataacagtatctgcctgtagtatgaagaccttccaattgagagcattatgataaactatttttgattaccaaacacgaatgaaggaagaagataacataaaaattagtaaaggccttccaagtagacatttacccttctgtgaaagccatggagaaattaccaagactggtttggggggagggcatttaaggtcttttgggcattacagattttccagaaccaaactttgacttttagtgttaacagagagacactgatctgaaaaccaggacacctgggttctgacccttattgtatcatgctgtgagattttgggctcccttcacctgttagcatttgtttccttgtcttgtaaagtaggtaaaatagatagtttggactgggtgggtctctaagtccccatgatgttctagcatagtatgaacaccactgaccagttttctccctgctattttttggaatctagttgctgaatggggctcacctgcaaagacagcagaatattattttcttgatttgcctcaaagatggaagctatggtggagattaaggcttggattcgtgattccccaacagaaagcttaaaggcatctttcaaattgctggaagcaaaattgaagtgcagtataatggaatggtgataattcacagaagtttccagccttataagatttctccatcttttaattgttgcaagctgttttttttgaaaaactccaaagaatgtaatgtgtattttctccaagtttgcttttttgggcaaatgtaactacatcaaaatagaagtacgtttttgaaaaagaaatagttgaattcaaacaaccaggtattttaaattcaattaactgactgaattcagtgatattttcctccttcctcctcccaaaagctggtttctctgtatggacatagcctacatatgctgagtccctggagttaggaatttttgcttgttaaaggcatccgatgcaacatgtttagaagaactctccctctgttagtgttgaagacagcataaattgagggaaaatgttctttttttattcatcatgtaggtaaaagcatatggcctgttctgggacatgcgatctttgcaatccattttttaaacttggtgtttaccattggcttttagcacggatgtttctgttttccacactgtccagcaaataccatttatatgtggcattgaatgagatatgaaatgttttcagaagcatgctgaaaaagggcattcaaagttatcctttggataatgatgatctaaaactttcttttattatcccatgtgctcagagtaaggggcaaatgaatcagttgtgaaatatgtgttccttgtaggacacaggcactcttgagatctatagcttcaataaaaaggtaatttatttaaattactgcctctttaatttataatgttttggggatttttaataggcatgctctgtaagggcactggtaatcagctgtttctgattttgcatgctcttctatctctggtaacaaaataaaatcttaaaaaacaagaaaaaagaaaaaaaaacaaaaacaaaaacaaggaacataaagtttagccctaacccaacccaaaagcaaataacaggccgaatgaatggcagccccccagaggctctactttccccttccattattacctgaaataaaagcatgataacattcatgccagagataggtgacaaaattatgtattcagacatgaagtttaggatttcatagcccaatgttctctcttctcccccacctcttattgtgttgtgcaaatgtatcagccgttgtattgttaatgcatgataggaagctgccgctaggacagtcttggctcactaatgcggtcagctgtgtcacaatgtgatatatagattatatttaccatggcatattttgtttgcgaaatgggagcggatgataaatgaagataccctccagttttcacactagttcctgtggtccggagtctctcaaacaataaagcacccctgataatggagaggtatttatgggaacataattgacttcaaagttttagatctctggctgaagtttaagatgggatagtccattacattaatgtctgtgcttaaagctcctatttggcttaaataaattatttagggtttactgcttaaaccttggtcaattcttgaacgtttgggctagttaagtaattttccagtgactttctgtgccttggtgattcatttacttgattgagctcctgtgtgctcgtatgatttctaaatgtatttctcaagttttgcctggcaatgaatgattttgcttactggagtcttgtgtggtacacctataaaaggcttattaactctttttgaaaaaaaaaaaaatccccaaacacatcaacactgtcatcataagataaagcatatatacatatgcatctatatacacacatacatatgtacatactacatatatacatacgtatatgcatgtatgaatatatatatagttgtgtgcctgtgtgtgtgtagaaagggagagagagagaataggaaagtctttagaattcaccatgattccatcaaatcaatatagaagtttttgaaagctgtccatgtagaaaccacttttcatcaaaatctgacttaagcaaattatctccatactatttatctgaaagtctgttgttcacatagcgctggattgaggatcatagtggcaaatttaggagcaacagtcccaagcaggaatcctggatggcaggctgtcctttgtgcctcccctgagttgagaagactggtgtttattctttctctaggttgcaacacgtgttgccttgaaatctcccttctttacggttctgccatgagtgtattttctgtgacctgcctctgcatctggttaaatggacttcagtaatctgtacacagttacttcttacttattttatatcctgaaagatattaagtccaacaagcttttacccacagagtctacagagaaaacggccaggcaatttttgtttcaatctctgtgtctctctggagcactagttccagaggctgatcaataggttttattgtagacctcactgtctctaaaagcattttgaccttatcctgtctaaaaatagtatttgctcttgcctgcagaaccttgacctgtgaaaacccatttggaacataactgacatatctagtcagctgtatatccaagacatgctctgtgaatgaattctgtgcagaaccgtccaggagaacactttcttccaagacaaatgaattccagttctgaacactgggagtgcacctgcttgtcggatgtggtgatgggccacatggtggggagtgagggagactcagggcctgtggggcagtcgatgtgggaggactgtcacagagactctcagagggtgcattcagccctgaacagggcaaaggactgcaaggggcaggagcttgggctgacatgcaaggtggctttacacaaggccctttttagagagtgtgattctctgaagcttttcttggcagcttcagtcttgaacctcactggaagggatcctccaaaacatgacccagatggaaagaagtatttctgagtttaaaataactcccctatttggtaatacgggactttatttgtgactttattatttttaggtgtgataatggttttgcagttgtatttaaaagaaaaaaaacgagttcctatgtttaaaaaatacatacagaggtgtttactgatgaaatgatatgacgtctgggatcaacttaaataataaaatgggctagggaggcgatagggttacagaagacaagaatgactgtgagctgtggtggttggagctggaagatgtggacttggggactgatttataacattctctctacttttgtagtatttgagatttttccagaaaataaaggtattgcctgactggtggagagcagtatggccttgtttagtcggtgttgtttcttcaccaagggtttggctcagaggtagcaaggggacaagtgtcctatgggcaagaaagtacctgtgagctcaagtcttgtgtctgggaagttcattgtgaaggggtcatttcagggtctgtactgtgcactgtcccccattctcctggaagaacagagatcccttgtctttttcagtgcatgaggcagagtcagatgtggcgtttgcttgagtttcagcacaggtgcctctgtgcctcgtggtgggggtcaggaagaagcagctgggacgtgctcacgtggctggtagtgttatgaagacaaggctttgggacctttctttggccatttgagccctggctattagagaaagatgatttgcctgagaggagattgaccacactctcagaaagaaggggacaaagaacacgtcaagggttaagcagccttccccttaagggaggactggggcacaagatggaagatgaaagggagcagagtggcaattgcagagctggaaaggggaattttgttcttctagatagcaaaagccaggactgtcgctgtgtgacttgaaagctaggtcactggtgggcttcgtgcagcccgtcacaggggagccatggtgggcctcgtctctgccgtatctgctgcctggaagctgagactggcctaaccacatcacaccattcccagacccaggcccaggcccaggcccgggtccctctggttttacaaaatgtccgctctctctcgcttcacacagaggctattattagcaagtgtcactcagttatctgagagtggcgcttttagctgccatctaagtgcctgatacttgggtttacagcagattaaattaaattttaggctggtttggcttcactggcagtagacaatggaaggcagctgttgtagaaatgtaacctggcaccctcaaggatttgtgtgagtgtgtgtgtgtgtgtgtgtgtgagtgtgtgtgtgtgtgtgtgtgtgtgtgtgtgtgctgaccactaggctacacttccttttcctttcctctccatttcatccctttccaaaaagtgtttagacaaatagtttcccagacttggttttatcatgctgggttgacaaaggttgtgtacagagctggaataattttttcttctttctactgttggcacatcaatatctttttttctgcaaagaaggggctaagcttgcacgaaaacaccggtgggaacccactggagaagggcatgggtggtttttggttcggttggtggctgatctgatgggtggtataggcagaatgtctggctgccccttcagattcctgtagattccgtaggcgaccaacatggggtgggggtgggggactgtctgctctttttgatgcaaatatcttcactctccttggtgcttctgtggttgtgcctatgaatttaggaccttatgcctcatagtgttgagtcagagcaaagcagtttacatcaaaggccacttatttaattttcctcagaaaactctgtgaggataatttctccttcttataaacggaatgcgaatgtgtacacaaatgtgtacattatcccaccgaagggtgatgctctttacttttataatctagattttaaaaaatttggtggcacttgatttcaggtcctcagactccagaatttatactcactgattagtaatgcattatgcaaataattcagtttacatatccaaatactgttttgcatcattcacacctcatgtcttgaaaaaaaaagtgaaatgtttcctcaaaataaacaaaacctgcagaagagtttattgtaagggtgaaaattaaagaggaacccatttgcctgggaacttttgaggaaaattttaatactcctgcataaataattttgcaattatttttgattcctacctaatcaatataccttgccacgcaaggtatattctattatctttggctttctgaatttttcaattttcagaaaaagaagccataatactatatcatacacacatttgtgcataaatacacaggcataaatgaaaatttaggccgaattatttgaagaggatacaataattgcttgccagtgacatgattctcctgccagagagaggggagaataactaggtgcaaacttttaacactccaagtctagagagaattatccaagcatagccatgaattcctgagttatggattggcaaatgacaatgcctatgaaaacgatctctttgtcttcactgagttttctttgtcattggagtaatttaggagaatacaggatgtgactgggagccctttctgaataagcacagtcccatgcccacgtgaattcctaaaccagtggctcccagctgcatgtgtcagaacagaactggcctcagaaatctacaagattccagtggttccagcctcactttctccagtggtcaacttactgctgttgcaaagcacgtcagatttcaggagcgatttctcttgtaaggaaagaaggcaggcaggcaggcaggcaggcaggcaggcaggcaggcaggcaagtgaggaccttattttttctctgcagcatgagtgcagtcacctttttcctacgatgttccacacccatctctccttacaggttatagacacatttttggcactgcataaagtaagcgttccaacatgtttttaatctttaactttcacatcattaaaaagctgatgtactgactttcagctgcctggagatagttcagggcccagcacctgacaggtgtaatgttctgtgttttatgtctctcaatatggaggttatagaatcaaaaagaccgcaaaatgccttaaaggtgttgatacccatagacagagcatgcatagtcctcaggttccctttcttgccccgctttcacacctatttctttttttgtagcgcctgtatttgaaaggggttcctggtgtacttgggagaaaagaagcttcttggtttggtagtacctaccagagactccctgtttcctgctggtatcaggattgaaaaatcccacttctgtccattttctctcaagagttgagagatgtgtgccatcgctctttaaaagaaggaactctccttttgctgtggattgtagggagcagatttggtgcttactgtggcttcaggacccaccttgaatgacagaatgtcagtaacaagcagccccaggaaatacggctggtggtgaacgactgcctcttgatctttgcccatcgagcaacaccatgtggatggtgtccatccagcttgacctgaacttgaacagtaattgatgagtccttaaaatccacgcccggcccccaggaatgccttggggcaccccatcccacgttctgattctggatggacttttaagtgaactctgatgatgagtaggctcttaaaactctttctcaacgttctctgctgggtttgtgtgtcacctcccatgccctctctggtgtgtggtgattctcagatctagagcaatgcttcctgccttgtccccccatgcctttgcgtgtgggaagctaaaattcacatgtgcgatgccctcccatgtgccatttttacctggtcccttctgctcactctttattcatatttaaatgcaggtgagttggaatgtcatcttacaggcataatcctgaatctgctctatcgcagacattttaaaactaaattaaatgttagtactaagtagtagccaaattctctgagtctgcttcatgacaggctgtaacacactggtatggaacggtaggtctaatcctgtgactcctttatctatgatgttttatgtattatgagagctcagcagatgttgacagagggaatgagacaagatgattttaggtctaggtttgatagataaaaaactgggccaaattttatattttctttgaaaagatagctaaatctcagcaattattttattttatttattaagctttttgtagagacagggttttgctatgttgcccaggctggtcttgaactcctagcttcaagcaatcttccctctgtggccttccaaatttctgagattataggcataagcaaatgcctctggccttcaagtaattaatttaaagtcttttaaaaattttctctcctcccctaaaattgggttttagagtaaggttcttgttcctctagtcgacaagagtttctgaggaatcatagaagaaagcacagctctttgagcatagatagtttccttcgtggaaagccaaagtgaatacttattgagcatcttctatgtagacatagacttgtgaagtcatatcattaaccctgtcattttacagatgagaaaggttgaggctaagaggggagtgagtgccagagtctacttgctaggcagtggtagacttggcccagagcctggggcttcccactttcattcctggctgactgtaccaatcgcacatggcctctccatggccagcaggagccagaggtggcccgcatgtgctttgcagaggaacttgcacccacgcttttatcggtgatggctggaatgcttttcttaactggagctttgttgaagagcctggtgcttttgtggcagtgctaacctggggagcccatggtaaaacccaagcaacaaaaccaccacccaatcacctgtgctgttgcagagaatggtcctttgccctttcttcttgccttgttcctttccctgttttctctgccctttttcggggctggtcttcctaccacctttcctgctagggctcccaaagtgtggcccttctggggtttacatggtgtgcccagggaatagcttggcttttttattcagataactggagataatggagtagatggagttggggtggtgaaggaacgtgtaccctctcaggggcagatggccctccagaattggccagcccaacctcttcctcaccaccctagttctatttttaaagacacctctcaatcgcaggaaatccttccttttgtctaccttcgatcccttatgcttcattttaaacccatttcctcttcattccagagacgacaaagtatctcatcaccagctttgggctgaaatgcttcatattttacattcttcattccattctccgccacttcttcttcctaaataatctctttcctgaacctgaactcatggatctattatcttgtaacccatttattgtttctatgcctctctttagaatctgctggttttccagctcttttactcaaacattagtctgataactacagagtccaatggcaagatatcttagtgttttccacattctttagtcttatgtctgcactcttatgtcctgcttgcttttttaaaaaccagtgcttcattgatgactcatgctcagcttggtgtccactaggaatgctagatctttgtcagccatctttgagggcagttaaactttcactcccagttgtcctgatgccacatttctcccatcccaggtgcccctctctgtccttgtccatattgagcttagctctccactcctgacacgagttccctgacttcctctccacttccccggatgacggtgagttacgatcttgtctcctaaggtgccccctccctcttggctcctctcccagtgacgacttcatggaggctgagaaatatagtgagtggcctttcttgcctcacttactgctcggtaagttagctcagggggagagctgttcataactttgcactgacatctggagaacaaaggttttggaagagcggagcccagattccctgtgagccagcagagccaagtcttttttgagtttccagcaaaacctgtgttttaataataggagtgggtcattgtgtttaatagtacaacaaaacctaagtgcacataataagcacatcttttctgtgtgctggggtgaggagaggtgacagtgagtgtgtaggatgatatgaaaagcattacagacatgggaaagcatcttagagcacccaaagctggcatgagtcatcacaggcttatggccacaaggctagattttcaatccctgcttccctttttcataacccagttcaatgaagacataattgaagtggtgagaagaggggccaccgcccttcagactccagggtatttgtattccaggacccctccgtgggtgttggcccagcggtgcccagagaatattcccttattggatctttctcgaattgacttgttcacttcctgttcagcgcagcctggtggtgactcggtaatccccacagtaagacctcacagtgggttgagtggcctgggagctcaagtcaggggcagaaatggggaagctggaaagttgggtgatcaagagtcatttggaagcccccatgtctgtgtcagtccactcacatctctgtccgccacccaccaccactttctccctgcctgaaagcactgggctgtgtttcagagaggtagctgggtcccacagatatttatggagggcttgtttctgtatctccttctagtgggctggacctccccaggccatttttctaggtaactaggaaggcctgactctgtcagcaacttggctttctttggaggaggtgtcactctgggattagttaaaaggggatcagtggtattcacattggctcgtgggtgtattttctcctcctcaaattataaccttttggagggcaggagtcatgttttattttttgtgccttcttggtgcctaacataatgctggttcatatgtagtatttaatctgtactttgctcacgctgcttgattgaacagagaaagaccgggctttgaatggatccccagctccctgtccagggaaggtgtgaggctgggcaagtttatttcccccttcctccctggggagaaagtgaaaaagtgaaagtgctggggttgggatagctggtggtgtctttgtggctttcaccccatggtcaagcagtgaactctgcttgcagattctgtctcgctcacctggaagccagtgttggggaaggagcacgtgggggaggatccttaggtctgggcaacactttggagttagggggtcccctggaggtgtgggaagctggtagtggcattctggaaacaagctagagcctgtctcaccagagggagaacggctgagttcggaagggactggggcctgctttcctttgggtggctttgactggctcttggatgagtttaaaaggtgattctctctctctctctgtctctcttttctttttttttttttcttttttctgttttagtgtatgtgtatgcaagacctttgatatttgagtagggaaatcctctcttatcaatggaattcacagcctcttatggtgccttaccctttcattgtgttgtaaagacagtcagaccaactagatttatttgcacaactctgatttttttcctaagaaactcccccacccaatttaatttttttttttttttgagatggagtctcgctctgtcgcccaggctggagtgcagtgctacgatctcggctcattgcagcctccgcctcccaggttcaagtgattctcctgcctcagcctcccaagtagctgggattataggtgcatgccatcacacctggctgatttttttttttttttttttttttaagtagagatggggtttcaccatgttggctaggctggtcttgaactcctgacctcaggtgacccacacgcctcggcctcccaaaatgctgagattacaggtgtgagccaccgcacctggctatttaattctattttcagatggcttgttctccaagtcttgggactgcccagaaatgggttgcctggtagggctcatggctcagcactgcgatcccaccagtggccggggtgttccttagccttctagttcagttgtggcccttctgggcttcctttgctaccagtttccaccacatggctggaggtagcccagcctggaagcctctcagagctccagcctggaagcctctcagagagtgcttggagcactgctagctgcacgtgctctcaggaaagtccacaaggagatggctggtgtggctcagagtccttgtgtgctgcctcagcccatgccaggccacctgtggctgtctgccctcaagtctgtccttctctgaggatttaggactgtgaacctagagaattcaaagtagtggaactagaatccaggtctcgactcaatccagggagttttgctcaccacaagccaggaacagcttctcttcatggaggtgcctgtctggaaggcagagaatctctggcttgttgagaagagagagtctgcccttcagactgcaaggtgttcactgcataggacccttcgtaggtgctgacccagctgtgcccagtgctagagctaggactcagttctattttcccagagagtggtgtgatgggaggctatttctttttcttttttcagtcctgatcagggatgagtccgtgctgttgggtttattcatttactttagcgtgtgagtggggagatggattaggcagcaggcccttggaagggtgggaagattcagaagagagagggcaggactgggaagatccagacaggacatgaagatttgctccacaaagagagaagcagcaggagttctggctagaggctaacccaacacccacacctgccaaaggggttcccatggggtggctggcttgaggggatctgggcgctggtttctgctgtggacagcctcaagtggggcgtggaggcagcatctccagaagcacccggcagatggctcctgagggagcagggactccttctagtgccactcctgggactaaattccttgtcccctccttgtctcatatttagcatcttggagccgtgtcagctgcagagactggagtccggggcatgatggggatgtacctgaaacctagtgagagtcatcctgactctggggaagagccgctcaaagatgagaaagataaagtaatttgccacccccaacccctcacaggctagactatccatggatttcagtggggtggtgagtcctcatgatccctgaacctctcctcaaatggtgactgttctgggggtcctttctctgcctttctcagggggtaaccagaggtggtggtgtggtccactgtgactcgtcagctgttgctctgtgtgttcatttttgagaaaatgttaatctctgagacgtctaagaggtgaaactcctttctctgtgtctcctccaaatggatgccatgtgggtgggcaaagtggttgggtttattcatttactttaggtgtgtattgtagtaaaacctgcttgttctcctatccgtcatcagaggtgactcatacttgagacactaaaagagaataaactgtcttcataaggctgtgaacgtcgccagattatgaaccaacttcaagtaacgtagggatgccttgataattatattattgaaaccatctccaattagatatgcaaaatggagttgctgggggcttcagttttctttagaccaaataatttagagctgagaggagaggcagataccatctagtctcactttttacaatttagcattggatttgttgagcatgtactctctgcagagcattgtgataggttctgggttgggaggggagccgggaaggcaagcatcctctctcaaagctgcctttctcatttgagaggcgagtgtgtgtggcacaggggcaggtagaaggagacagatcctttatacctgagagcaagatgtgcagccaggaaagctcaaggacacaggccaagggaggtgaagtgacttgcccaggccacccagttacctagcacagctcagccacaagcccaaatgaatgattctgagttccacatcagcgcatcgggcagccaccatgagcagttccacagtgacaggtggggctctaggtggcttcctttaaaacatctgaggaaagcaggcttcctctctgactgctctccaggggtggtgagcacaggggttcatctgcagctccccagctccagtgctccttagccttccaagttgtttgaattaagttgcaagcccaggtggctgcacacatattcattttggagtgactgtgacacttgtatttcctgggaagcgttactatgtctttggccgagcaagtattacgccatgagctggttccctttcttttgcctttgaacacctacattgctgggaggataccttagtgagagtgcctgggccactgggcgtagcagaggaagcacctcatcattttactgatttatttgaaagaaaaaagctccctccaacccttgccttcatagaaacagagtgttgaaagcttggagaagaattaatgactcccctgccccttagtgtcttacatgactagctgcttctttgcctactgcattttcaacttatttcaacttattttctgtggcttggaaaatacgttgactgagtgatgattgttttcatgaaatggtgcaacatgtaaagcaatggttgtcattaatagtgcagttatgtagagtgtagctctttgagtcttcagttttgaatcagattagcgctctgttaacttaaaatagccccaaaaaagaagaaggaaaaaaaaagaactgtcagaaatcagagggaaatattagcattatgaaacatggtaacaagtggccattagcactttatgtctgcatgaatagcatctttaagtgttttattggtaacggaaaagagtggagtcacatagaatgacattacttcccaaattggcgagttcttttaattcagacttctccttgttattgcctactggggagcacttattcacctgtcaaattgtatgctagggtgggaaagggtattttagcttttctggctgcatcccgggctctcaggtagaagggatttgtccctttgccatggcctccttctctcctgccctccccagtgcccctgccaggaggagggagaatctgaaagcaagaatggagggagagtaatgccgtggaggcagctgggatttgtgcctggccagtgcccctgcacagtattggatataagtatgggcatctcagtgtgcctggaaacgcagttggctgcacagccccagtgggaagaactctgaggaactgctggtggttggctcttccccaggctctcagcccctctttctagaggctccacctaagccttaggaaagactttcgtttggttttaactggctcctgtcaagggttcccccaaaccagctcaacccctccatttacattataatgcaaaagctcttccctgtgggtctcagggcctgtggggaaaatggaatctggctcaaacccaagatccaaagctaaagtgcccccaggttgggctgcctgacagttttatagatatggcattgagtggcctcctggcagtttggaattgtgaaggttcactcattcatttttcaacaaatattttgaacacctgccacatgctgggaacggttcttggtgttgggcatagaaagccttaaaaactccctgctcttgtggcaccccctttctagctggggagagacagaagatgcaccaataaatatgtgaattatatagtatggcaagagaagatcaaactgcctgcacgaaaataaggtggggaagaggggtaaggggtgcatggtgaccaggcttttaaataggataattagggaaggcccaatgagaagcaaaggctccaaagaggtgaggaagttggccatgagaattttgagaagatggttccaggaagagtgtgtagagagcagagaccttgtgtgtaatacgcctggctactggaggaggagcaaggggccctgaggtcagagtggaaagagtgcaggaggaggaggagaggagaccagctggctccttgaaggacgtagagcagggatttttggctctgactccaagggagatggaagccactggaggagtgatgtcatatgacttgcgcttccagagagtctcttgggccgcattttgagactcaagcatgggaaagtgaggcagaagcagtcagaaggcaaattttaggcaagtgatggtggcgtggaccagggtggtggggacgtgagaaggggctggattctggacatacttcgaagggaaaaccggcaggatttgctgactggtgggatgggttgtatgaaaggaagggaggagtcaagatggaccccaaaatgtgtggctcggtgactgggagaatagaattgctgtttattgggatgggccagaaaggctgtggaggtgctcagaggatgggtgtgtctggggctccttcaccacttcaggacttcagtggatgctagactactgccctgttcaggaagatcgtgaggggaaagagagtagccccccgattgtggctgttcggagagccccagttgactgcctatagctgagatgatttaagtcgagttctttggggagggccaggtgtttttctcctcctcctaatctttttgttctttttccttctctgttgttctttagctaccaaagacaacttgatcttttgatccagaaagatgcgctttgtttcttgcatttctttcccttcgtttgttttctcaggtctcaggtagaccatcgagctgctgttaattggtgatatttaggaatgggttggaagctgcatcttttcctggacttctcaggactctcactgccacgtgtcttgtgcttccacagaaccgttttctgagacgtccgtgtggctctgctgtgctcaggtccacggttagcccctggcttggaatttcttccggaaatccgttgtcctcttttccacaggttctcctcctccctttccccatttctggaaagaagtgggctggcacatagagcctttttccttgaaaggagagtgcagagccctctaatggaaaagtaaaaaaattcttggaatcctcataacatccaagccagccaaagctgagaccaagtaaattattggggggtaatttgcaagggcctgaatcaaacaaattgctttcttgtttctcagcttgaatctttagaccagaagcctgtgatttcggagtctgatgagaaataagagtcagtgtttctgtctgagccacttttctttggaggaggtcctctaggctttagcaatcacagaagaaccagtgacaggttccttgtcataggagagctccttggtcctcaggattcaaaagacaccttaagtagcagtgggtagggcgtaagtttaacatccctcaaggtaggccttaggtttccctctgtcccctctatggtgctggctttgccacatgtagaacaaactcttctggaatcataggtaacccaagggggagctcagagaagagtccaggctgccagtgcaaaggtccagccctgtcgccaaggagaccctcagggaaatgcacaggcctccagctattcccacggcccctgtagctgagcgccagcttcttcctgggccaagctgaggctgtttcctgccgtgtccattctcctagcaacgcttctctttggccagtttgccatagtacctgaggtaagttttgtcctttgcctgccaaatgctttacatcccggaggaaagcaaagtcctcttcagaacaggaaaagtccagtgcagttccacactgtgctattccagaacctcccagttgcattcctttgccaactaggtaatgtgctagggatatttgtctcgcagcaactggcaaccccctgtttgggtaaaagtcagactcagggacccggctgcagtgcttgctcctgtggcccctgcagggagtgtggcctggggtgtaattctgcacacccaggaagcttctctgtctcctctttcacatcaggccttccctgtgtcctgaaccaagtgtggatgagtttgagcttcctcctagtttttatttgtgtaatttgttgttgttgttgttgtttgggggtgggggtagacagtgctgggcctgtcagaattttaggttggttctttgagatgaataactacttagctgttgctcaactacttttgtttgtgaaagaaagggcagtaagcaccatgacatgagagaatttcaggtttattgtgatttcttttttgtgtttgcatctgtcgtgctcagttagggcattatccgtaaccccataggaaccaacaccgaagaccatatgattttaaagctttagaaatctgcgtgtgtaatatgtcttttgtgaatttttttttgttcttttgctttagaaactgtaataataatccatagtaattatcccatagtatgctgtcctttgttacaggagcattggattactgtgaagacgtgtcctgtatacagtttcaacagcttgtttttacttcttcccttctccccgcacccgtcgccccccaccccacccgctttctgtcttgtgctgtttggaagacaatttccacatttctgccatatgtcttagaaaagctggggacttagaagcagtagccgacttaggacagcaagctcagctcaggtgcggaggcagccctgtgtaagagactctgttatgcagtgagctgttgaaacagctgcatgtggaaacagttcttccccttgcctgtcctcatttcttgagagactccaaaacatctgaaaatgtaaaagcacttcacaaggttttaacttttctggcttgaacggaagcagcttcaagtcaacaagagcacaatagtctttgtaggttttggacacagttttctagcttttcaagaaaggcaagggccctccttccctccctcccttcccttcccttcccttcccttcccttcccttcccttcccttcccttcccttcccttcccctcccctcccctcccctcccctcccctcccctcccctcccctcccctcccctcccctcccctcccctcccctccctccctcccttccttccttccttccttccttcctttcttccttgtcttgctttgcattctgcagagctagaagagcatttaatccttggccctctgtctgttgggatattatgtttttttaatagtgcttgtttatgactaaggtcaaagacagtatttcagaacaaaaattagagttagttcataattgagtacatatgtacgttactgtttatttttatagtttgctaatttatttttaaacagctcagttacgccaacatgtttatagctctgttcatcacatgccttaccagtcagggtgttaaaaggcacatgcttttcaatagtttggatcccaagttaaattagataatgccatcaggtagcaatttaattacattaattgaatgtttaggcggaaaggtagttttgcagaggctataatgaaatcacatttataagtacccatgtataaatctcagcattatagacattatttgaggttgctgacagaaaaatggatatatatcaggcgtttaggaggaaacatgcggggggctgtcatcagtggtaaatgctgccttcgccatttaggagactgctgggcacggtcgttttcttagtgagctgcctttatcattagccctctaagcagccatgcacaaaggcacgtgggtgctgtgttttgtatagccagggctttcctggactcagcatgccagctggggccggctcactgaggctggaaaaatgagatacagtctagtgaggtctttgtcaccttggagggtctgaggactggtgcgctcgggttgacccatgtggcgtcctgagccagctctgtcctggatctgaggaacactgtctgaagttttccaggggtttgacagaccagaatgggggccgctggcagggcctggtggcattagatgtggcaagtcagaccacagctggcctgtgaaggtgactcttcctctgatgcagagagaattaaatgaggaggccagagccctagctgctgcctcccctccatgccctcagagaaagtgggagtgctggcatttggctaacaggacaggctattttgggcccaggtgttctttctgacctctctgtgatttctatggtgggtgtcaaaggatggctgggaaaggggatttttaggtgtgctaacatcccttgcctatgagtgattcactatcttctcgcaccatctggtttcacccgggctgcaaagcctagtgtggtgtcccataccctgcaaagccctatttgggttatttaccaaatgccaccatgccatctccacagcatctggcagacgaaccaggtggggctgctattgcttctgggtatttacgggatgcagatttttctgcccaccgttgttttgggagggatttccccctccctcaggtagagttgttctcagagatatctgtaattggcccttcccatttaagagtcagccacgaatgatttattctaaaatgatagacccaggtagagaggttacccaccctccgtcacagagtggccagctgtgtcccctgcttccgggaggtgggaatgcatgtggaggggtcgttatttcctaactctcttgctctggcagcctgaagagctgtctgtgccctgaacaacagcttagggagctggaggaaagagaaggaggtatgcatttgagggagagaggcccactgggttggacaagaaggtaaaagagggctggtttggcccctaagggaaggacaggaaagcacccgcttgttccctgtgtggatgcagtgtttgtccagctgaaggcagcctcactcggctgactacctgatgagtgattttccccaagctgacagctgctccaacacatttcacctacaagtcctgacaaagtggtgtgttcttttggggctgttattactgcagcaggcatttggaacaatctggaagaatggggtgccaaaggacacccttgaagccgtttctgagtatccgtcccttcttttctctccgatcctctagcttttttggcttatgaaaaattgggcccatccctttcgaatgtccattgtgctgttagtaatgaggatacggataaaatcacattttttttttgagtaagccctttgaggagtattgtcaaattgagactcacctcatgagtaaccctgtgaagaggcaggagaaagggtagttgaagcttagagaggttaaatggcaggtctggtctcatgcagccgcaggggtagactagggattctgatccagaactccttatacttctgggtccaccccacgcttccacagcctgcacacagggtagggaagttgtggcttgcagaaggctgtttttttggggggacgctctgttttaatagtttggagcaaggaagctagtggtgggcgctcactggtaggggaggcatgtgataggaatcagtttgatcttttaagcattttcagggacagatatgtacctgatattccacctctctatataatttcaagacttgattggcattgtccctaagcaccagtagaaagcttgaagaagcttctcagtaaatacatcagctgtatttccaggtgagcagtacctgctgaaatgctgagagaacgttctgactaggagggcttgggggagacagagacagagttggctgtttcagcagactcattctgctatttgctttttgccttggagattattttttctgggtgtcccgatgctgagctcccacttcaagaagaacattggtataaatttacaaaccagaagtagtcagaggttgacttttttgttctgttattccttctttgggagagcaggctggccaggaggaaggttcaagtgtgtcatatcctagcattcagataggtggcctcctctgccttttcagtgggtggctgggctgggtgaaatcttgcagtgactaagaaaggaagggtggacccaggcagacccagaaggtactgcatcttcatcattgatcctgcatgcgtgccggtaggcagcagttctggaattgctggggaaaccacagtgcagcatgagccctggggcctgctctcttgtgcccggctgagcatctctgttctgtttggggagtcctgccaggcaagtgtgagtcaaagaggagaccagggccctatgtcatgggggcagtgtcggctgagtggtactcttcagagttctcagaatgtgccgctcgaagccatgtaggcttccagcaggcttctagcagatggggttttggctgggttgggccttaatactcagtgtctttcattccctctctgccccctcgttcctttcctgcatttcttgctttcttttttttctagaatcaacgaagcagccaataaccaattttcaggaggtttagatgaatgtgaattgctgtttaatataaaaattttattaaaataataaagctctgacaaaagatccagaatattgtcccttgcagtgggctttagggttgcatcttggctcctaaatcttctaggcgggttaaattagtcctcacaaaatgtcacatttccctggcagctataggtttccaggagggtgaacaagggccatctgggtgtttgctgagggcttctcagtcctgggtaggaactgctgggtgtggaaaccaccaaggctttgtaagcctgaaagagccactggtattgggagcttggtctgcactcagacctgagcgccacacattattttcccagatttgggcaatctaatggataggagggagggttatgccccatctgtgaataggtggaggagagggtccagagaaaattgttgcagtgctcagaggaagcaatagcctactgtcttccagggacatgtctggctcctggaatgcctgtccaggctgcggtgggtggcatgggtaagggtttttaataaaaagtcacaatgcctggagaagtgaggctccttgcagccacctgccttttctgtcttgggtctcctggttggaccccattctggctttccacctggtcagagcctcctgaggctgcagaatggggctaacatgatcaagggtgatgtggcttctccatcttgggactaggagtgaccaggtttagagaaggtggactcattcctgctcccattgccaggacaaatgcagagtggatctgggtctgtcccttccacacagacaccttcatttcaacacattccgtgtgtattaagatgacagacacgttggttttgctccaagccagtagccatccccctagacagcccaggccttaaaagacaaggaggtgtttggacaagagcaagaaagaagtctggctgtgtcttctgggagccccagacagaccagtgttctttctcactggttcactccttccccagctcattttacccactcgagacttgattctcttagagattaagtacctcccctggtcacatagtttctgggtgacaggactagaatttatttcttttgatcaccaattgagtgctctttctgctctactgtgctaccatgatcagaggtaaatttgtttttctctgatgatgattgaaaacagttttattaacatatcaagaacattacaacacaaagagtttctggtttaaaaaatctcttttcactggtatttcttaaattcatattttaatattagaaagcatgggattgggtgtgaacactgcttttggatgttggaggaagataagagaaggaagctggctctttctttaggagcaatacctgagatcccagaattgtatgtacaaagtgtgtgatggcagagctcaaatctgtgctagcgagaaaccccctgctactcttctgaatctgatgaagaagttattctgtctgtgcagttttattaggctgagactttttccgatggtttatttttccgtttgctcacagaatgtagaggagagccaggagggagctgacacgttcacactgtttacctactccctgactttggagctcagcaaatctgctatccatcattttgtttcaccagcttttacaaagcaggatcataaactgtaagctcatttggagggacctgatctctgattgttgctttgataagtatctatacaaatattcatatcattctgatagtcttgagttgcattgttacaacatgcaaacctctcagttttccaggacttctggtggtacagcttctctgtggagtgaggcatatttttggtctggcctttcctccctgaagctctgttagcctgagatttcacctagtgcaacacaagttgtgtagaaagaaacataatactactttattccataattcactagtaaaataattagaataaaaggctgttttggaatgtagagaggcagaggggctgatataacttctcagaatgcatcttcctgttttcccgtcttaaatttttatgtgagatgagcacactgctgtaattaagaaagcagtgtaaggctgggcgcagtggctcacgtctgtaattccagcactttgggaggccgaggtgggtagatcacctgaggtcaagagtttgagaccagcctgaccaacatggagaaacctcatctctattaaaaatataaacttagccaggcatggtcgcacatgcctgtaatcccagctactcaggaggctgagggaggagaattgcttgaacccaggaggcagaggtggtgagccgagatcacaccattgcaccccagcctgggcaacaagagcgaaactctgtctcaaaaaaaaaaaaaaaaaaaaagaaagcggtgtcagtacttgcaaaaggcctttccctcttgccactcagggaagcacccgaaagagaacttacaaaccaggtaaagtatttggaagtgattaatcatattacaagagtgttcttcatttcccccaaaggaccatggcttcctgtgacacttacctgtgctcttatagatattaaagacagagccactggactgtgagctccttgagggcagggaatgaggctcattccattttgttctggcaagtagcactacaggtttggaccaaatgaattaaattggctgccattgaatcaaagcagaatgaaggtagtgtttctgaaacaataatataaataagtgcaaaattggatgtttaccaacaactttccagaaacaggtcttgtttcagaagatgtgccaaagatgtctcatgtgggcagggctcctgtggagacctctgttgctgagtgagtcaaccatgaggtcggctgagcagttcagggttctcccattttacagaggaggatgcagcgacccagaaatgcttgcaagcccacccagctaggcttgcttcacagacactcttttaactagttccatcagcaaccccaggttggccatacaatgtcatcatacacattttaccagtgaagaaactgaggcttggagaggttaaagagctgctcccagacacacagccaggaaattggtggtagatgaaggatccagctcatctgtctaacttgggagcctgagtgttcatcttacctatccaccaaggcttgaagtgaggtgccccgactgtgagttccaggtttgatgcctacagcccatcagccttataccttgtcttataccttaactggtggagggtgctgtctctgtgtagcagccaccagcctagctctgaaccctgtcctgaggagttgggaagtgtggggtgtctggtttattccatcaatacacgtagtcccttccattcttctgccattttttctcaggggctctccttccttccctggctcttgggtaggctgcctgctctgatgtaagttcctgctgggatgattgctctggccaggcccccagctgctccctgcccttctctgaaggcacatctgtcagcccacagaggcacggttaatggtggcggggaagcagaggcagtgcataatgggggaactggccccgggaacctcacctgccctatccctacctgccccctgtcccctccccgcctgggcttgacttgtccactttcactctcaagaccaccgctctcacacacaggtcctgtgctgcccccacagctttgcaggctgctggttttccatccagggcacagccgcaggcctctgggcaccctagccctcagtgcccagggcaaagccctgacatgcaatctcactggcaggcagcctcaggcaggcctgggcagaggaccgaaaggaggagaggagggagggagctacagtagagcagacaggagacaaacaccagctaagagtaaacagcctggcagtggggtgagtgcctggctggaggggctcacctgggctggcctgcctgggaggagccaggtcggtggctgctctctccgaatcttagtcctgcttgaggtctagcagcttccggagctgcacatggggcttgaggtctggtgcttatggattaggaggaagagaagacagatggcagagtaccaggcagcttaggaacatgtctccttccacatgctgtggcccaggtgctgcccagagctgtttcacagcagcctctccactcaaggttgagcggtttccttcagtgctgtccacccctttggtccggggagcttcatgttcctgggcctcactgacacctgcatggggttggtggggaggtatgaggggttggaggggtctttttgctagccctggcccgtggcaaacactgtcttgagaaagtgggacgttgaaggagcttggactctaaagtcagctacacatgagtcttttcacctgctggctaggtggccccggacaagtcaatcagcctattgggcctcaggctctttatctataaaatggggctaatttccttttttgcccctgggaagaaatatcacttagaggagttacagaatgtgcaacctttcccaggagtattgctcctgaaggaataaggcacgatgggctttgacttcagcctccagcactgtggcccagaagggtatggctgggcaggggcgtcacacccctgcagctctgtgggagtgacggaagggcgctatccactcgccttgcacatggctgtcttgctctaccaggccttaggttctgtggccagatactgttctccagctctttggcttgggccccgagaccagagaagataatggcagcccagaaacctgaatactggggaacacattgtagggtgatctcccagaaaagccagcgagaaatggactgtagctgtagcattcttccctttggatgcctgtgtggggacagaatcagtggaatggaaaatgaagaagaaacactggccctgcctctcatcaatgcccccccaccacccaccaccaccacctgcttcctgttctattagacaaacgtagtttctggatgagttggacagtcatctgagtttgatcaagatttacaggtaattcaaatgtatgtataaggtacatacatattagtacatccatcagagaggcttccttaagccacaagtctctagctcctcagagaactggcagtctggctgggtctgtacgaacttggacctatagatgacctcactggtttctccccttgtcacctcatctgcctgcttccttctctttactgatcttatgtgagtaggtagaggggtcagatcacctctgctcagctctgcccagcacactaagcctatttgctattaaaatttgaaaaacaaatgcaggtgccagaggtggctaaataatgaatgtcccaggccaattctaggaagggaagtgggtatggggcagcccattgccttcctggtaccaggatgatgcaatgcttggaggctgtgagctccccaccttctcagggcacaccctgtgatcttgtgggacccctctgtccagcccagcctgggtgtgcatcttgtgtgcttggtcggcactgataggggtcgcggtagggagttgtcggcacacactgctgcatgtcctgtgagcggtcgccaaggctgtgcccagccttcagtgtccagggcctcttctgacaggccctgctggttatcactgttggcattatctccacgcaccacttctgtgcccagggctgctgggtcaccttaaggagccacacacccgtctacatagaggcccttcctgcttggggtctgacccagttatcccctccacacctccattctcccagacttttgactcaccccagccctgctaagagtgatgtcctcccccaaagagaagacccctgctcttgagggtctgccaggtgggtccctcatctccccacctccatgggcctcttggattttgtgcatagcaatctctgcaacaccctgacctttatggggtcatcctcggccaatgaagcggtgggtccaggctcccccttctatcacctggctcacttccatcctgcagaggaagcttggtttcatttaggacaatgtgcaggatccttttgatcatttctctactggatcatcagcaaagggagaaatgagacaaaagaggccactgagtcctttgggggaaatatgtgcctatagtaaggtgatagttcagagaaagagaagagtaggaggctggacctgaaggccttccaaaaaaagtaaaggatgttaaattgctctggaaggtgcaaagtgccatccagtggaagctattattattatcatcatcataatggtcattatcatcaccattataggatatggcactgacgtaggtagtgactggtaagagccgattgagtttctagctgattcctgatgttaggggccatgaatctgtctacctggaatgttctaattcaattcaggagcggcagtttaagtctagacttcaaagcactctcatatatccttggcctgctaacctgagggctagtttctagggattgattaacttaaagacagttcatatatgcttgaatactagctattcatattctgaaaaatctgacttgatcaaacagagcagttaaaggcgatgcttcgttttacaaaagattttcccccctctttacaaaaggatgcacagtggtattcctttcaatggaatgtttctctagctcattaagtgtttacaggtcattagctactgcatggaaggactttgctagagaaaaggaaggctgcaaggaaatagctctagctctagctctagcttaggggatgctagctaaagggaattagaattggttggccaacaggtgtctgcggtgtactccctgtccactcaacactgggggaggagtagagatcttgcttccttccatgtgagagcttatagtccctttggaatccagatttatcgtgaagtaatcgtgaagacagaaattaagtgctaagttgtgttcactcatctcttatgactgtccatggggaaatgggtcctgctttacaaaaattcagtttgcatgctgcttttcaggcctatgactgtgacatccagtgagggagatttgaggaaggggttgatgtaagactcctcttgggagcatagtgagagagagagagagagagagcactcacagtggaacctagagtgggaaaggctacctggtggctgtcctggcatgtaagtaagtctgtgtggtcagggcttgcattccataaatggcccaggcccctgctggctgctgggagagaaagtcggtgaggagagagggttgtacaaggcaggagagatgtactcaccaggctcttccagaaggggtaactgtctcaaatccttgccttgaacctgcagcaaagtggaagataggtgttatcctcctctcttccctctttcctgcttcaggctactctgaactcacttttgctgtgtgtccagagctgaccagaggacaatggcagacttattgtcagactggcagcaccagcctagtgctctgtctctgcctgggaaatggtttcacaaagctccagttctgccctggacacttgcctcatagggctatccctttgcccctcagtaacaccactgggatggtccactcccaccctgtcccccatctgtggtagcctgtgttgcctcgtgggacaaggcattctgtaaacgtgtattggacttccattgcttaagtcatgatttgtttttccgacttccagaactttcccggttctggttttctgggatttcatgaacaattccctgtttccgtaatccatttcctgcacaggtgcattgctttcaatcatctcccctccggttatcctaaagccttcattatcaattgacttttcacatatgagggtgacctctggatcccttctctttggtttgtttgttctcttttccagagctgcagtatgtttcttaggtttttaaaaaatatgctaagaatagtgaaaacacccttgtaatttagagactctcagaaaaatgacagcaccatttagagcctggaattacagtttgacttcactgtgccttctctgccccaggctcccatggtggcaagggtttttggttgggggaaggggtattgaattgcctgtctttgagcaggaaaagaattacagttttccaggtaccttttgtgtgtatgtgctgattgagggcccattgagaatattttgacttttagggaagctccaaactctcaaaccacagggatcacaacacatacgtgtgtctgttatgacgttatatgtaagcatcacaacaggcagagaatgtctgcaccccaccctggaaaacagcctgactgtgccccatgggcaaaccagactagtttatagggggttctactctgaggtactgatggaccttgggtgctattcctgtgataaggaaggcagctagacaggacttgggagttatctgtagtgagatggctgaaaagcgatacagggctggctctatgccccaggtgtgcataagtaagagcagatagctgattccagtgcaaagtccatacaggtaataacataggccagaaaagagatatggcatctactcttagacataacacaccagggtcaatacaactttgaagctagtctagtgcaagctaacagttgcttttatcacaggctccaggaagggtttggcctctgattagggtgggggcgtgggtggggtagaagaggactggcagacctctccatcggtggccgtttgcccaggggggcctctttcggaaggctctcttggtgatggagaattggattttatttctcaatgggaatgaaataatttgtatgccatgccgtgtggactcccaaaattgtaaaggaggtgaagcttcccctgtctgcactctcccctcctcataattgtccatttttcatctgtcgggctgtccacccatccatcacatataggcacctatcaggtaccagctactgtgttaggatctgtgttcccaactgacttgcctccccctgacgtcatattcttttcctttttcctctcccttttcccttttcttctgacccaaactaggaattggggaaagggcctgataactttgtttctgctgaggtgtaactaataaataccaggaggcagcattttagttcacaagctcggagcacttactctgctctaggaactttacaaatacgcactcattttattttcatacaaaccctatgaagcatatactattattattcctattttacggatgagtccatattttaaattccagctgaagaaagaacatttggtgataaatcattaggaatgagctaggagttatttgtcatcacagaaccagtctgtattgccccaagtctggctttgccaattggagattagggagatggaatgaacacttttcgtcccctttgatatctcatctcactgagctctgggccgtttccactcttctctccccatactcccatcttggcaaaaattgcataagatttataagacattagggtattggagataatttattacaacctccttgtttacagaggggcaacccaggtccagagtggggaggtgaccaggccatggtcactgcccagtttagaggccatgcacagatgagaagccaaactcccagctcccagcccacgtcttcccactctcccatgtggcctgtcagcatcaccctctctcactcttgtttagcctgtgtagctcaaggatgtatttattgccccaggcgtaagaatgtgctcaggtttcttaagtaatgtaggtgtgcctcacccatggggcttcactttctctctgtttattgccagtagtggtctctgttctgttttcttcagtttctcccccttgcattgttgtctaagatggctgtcctgtcttttgtccacttcccctccactccccgtaccttcctttaatcagcttccgccactgcctgaggccactcagctctggtcccactggaggccctgtctcccccaggggtccttctgcttcctgttcacctctgatcccccagccctgccatggccaagctgatgaggatgggggagggggaggcagggggaatcttaatttcctgcaccgaagctttgctgtccacagcactgggcagcagctgcctccctggagtgttgtgtgagaccttgatgctgtctttcttcccaaggcctttggcaaggtagaagtcatctccttgactctccatgctgctaatgggggaggtcaactaagtccatttctgagctagtgggggctcttaggactccgaacaccacacttaagttatctctgacccagagtccaatttatttggcctgattcaaatgaatgcccattttaagaatgttttggggtctcttcccatcatttccttagtgtagtggagaggtttctattcggaataggatgacatttggtagctgagccaaacagatagctgggatatagggtttggagttgaactctccagggaatggggtgggaggggggcagcctggaggatgacaaaatgagggctccctggactcaaactcaaaaccttttctgtgttctcgaaatgccttagatgtttacctaagagaaatgtagacatacattcctataaacacatctacacagtgtccattgtagcactgttcatagtggtcaaaaagtggtcacaacccacatggcaaccaataggttgaatggataaacgccctatggtggaatacaactcaacagtagaagaatgaaagagtaacacactccacaccatggatgaatcccagaatcattctgctctgtgaaagaaattaaacacaaaagacgatatcctgtatgagtccatttgtaacaaattctagaattctcaacactgtggtggtaggtgggggttcagtggttagaaggaaggggtcagagggttagggaaggggattgacagcaaaggggcatgagggggctttctagactggtggacgtgttctgtatcttgattttggtggaggccacacagctgtatacaactggcaaattgaatccaactgtacacttaaaatgaatgacttttgttgtatgtaaattataccttaataaagctaaagcgaaacaaaacaaaacacccaccactggagtggaaccaagtctgtctgtaacctttaactgtttgggtctcctcaagactctagccgtctttcagggtagcaccaaagtacatttcagggaaatgagaatgccctttgtattctgagattttatagaagttggtaatgacagagagagagagagagagagagagagagggaggcccactgagatggggttatccaccataagcagagcatttgggtctgagaagcgcatgagtactggtgagtatgtgaggaaggagagagcaaggggaggaaatctgttttcctagaattccagcaggcttcaaaaagtaaaaaggggagggagtacccaactaagtttttttcttccctagaaatacatttattctaaacattagcccaattagttgtcttttgtttgtttgtttgtttgtttttgagacagggtctcgctgtgttgcctaggctagagtgtagtggcatgttcatagctcactgcagccttgatctcctaggctcaagccatcctgtcacctcagcctcctgagtagctgggacgacaggtgcatgccaccatgcctggctaattttgtagagatggagtttctccctgttgcccaggctggtcttgaactcctgggctccagtgatcctcctgccttgacctcccaaagtgctgggattacaggcgagagccactgtgcctgtcaccaactcagtcttattcatcagtatgtcttctccttaagcggagatgctaacaatgtagcatctcctgtgctgaattcctgtaaagtgagggtttttgtttttcctacatccatcttcctctccagattccctctcaatttccaaggtatttagcgtaaatgcaatatctgaacttcatttatttggcagatttgtgtggactgccttttctgaacctatttgggtgctaaggactgtatggatttgggttcttaacatggaaaacgtctgtgcctgcgtagtgttgggtcctacctggccacttggctctcaacacggagtgatgatgcctagggtgttttgacgtgggcagtcagcccagcctggagaactgaggggagcatttctttcttttttttttttttcttttttctttttttggtgagacggagatttactcttgttgcccgggctggaatgcaatggcgcgatctcggctcactgcatcttctgcctcccaggttcaagcgatctcctgcctcagcctcccgagtagctgagattacaggcatgtattaccatgcccggctaattttgtatttttagtagagacggggtttcactgtgttgtccaaactgatcttgaactcctgacctcaggtgatcctcctgccccggcctcccaaagtgctgggattacaggtgtgagccacagcgcctggccgggagcatttcaaatgatagttaggacttccttttactgtacttaatagctgaagggggccaaaagtgtccatgtttgctgccctctggcatcaaaatgaggtcctttttagtagtgctgcatttaaaacagcattaagaatacgtttttagaacttagctttttgcattgaggatgcgcaggtggctgagactaacttctttgcagatgaccatggttgaaagtcagctatagagttgcacaaccacgtagttgggcttcacatatagaagatgttgtcattttttggtaactctgtcagactttaccaacctggcgcacagtctggttggcacataaacttcacatttgctcttctccagggtgtggggtggctgtttaaagagggtggatattcatgctaatctttgtgtagcataacatgttactgcaacttgcttttttttttttatctgaaagttcaagtagatatcagaagggaactgtttgtgggtgctaagaaggttaaaattaccattttgaacagaaatgatatttggaaaaataacttcccttttaggaaggtaaatcagtcatttatatgctatttgttgaattcctagaatatatgaatatcatgtcacatgctgtgctggtactttcaaatataatagaagcaagtaggagaaagagtccctgtattgaagaaactcattgggaacacatgaaattaattagaggcatagagggttaaccagcaatgtaaggcctagatatgagtcagggagtggtgcatgggatgagtgttctatgaggttggagaaggatgagattgattcttcttgctaaggtgactaggtagaccttcattgaggccttgaagtatgagcaggattccaggaggtaagagaagaagaagaaaagccaggaaggaaatgagaacggaagggatttttacttgggcagaatattttccttgatgggtacggggaactaagactggaatagaaaattggagttggattgtggagctctggaatgatggcttaaggagttggaccatatcctatagatcacagagggctgctgaaatactctgatcagaagacaaaggcagcatgctaggggatgttaagtgaggactctgaaaagggggtggatgagttgttgaaattctctgttatacccttcatgccgagttctcccctgttgacttatatgttctagaggatggagttggttgaccgtagggtttcctttcactagcagaatggaaccagatattgtaggagcctagcacatgggtctgttactaatatagaggactgtttaaatcttggaaagctttccttttgcctttgcccccattgcagatggggagtgggcaggaatgacgttcagaatcaagggcccatcagggtctgtattggtcccttgtccctctcctccagtccatccatgttgggatactcagggcatggatggtgtttcatgatagcatttatcattttgatgatatgtgacaaaataaggcaggcatcaaaattcatatccctgtgatctctctttaatagtgtcctcctgctttgggggttattaagctagcctgaacttgagtaaacatttttggatggggtgagaggggggctgataaaagtggttagtaaatagacagttggaaaggagaacggcccgggggctcaggagatgagccagggaacaaggaaagcagagatgctagtgacccagagtgtcctagaggggaaagaacctctgttagaatttcaaatgtcagactttcttttcagcttccttcaggtgcttcctcttctactcagaattttcttttgagataggtgctggtcaaacaagcttttgtttgtggctggtcacttggcacacagtgtggctgtttgtcatcctggatgatgaggcagctattttaatggcacgcagggccgccgtgtgtttactgccaagaaataagggcttctaggagacttggtggctttaggaacaaacttccagcggcagaaattagttaggaagcagagtagcactgggttccaaatgcctctattgtatgaatttggatatgttgtgggcaaaatgacataaaagaaatggaatgagaaatagtgtaagtgactgacaaggaccccattggcatgtgggctagtgttgactggctctcacagtgtgaatttagttaggtgtttccactttattttccccaaactctaaagcaacagtttaattggggtctaaggtaccctttagaaacattttgaccacctattatttaggacacacagcattttttttctttgaagataaatttgttttgggtatggctgggtgtggtagcttatgcctataatcccagcactttgggaggctgaggtgggtggatcacctaaggtcgggagtttgagaccagcctgaccaacatggagaaaccccgtctctaccaaaaatacagaaattagccgcgtgtggtggcgcatgcctataatcccagctacttgggaggctgaggcaggagaatcgcttgaacccgggaggcggagattgcggtgagccgagattgcgccattgcactccagcccgggcaacaagagcgaaactccacctcagaaacaaaaaacaaacaaacaaacaaacaaacaaacaaaatcgttttgggtagcagtggctttaggctgtttttggatctttggctattgatactgatttgaaattttttgttattattttcatgttaagcaaaactagaaagttttaccgaattcccctgcagtacagtaagtattttctttcattgggggaagcaaactatttacagccataacagggtttccagtgaattgtataagtagcactgagttctgtgtcagcaaaaaatgaaacaaaaactgatcatagatgacattacctaaatgacagtacctacgtgtgtcctttctttcacatttgctgtaatcctgttatggcattgtcctattatctcaagtactgtcatctttaaatgctgtcaaattgtaactggattgccaaggacagaggagaggaaccagggaggacacaatggcaattcccactgcaccaaagagacggtcttcttccccctctcacagtctgaattcttggagacattgttcagttaaaatcatgactcaggtatcttttacaggctttgatgaaatagtcagattcactcctcatgttcctagaaggaaaggaagaaacactctttgaacagcccgtgagacaaactcttccaggataatttaaatgtttctacataatgagaataaattgtaagtgttactgtgtttttaaaacccaggtcaaaagtaatagcacagagagggatctataagcatttaatatctaattgttcatatattgcttccccaggtttagatgagggctccattctagagttgggaaaaccaagtcagtaaacctttagtggcagatgttatcagggagctggagttggagtacttgcattttgtgtttgtgccagctgtccatgttcctcttcatatatttagaccaaattcttatccagatttcccattaaaggttcataaatttccagttttcacctttctgcagcttccttagatagaatggttgatgagaaaattaccgcattaaaattaagcctcttgctttttacattctgctgctcataaataagggagtgggaaatggttactttgaacaccctcgttaaaggctggtgtggttgccagagaatagggctaacttaagggggatccgctaagccttctttttcatgcctttttttgttttgttttgttctggattttataaaggcatcatttagttttcccttaatctgaatctgtattcatttttaaatatctaatgttgattagtatgttctattatttatagccctccagaaggatcccaagggaagataatctacatttgagaagacgatttcccaatttccatacagatgacgaaaacgtaactgcccactacactgctccccctgctgaattttctttttccactctcggtgtgtggcattgtggggtgcagacacctgaaagcctgactggagatgtaacatgggctctgctgacattagcatgaagagcttagctaatcgacttgcaaaatataggttagggagttttataggatatcaaattatcttactctttcattgattaaaggcaaaatattacattaactagatcattacatgggtaaaaggttagaacttcacacacttaggggtgttgcactatccttccccttcctgccttgtggcaaatcacaggttggaggcagggaaactcactgtgtctagcgctcctaaatgcctgaatagcaacgttagacttaaaggaggggcatttgccttcgctttgaatctcccgagtcttttttattctgatagaatagtaatcttaaaattaaatattaatttgttctgattccatttctgttagcagggaaaagggcaaatacatgaaagggcgtgggctgagccatggccaggtttgagagacagagtgattcgcagtagtcttcccagggtgttgagtgggaacgtctccctgggaagggatgtggtcattctcagactgtgggctcagactctgtcacactgtaatacctctgtcaaccatctaatgctatcaaggccttcctgagagaagtttcaggcccaatcctgatgttgagttggcatgttcacatgtctggtaataatctgccagctaatccatcatgctgctcatttctgtgcattattcatctcaaagccagaggatctcatgtccatcacagggctgtggtctgtggatagggaaaatttcaaggcttttctgggcctgatgtagccattttctttcagtatcttagattggtaggtctttagaaattatctctcaaaatgtgtgtgtgtgtgcctaagtatagttttcttgaatttctcacttcagtacttaactacacatatgtgcagaaagtgaactcttagaatttggctatccgttctttctcattgtgtgagaaggaggcaaagttgccaaattggaggtggggcaaggtgggccagtagagctgtgattggtgtctcactttgatgtgtaggagagagaacaaatcacaagtcattctctggaaaggagccatggtccacccacagaacaaggaccctgaaatccccagtaccagtctccctaggatgtcttgcctttcagcagctgttcagtcaaatccatttcagaatggagaacagcttgtcacagttctctactcttgacctgctgatagaacaaggggcttggagattttgggtagatatggaaatagatccctaaacatactaaaaagattttttttgtacgtgtggtgggggagaggagaaccagagcagaaggttggagaaagaaagttggggaaggaaactaaaatgtgcaatctcattcctcagccttcttgttgaaaatgagaatcagatgcagcaatgtattatttccaagagctatctggtgatgggatccatctggtgaagggctacttctgggggacctggaattgctgtgtgacctttgggaaacacttgccttctctgggttgagctcagcccgtagttcacaaggggcattgctggtatttatagactgtgtttgacagtcccgagtgaaaggcaacttcacttctcaccccagaatagcaagcgttgtttctcatatctaggttgctgggacagcttcccaggaacctaatattcagcagcttcgtgacgttggatggagggtttttctttttaaatgagttgattggcttttgccactttacacattgttttccaggtctaggtttatttttcccttataggtagaatataaaagagtatggggtctgccctggctcacaccgttctgtttttgcagttagcttaaaggcatggaggacattcctgggactagcatctgctagccaagaacgaagatgacagcaacatggccgtagaggcatgggccctgctggggctaataacccactgcaggctatccttggcattcttgctggagtggccttgctccaccctacctggtcactgtgccgttcagtctgggctatggcctctcaccccacctcatcccattgcatttcataagccagtaactccaaggccagacttccattacactctggatgactgcatttatttgcagtgacttcaaggaagaaggggcctgtttaggaaattaggcactggcctggtgaaaaggtcaacttgcgaaattgtggctgcaagggatgcctttttcttccaaggctatgccttggtggtggtggtgagggtgtacaaattgttttttgtatttcctattttgatttaaatactgttttttgtttggttggttggttttttttttttttttttaagtcctaaacaagtgccacagaggatttctttttggcttgaacttgataaaatttggagcacacaagtttacacacatggtcatgaacacacaccccttctcccatctccccagacccccagcacatatgttccataatgaggtgttcctaagtgagaattcccataatttgaggttttatactggaatggtgataagggcaggaaacctcagcccatgtgcattttttctcgagtggttaacctttcctctctttctccttctttttttgcccccctccaaattcccccttctcttaagaaaaaacacgtgagccatgttggaagtacagccttgacctcagcctcaccaggtgcggctgctgaccggtgcaaaaaaataggaaatattatttaaaaggcagggaggggagagtttctgttccacaatcactgctgtttcagtgaaaagcaacccggtttatctgtaaaacctacttccctttctggtgaatgtggctgtttttgacagcagaggaccccagttgttgaggactaaagagagagaagatgagaaagaagatgctggaaacagaggttggagaaagagaggcaaggaagtagaaaggaggaaaaggggaagagaggaggcagggggagagagggttggaattcgagctattttcagctgaatgtgagtgcagatttcatcaggcttctgggctacagggaaactgactgtgtgcggaccttgcgtgtaacttcctgtgaagcagccgtggtgactgcattttctgacactgtcagagtctggacaaccctgccagctcctagaagggcaacccaacaactgtcacagacgaagcatcaaaagcatgagctgtcgatagtgacctgcatttgcagaaaatctgagggctttctaattaacagaggagctctaaattagagtaaagctgttcgacaagacccctcatacgcggtaagtgtcacaatgcagataatcattacatctaacaagcttctgatttttaacagaagctatgagaccaactcatttataatggttcagtttcaaagggggaaaaaaagcaaccaagaaagaaaaagaaggaaagaaaaaaagggagaaaaggaagaaagaaagaacaaccagaagaacaaaaataggaaagaaaaataaaaagaaatcctccttctagtgctttgggcgagtgcttagacccagtccccaaattcttcctttgttgtctgctgaagcatccagatacatcttctgttttagattttccttactgtaatccacgtctgctaatatgccagctcattcatttgatgtttcctggagacgagcatcctctcttgagttatttctgacaattgcagcattccacagggtctgagttgttgaacacagtgccctaacttaaatattacaatcaaaacacatgacatagacagcagttgatttgggttctgccttggacagagaaacagactggggctaaagggactgcagctatacctggggacttgcctgagatcatttgggacttgcctggtctcaagtcttctgaccttggccagggatctttgcactgggcaggggaatttgagtcccaatttgaggcatcgatttaaaccacttttcaaaggcctgaatggagctgattatttgtgtgtcttcttttcctggtcttccccttgtcaagaccatttctctaccacgggatatatattagaggggaaaacggctgtaaaccctgattgttggctagcattgttcaggaagtgtagcattaaggagcaacacttctctcgcctgtgttgattctcctccaactacccacactatccttgcagttattcatgggaaataatataaatcacactgcctgattcttctcaaacatctcgcaaagtaatcatgggctgaagtgcaggttttcttgcagtgcctttatcagtaaatcagattttgagcatttatcagcaaaagttagacttaaacatcatcatttctgtaatgtttgaaagaaagatttgtttcagtggggactctgccaatcaatgatcttccagcttgactctgctatcaattattgctgcaattatttgtctagttggatatttaaaatgtcatcagaaagagatgattacacattctagaaagcaaggcactgtataatcacatgaactgaatccagttaaatgtagtgtggtactaacctgtccttcaaaatagaatttttgagctaccactgaagcagcagtcttctgccctgttttcaggaagctgatcttaaccttgggatgcagtgtgctttcagggttgggtgatacttaattatggagaactttccaagtctgaaaatggaattgctccttcacatacgcgagaagtgcattttggttatctcattcatctgcaaatctataaataagcagtccctctattcttcttgcttcctgtggatttaaatgccaaatcctgatttgtggcaaagttgtcacatgcccctttcccactctgtatgcctggtgcccaggaactaagcagtggcagtggaaattacaactgtttggaagccaagaaaaaagctccatttctcacttttctccagttccggatattctcggctctgctccatgtatcagcctcctccccacacacctcctccactgcacaccctccttctgtccgctccgtgaacaggaaacagaaatacagctccaatttttttttttaatggaggaagagaaaccacaacccgaacaaaaaactcaaaaactaaactccaaccaaactaaactctcaagatagaatcatgagagatgcaaaatgtccaaaatgtcctaagtggctcaaaccacccgccccttaacaggtctgcctctcttcctgggagtcagaagtgaccttgatgaactggatgttaggtccaaaaatgacaaacaagccctccactgggaaacatcagtccaacccctttcttttgacagcaggactagaacagaccagaggttccggagaaggtctctatacctaggtgggtttcctgagctggagaattttccatggggctgtctgtgtgttgaggcttttccccattcactttcccaattcacttcccagagagcatgctgagctcattccaggacactgtgatggtcaaaaggctctcccaccatcacacagaatgtactagggttctgttagaaaattaatctcacttgtggaaaaaaaatgcccttaaaacactggagccctgagttgtatgtgctggagcatgtggggaaaagaaagatgtagggggtggagcgtcaagaaaaacaagacaaaaaaattcacgagccatggaaatggagaagaaacactgtttctgctgcagttgctcttagccaggggccagcgtggacagcactgtcaccttgatccctgtcctccttcacctgccagcttgtgggctgggtggcttaagttctagccctgggtgaccctctgactcctgagagcatgtatatgtgcttgtggtgggtggggtgtagtgcgttaaagccgcaaagcagaggtgcgaagggcctggtgtaggtcgtgggagacagagagaaggccctgggttctgaatgtttttacttttcctaggatccctgcttcatttttgttttcaaggagttacttgtttctctcttcttgccttccagcatgtcccaagcagagatgggtggctaggtttgggaatggggtgctgggaggggaggggatatcccattccagggcccttcccagttttggggctgggaagcctcaatctccttgagcacagcagggctttgccttctttcttccctgagctgcggccaccactgggctgtaccaggatctagtgcaacttgggtgacaaggtgtgggtggctgcaggtgttctccctgcatctgaggcagggaggcagctgggggcttccagccagcctgtaatgcccctcccaggtctagcttcctagccttatttttaagcccttttagtggagcaaaaactatttagaactatgagttcaaaaataggattattcaagcggaggtacttcacactgttctttctcttgggacagagatgggggtgcaggtaggggatgagaatagaggaaaatgtggaggattgctaaaacaaattgagagaggaaggaagaaagggacccagactagtaattgagaccaattcaccagaagacttaaggaaatttgacatccgctgtagctcttttaactgtgtaattacacagcatttggaaagtgaatgattaacctgattgtccataacaaccattgagtaaatacactattacagattgccaaaatagtacagtgaagcgatggaccagcagccactttcaaggggctgtaatcctctcctgggtcaaggctgacccagaggctccttggttagtgaatcatttactagggaaggtttcccctggtcactgctggctccatggcctggtccttccagccaggtcatttagaatggctctccaacaggaagaaaagttcactgcacagcgcttgaatcctaattatttattgaggggctcttctttgcccagcatggtgctggacagtcagaggtagaccactgagtcttggttcttagaagccttgaacttttagttggagaaccagtggtagatacatgctgattacagggagacttggatccaggagaaatggagtggagagccaggttcagaagagagacatatcctttacaggcctttgtgttacctagccagtgccttcatgtccccagccccctggcctccagctcctccacccccaccttcccccctcctcgctgtccttggtgcagagtggggcagtcatctcagtggggcctcctcccggggaagtccacagcttgctccacaccggaggagccgccaaagtcagccaagagccgcaggccataaatgcaaagtatgatttaacaaaagcagcttttgagtgagaaagctgagtggagttgtcccaacctgtcaacttcagatttctttcctcctccccataaatcaaaaaacggttggtggaagggagggacagaagcgtttcattttcagattttgtaagaaaataaaataaaatcaaaagaacctgtcccacgctgataccttacatgccaggtttgagcctgaggcaaatttttgtggccatgtaataagcctctttaaaatggtgacagacccttgactctttgccttgaattacattgataaaagacattttattgcattagagctggggcaggagtacaggacggttcttgcctggtcggcctctttgaaaccgcgtcagcctgccgtccacactctccaccgcctgacagggtttgagtgcgatggcagctgagatctgtgggccggtgacagagggggctttctacccagcagtagaaggttgaggccctggaagcaaaaggatttcagcctgaggggcttgttaagggagagttattctttcctgttcctagtagacctgagagagcttgacgttggtggcctctggtcagcctcatggttgggactgcgtggaaatgctagacctgagagacctcatttcccaagcagtcttagagagactcaaaacaaaaaatggtctccgggtcccaccgtggtgtgtggccgctgtgcccgcagaggccaggtgtccataggctgagtccccacgtggacctgctaggtgggtagaaaggagttgaagatgttgtgctgttggttggaggagcttggaggtgtctgggaacattggatgttactcatatggaatcagcagaattagtagagccaagaacagacggcagtgccacaccccatggctggactgaggctgctccaatgatggcaggttgtatctgcgggcatctccaatttgctcagggaactctttccagattggtcagtggtataaatgaaggattaggaaattgggtaaaaagccagggaggagggaaaaaaaaaaaacaaaaaacaaagcacgtcaaagccaaggcctgtgttttgttctgtgggactttgccagagagatgaggactgaggctgggctgctgtgtgcctgggaggcgggaaggtgctgaggcactgcagagaagcagctgcagcatgccccgggcagaggcctgttttctgaaagaaggacttgccgtcatgggaggaggcctggcctcgcagcaccagagcgctccttcattcagcctcacctcaggcgagagggcagcctagttttattcctgaagaaatgttagagcctgacctgctagaccattttttttggtagagctttgaagccttaaattagttctcataatttctgagcagctctgtgttaaccataggacataataggttttaattctggagaatggccagttctggttctcagaatctcttggccaagactgtcacagagtattaggcctgtgaagtgccttccacgcttcccctgaagtccacacaccagtcactcaatagtgccagaaaggcaagtgaggagattgcctgaaaggggctgtatgaccagtgtccagacgacaggtttctgccgcggccctgaggtggcagtgggaggggtttgtcagaaggtgggcagggtcctgaagcccagccctgtcctccctgtccacagcaggacacttctgagatcttcgagttcctcactgggaggtgaggctaataccttccctcattccacagggcgactgttggggcaggatgtgaggagagtactttgggaagaacataacactttccacccagcctgggcaacatggtgagatcccatctctacaaaaaatacaaaaattagccaggtgtggtggtggcgcatgcctgtagtcctagctacttgagagctgaggcaggaggactgcttgaactcgggaggcggaggttgcagtgagccaagattgcaccactgcactccagcctgggcaacagagtgagaccatgtctcaattaaaaaaaaaaaaaaaaaagctttccataaaggccaggacagatgtgcttccttaagaagggctagagttggaggccttgccctcctctgggcttgttggccttgggggaggcctgacagagccttcctggggctgcctgttcttctggccccttctccgtgcacagaccagtcttggaagataagtcaggaaagccctccacctggccgggctgcagtgtcgctggggctgcccacacttgctgaccatggctccccactcccttgtctctcacagcaccactgcccctgtttccacagtgcccacgaacaaaacatcaggagtctcttggaaacaccatgtttgattatttctttctttctttctttctttctttattttactctaagttctgggatacatgtgcagaatgtgcaggtttgttacataagtatacatgtaccatggtggtttgctgcacctatcaacccatcatctacattaggcatttctcctaatgctatccctccccttgcccctccacccatgtttggttttctttagcttattctagtattttctcaagaccgatcgaaatgataatatagaggcataaagcacatttgttgtgagttgatgcagataaaaaggcttggggtggtcttcagagtaatttgggagttgtgtgttctgctggctttgatagacaagcccttctctgctctggcaggtgttatcagaatcaaacgtttgcaaatgatcattctcatcgcatccatcttcacagccccatgcctcttcctgaatgctcagttgaaaatgcgtatttcaccttcctcaggtatctaatacttaacctgggagaaacgcaagtgtggtttgcaaggctttccaggtgtccaaatgatgatttcccatccttttcttcatttctcgagtggggcagggaggcatcggggtgtttgtgatacgtttgtgtgaagctggacaattcgggtgacagaaatatgttcagggcagtgtcttttatcgtcccttctaactacaaaggcatggattgcagttgagccccactttcagaaggcccaatacacacaaaaatctcattaatggaaactgataaattagagagtgatttttcacattacagaaagattgttaacttttcaaaaggtttcaccacagggtttctttaaatagtgagctcccccactgaatttaaagtgtttgtttacagatcattaactacttgacagagaggatattgggggttgggggaaggaagacacacttaaaaggtaaaatgttagaagccctgccaattttcaatgagcctggaagggtgacgaaacatctctgaaattatgttggttagcaaatatgatttattttacagaaattcattttacacatggctttccaagaaccctccatgctgatggggtgtggtgggaggtcaaggaccacagggtgctgggctttgctgtcctggtttgtggtggctggggagaggactcccttttcttagagtcctgtgtgtgcctttgtgagcaatgggtgccaggctctggcatgaggccgagctttgctactggacttctggcatgagccactgagaccttttcccttgacatttagcctgggtttggggaagtttcttcctggttctctgaccttcagtctcattggctcaggacacacctaggtttcctccttgaagctcagacatgtaaactttgcaagactgtgtcccaggaggttgaaatccatcatcaggctcactctctaagcctaaggattagcctggggaccaagcccagccctgaactctcctataaggccctcctcatccaggtcaaggtcatgaggggaacaggtgtatcctggccagcttctagcacggcctatagtaggtctcttggttggtccaaaggaggcctggacttgcatgggaggcaggagagagaagccaccccatctaatccagtcttctccttttaaagatggaaacacttagggccagaaagaaaggatttattcaaagtcacgaaacagctggtgagtggcagagttggggttgcagaacttaggttcctgactttcctctagcagtctctccagaggaacaagtccctgcttcctaaaggaagaaaagaatccggggagtggtggcagtgggaatacatagagcaagggcatctctgaaagtagctcccaaataacctgataaatacctcggatagaggcaaggctacacccctccccctgcccccactacacacaaacaagatcctcagctgaggactcagagcaggagtaagggcacccctatcctccccatggctttgaaaagaagaaagaggggaaatttggagggatggtcaagttgatgattgaagagacaaagtagtgtaggaaaatctcaatgtttcttgcacagtcatttgttgaaaatgtgtcagcaagtacaagcccatcttaaactggcaatgagacatctgaaatagattatttaagccagggaggcagtattgcaaggaagaacatggctatcaacacttgtttgtctgactcagaggaataaaacatagtaaattttgccttagcgggccacccacattcattgggggaagaaacaattgaggtggggggaaaacagaacagatgaaccttcatggagtttcacaagagtccacatggttgtgtcccttattttcagaaaatgtgaaattggaaaatacgcacttgtgaaagctgaagatgtcacagaaatcttcagaggatttatttagatggtcgtatcctccgctgtcaactggatgaatcagtgtgcaatattttgatgtgaatgtaaccgcctattgggccccatttactctgtgcccaccttgggctttgcttctctctaagcatctttacctgctttttctttttatctaggatatcctttctcttggctctccaggtttaactcataagttttcctctttcccaaagcctctctccctcccttccaaatggaaataatttctcttcctttgaatttccatagcagctcatctgtacctctctcatgacacactttctacatgggggtagagcaatttctgtgcaggccttaccttttctactaaatgaagcctgctgtgggagaaatctgtgtccgtgttttctttgtactgcccacagcggctagcccattgctttgggcattgtaggcactcggtaaatatttgttgaatgaatgcatgagaggttgaatgaatgcatgagagaatgaatgaatggaatttatcctgggaacacacattttgcatagtgaggtatgtgattaaacaaacaaaaaaaaattgtcctaagacaatttgtctttttatgcagctgccctctcagtctcctagataagttccgccattctaaggcaaaagcttaaagtgtaataaaaatttatctaattcacgatcaagtgaaaatactttgggcccagagccaaagaatattattggagtgaactttttttaacaccctaaatttaaccagctggaattctttttttaagtaccatcctattcaaccttttgaaatgaaggatttgccttttagtgggaaatctgcatttcaacacaaagatggaacacaatgtctttggcttagttgcttttcagaaaagcaagattttttttttttggaattatatgctttgcttatgttaaagacacagcttgcagaaaaattttgtttaggcctgacagattggtggctggcatttttatagataaaggggcacgcaaaatgtcatctctacttcctccctttattgagaaaaagcctaggaggagaactcttaaaaggtgaagttagtaacctgttgtttgagtaatcaaggctctaagaggatagcattgatcaaaaaagagttttaaaatgagtgattgatgttattaaagtcactggtgaagtatcaaggaatctaaggaccatgagagagtttcagggaagaaattctatattgtagtgtctataattattgctttcttttgtttttgcagaatacactttttaaagaacatcaggatttggtaaaacagccagtaaaaaagcaatgaaggaaaaaaaatgcacatgtaaatgctcatttctagaacaaaagagagtgcgattttgacaatatcagaaggttaattaagaagtctgtgagtgatgataaagctggcacattttcattacagattgacacaactcaagtcacaggcatagctaatgtttgctctataatactctgataagtcagagaatctaagtgagaagaactggtatctatggtaaacatagggtcaagagctagatgcggctgaatagaaaggacatttactttgcagttaggtaaagaagcctctagctcagactagctgcactgttgttatttgtgtggcttgaacctagtaatcggattcagaactggaatgggttccttcagggtactttacaaacgttcaggatgcattttaagtgtagtctagaaggtggtacatggaagagctgagggacttgaggattatggactgcgaaaggactgtaggtagtcctgtattttggcctgtcaccaatatagagacccctcctcatcatagtgtcatccattctctttttgaagacccagggtgaaagaaagggggtcacagtgtcacgagatagcccattccacgtgggacagctctactgcttttgtgcctgtctcactgaaaaaaaaaaaaaaacagggaaattatctaaaaacatatgtttaggaaatatacacacattcacacacgtacacagacacatatgcacacactcacatatacacacacatgaacacgctaacacacatgtgcatgcacatgctaacacatgcacaagcatacacacacatgcacacagtcacaatatacacacatgcacatgctcacaaacacatatgcatgcacacgctaacacacatatgtacacataaatgcttgcaaacacacacacacgtacattttagtgaatagcacacatctatgtactcctgtggagagtcctgtggttttaatacctgttaaagttgggctcccaaagcagtcattaaacgtgttggaatgatgctttttgcttagctgttttggcacatttggaaatctgcagtattacctgttgattagtagacagtaatgtggctgtattacacacccagtgattagtttcagaaacaaatagcatgttaatagtcaaggaatctttgagatgttcttgaggaaaccaaaaaacttgatttaatgacttaaattccaggaacatcccactgggcttagagctctttgtcaaaagttggtacccaatatatgtagaaatgtaaagtgaccaaatgtataacattaaatcaaagccattcccagtttgctgcatattttttaatgaaacctgaaaaataagagtcactatttttaaattcagccataaggaaactttgcaacctaataatgtgtaaggcatttctgaggccccaagtggaaatactgggtctagagagacctttatgaaatagaacaggttgaaacaccttccaccagaaaagtgtaagacatttgaaaaaagattgagtcagaaaagggaaatgtgtcccatttgagagaccagaaagggaaacaagagtccagttcctgctgtgtccgtgcagttgccacagctgcgttcgctgacatgtcggctttaatggaagcagtgaggacacaatctgtctggcacaagctggtttgggtgttgtctcatgctaagaaggccctggacctgatggagagcctggacctgttccctgtccttatcaatgacagacggagggtggaacctgaatttcctaatggagggatccttagggattccctaagcttaatttgtttttgactgttccagtcctaaaggaggtgggtcctggacaggagggaaaacagcctcatggcccatgggtctctgcccagggaatttcaaagcttccagcgttcatacttcccttaccctaagacagcagtgctgattcagcttgagtgtgcatgagaatcacctggagaatttattcaacatagaaggctgcttccccaccctcaatttctgattcagtaagtctgaggtggtgcccaagaatttgcattttgaacaaactcccaggtgatgctgatcgggggtgggcctgggtctgcgctgtgagaatcacttgcctaagagcactaacaaagaaaaaaagaggacataactagatcacccacttcctagccagcaaccagagcccatctctggctggggagaatgaaagcgaaggtgggaaaagaagaggccctcaaccaggggcagctccttttccccaccttggcctgggaaggcagagctgctcctcgagtttgacgctcagaagcattaattgtgatactttactttgcctaagccgtgatgaaataattgaaggcatcatagcaagaagttaagccctagggaggctattaacaatttagcatttccagttcatgtgggaatgtcgattttacttaccaaagagaatattatggatgtgtttagtggaagaagcagcagaatcagctggggtccccagttggctttgctttgaccctcttcctgaaggaagataaatgcaagggtgagtctcacaaagacagtgtgctttttttctaaagtaaatagcttcttaggctgatagaaatgtttgtagctgtctaattctgcaggggaagcagaggtagagggtgaacacagcaaaggtgaggccaggaggcccaggcagcagagcaggccttgttttccaattgtgagaccaagtcagttcattggcacctttcgaaagccccatgtagcgctgctgggctggaccctcccccaagacggttaagtactgcttaatggatcagtagaaacaggaccttcttgttgggcagtgaagaccacggcaggagcagcaggggggaagagacaaattcccaggaaagaccactggatcaggagtcaggagattaattctaatcttcacattgtggttaatcatcagtgtagccatgggcaagtcacttaatttctcatggcctcagtttccccatctgtaaaatgaagggacagacttgatgatagctagggttttttacaacttagaaaacaaaaacaaaaacaaaaacaaaaacaaactatgctgccagatagtcagatgagacctcactttgccacacggccagacactgtagagatctggtcctgccgtcagcttgtttagggctaatgggtttgtagacaagtttgccaacaagagattcatgcgaggggctaggcatggattaggttagcagttctcccatttcttgctggaggcctgctgaagcacttcagggtctcttcccagagtaagtggcagagaatttgaaatttgatactccccatacaaggatccaagtacctgttgcgtttatgctgggatcacagagatacctgggttgcctgtgtttcctaagaaaaggatgtctgttttggcagcaaacttagtgaacggctgaggcaaaaacaagtgcaaagatggattctcagatttctcattgaaaaataccatgacaaaatctgtagtaattttacgccacactctcaattcacttgacagaaacagtcaaatgtagacatacttgtttgttaagtccggtcttcctgcttgtgttggttcactttgtggtgtttattttgttttgggtcagagaggatgaaatgtctctgtagatgttctcaggctaggtggtgcttccaccagggcttccctctgcaggcctggtaacagcagacctatgctgtctgtgtaagagccttctcagcagcacaccatcgttacccaccaggctccttgcgaaaggaaatcttgtcccaactgccttggctgtgcttggcagtgtgctctatataaggagaacaggatgtattttacacttgagacctgctatcctagagtacaacaacaacacttctaagtgctcttaatattaagctaatggaaaacatactgtttgttcaccatcaaagtctgtttttcttgtctcccgccctccccaatcatcatgaactccaaacctctagaacacacagagcgtctcctgcaccatctatcctccagtctgtctcaagatggacagctacatggttagttagctagaggaggacttggaaaagctaggcacttaccacataaaccgtaaaatccccagattgcacaaaccaaattttcctcttctcaaaaaaatctcagtgctacaaatgtttcattgactattagattcattttattagtgtgagaagtcacttgtcttcaccagagtacaacaaagtgcagtaaaatggtgaagatgggtcagggtttctgggtgctggcattattggaatgctggttctttccttgtcatttaatggtcaaagttatttggaccccagaagtctaatctttatcttccattgctttgtattgtgagaagccacatctgtgtaaggtttccagttgacaggattctagagtatggcccagctcagtccagaaatgcccaggtttcccctatcactgaaggcgctatcataaatatagcatgggaagaggggggcagagggacagagaaagcaaagtgggactctgtcccataaaaaacgattcacaaatctactcatttcctatcagcattttgctttttgcttgggtttgtctataaagtaaagttaatgtatgcatgtaaaccagccttgcagataaaatccccccatgtttccaggctacccacaatattaccagttttccccttgctgcttacacatcttctttccacaagacaataatcaaacaacaacaaataaataagcaaatgaaccaaagaccacctctcccctttcctaaaacaaaccctttcacttttgtcaaaaagaccgaaattgaaaacaaaacagaaactctgggaaataactcaccactcttcttttgtttcaggccttgggcctgttaactatctgcaaggctgttgtaatgatgttgtaatctattttaatggaattgaaatgtgatatcctgtggtttatgatgcacgttgtttgtagctgtagtgcttgattttgggtttctttcacagataaacttctgcactggaggggcctctcctcccctcgttctgcacatggagctctaatccccacgcctgggatgagtgcagaatatgccccgcagggtatttgtaagttgagccttatttcttctacaaatgtccatgtgtatagagatgagaatttctggaaattgcccttactttttaagtactgaaggagttacttccaaaatagattgtcatatgtattattccattactcacttggcagccgctccccactccactcagccccagagggacttcttccctcccctttttctttcctcactggaggctgggagctgatagtagctcatccctgtgggtcttctccccagggtcttgtcttgctccgtggctagtgattgaagatgcctgtgcctctggagcccattttattactggacattcactcctgtggcctcatttaggactttgggtatagtccatggcacacatctttagccaaggccagaatcaaaaggagtcagtttagggttattccagagttattccaatgcatattccttatgtatttacatgtgtatttgaacatagtatatgttgtatattcatgcccacacataattttgactaatttttctcctggttttagagaaaaatgcacatcattgtagttaaaatgtgaaggctctactatcaccaccaccaccaccaccatcaccaccaccaccacaaccaccactgccaccatcaccaccaccaccacaaccaccaccatcactaccaccaccaccatcaccaccagtaccatcaccaccatcaccaccactaccaccaccaccaccatcaccaccaccaccattaccaccaccatcactaccaccaccaccatcaccaccagtaccatcaccaccaccaccatcactaccaccaccaccaccaccaccattaccaccaccatcactaccaccaccaccatcaccaccagtaccatcaccaccagtagcatcaccaccaccaccaccatcaccatcaccaccagtaccatcaccaccagtaccatcaccatcaacaccaccatctccaccaccaccattaccaccaccatcactaccaccaccaccatcaccaccagtaccatcaccaccagtaccatcaccaccaccaccaccatcaccatcaccaccagtaccatcaccatcatcaccaccatcaccaccaccaccattaccaccaccatcactaccaccaccaccaccatcaccaccaccaccattaccaccaccatcactaccaccaccaccatcaccagtaccatcaccatcaccatcaccaccagtaccatcaccatcatcaccaccatcaccaccaccaccattaccaccaccatcaccaccaccaccattaccaccaccatcactaccaccaccaccatcaccagtaccatcaccatcaccatcaccaccagtaccatcaccatcatcaccaccatcaccaccaccaccattaccaccaccatcactaccaccaccaccaccatcaccaccaccaccattaccaccaccatcactaccaccaccaccaccatcaccaccaccaccattaccaccaccatcactaccaccaccaccatcaccagtaccatcaccgccatcaccaccaccatcaccaccaccaccaccaccatcaccaccaccaccaccaccatcaccaccaacaccaccatcaccaccaccaccaccactaccaccaccatcatcaccaccaccaccaccaccaccactgccaccaccatttacttgttcaagtgagcttttatagtagggaccattttatgaaacttaaatttgtccatttatacaaatgttttctgaaagatactgttttagaaaataatacagtttgcttctctgtgtaggaacacatggtatgaatcatgcatggctaaaaggttagggggtgggcagtgattccaccctaaacacaaaaaagcaggttcaagaagaaaagaagtgtgacatctaatttttatttgaaagtaaatgaaaaataacctgctgtggaaagaaaaaaaaagaaaaggaaaaaggtcatggagagagaataacaaagagcaagatgccagagttaaggctctaagggggactgtttttagatgggagggagatgacacttacccatcttgtaaatggtatctgaagagcagggcatgcaccctgagaccagattcaaagccagttgtttatttttgttaactcctaggtaatcctaggtaacaaagagttattgtgtgaatttcataagccctcaggtcctgagggctgggtggttcaggggttaaaagcacctcatctgctcccttcccccaagctgggcctaagcctgggttaggtcacagattgcagaaggtttaggaggttgggctcacggtttctagtccctgcatgctggctgggtggggagagctctcctgttgctgggggcatctggggcctgcatggggctgtggaaacggagccacttttggagggaagggatagaagggagttgagcagttcagaggagggtggagttgagaggccaagggctgttgccagggaaacatagttctcggtcttcagcctggtcttcctgagggctgggagtttgatttgactggtaggaaagtctgagcttgatagggaacccctgtcctctcccaccttcccacaaagggagggtacatagtttgctggtgcccctgctggcaggaccaatttaggagtgaccagaacaaggtatgtggaagtgggttgtgggggtccagaaagctctagaacaaacctgatgcccattccacttggcggcattaacctgctgcccctggcttccagagctcatagcacttccctgtggccactctgctgtgtgccagtcacccctgctctttaactagagcctccttttggcctgggttaaggcctggactgggaccttcctctggaagccgttcggggtgtgtaatgtggttagtcattaccctcagtaattaatcacccctggtagtaatgaaaactcacattcacattcgacctgatagtttacagagggcttttatatacttctgtcatttgaacttcccaacaattcttacaggtactgtttttatgctcattttacagataggaattccaagactcagagaaatcaaatgactatcccagagttacaatctagtggataatagagctaggcctccagtctcagacctccttgttcttctgaatcttgaggcttagatcacatgactttttcacattggtgacatactagaaatgggggtcattccttcccataaagtaaaatgaaataaaataaaagccagtaggtgggctaatagctgattttaacccttttgatgtctcaagttcctatgcttaggggccaggtgtcagtttattgctctaaatcaaaacaatccccgtaaatgcccaatgaggctctcaaattgagaagttgattttcatcagagtaaatgaagaatattattatattttacacatcaataaatcaatgtagccctaattttgccacacaggaaatcaattccagtctttctaaatcatcaaagatgttatgaacaaagtaatttcacaaattatggcaagtaacacatttattgatgactgcagtttaggaatttagaatctgtgagcactgtaatataatatggtacaccggcatgagctgagtgaaatacagattatatggtgaaattgtaatgcatcatttgctattagtggactggtaataattaccagtttcaaagcagctctctccatgtaatctttagtctcaatcgtaacagcccttctcattgacattatgattacactagctgccctcatgatctagaatatctagttgatgggaatactaaaatgcgatagtgaaaactgtatgttgtatgctcattataagataaaatgccattttctctgacctgatgtatgagagagaggggaggataacatcacagtgttaacatactgtagcatgatcacataactggctctgaaaaaaagtttaggatgctcagggcagcaaaataaaatggacttttctcatttaagcctttttgaaaggatacaaatgagatccttgatgtagtgctgtatgccacagattttggcatttatcaatgactacaattcatggcacatgtgaaaccagcaccactaattatgagtctagtcctggatttcaatcgatgttttataaggtaaaatataattttaaggcatttggagtgatgaacgtgttaaggacttggattatcagacaaatctttttacttgcccaactcagatcgtcaggctaaataggaatgatagtcacccagagatctagggaggacaaggaggaagccacagaggatcatgtagttggaaccagatagttttttttccagcctatttgggacccaagttattgttcaacaacaacaaaaaatttataaaaatgttctcaatgaagctttttatttccctttgaagagaggaggcaaacaaaaataggcagataatgtgatactaatgtcagcgttttctttcaaaatctttctgccttttttcccccttccacattagacaaatgtttgaaacctaattttggtatcttaccatctaatcttgtttaagagatttacccaggagtgagatatattgagtgggattataaatgcgttgtaaagtaaattacaaggtcagggcaggagtccattatttagacaagtgcttgagcgaggctggcttattttggaataccagtgtttgggggctcctgagaagaccctgccggcttttctttctgacttgctaaatggaggcatcatataattgattaattcctcattctcactcttaacctccctggtagatttttttttttttccttcttagaaagttactgacaaatactagctgtggccttaaagaactcttgcagcccttcttttaaaagaaggagaaaagtttgttatttctcagttatattttaaggctttttttttcagaatctctgggaagttttgtttttctcatcctcgtcctttggctaccattacttctgccctttttaatgttgcagttgactagtaaactgttggtcagttattccatatatatatatatttaatgtagctatctccccatatatatttaatttagccatctccccaaatgaaatattttgtgaagtcaagctggcccttctttgccaaagtggcatttaccactcttgggttcttttcagcaagggaaataatgtgacttaagcagggcccctctccagacggcttggctactggccagagttgactagctgaactgtatctttctgtttctttctcaactggagctgagtcccagccgagggcgcaggatgttgtataatttggttcacgttgttagcctctcaaaacaatgaggaggaggatagtgtagcatttctcagcctgctgcctgtcatggcgctggctgttttaactgttccttaaactaggatgctgtgtctgcttaagtcggcaccagccactcctcctaacttttccagacttgcatttgtctgaccgggggacaactcctaaagattggatacagcctatccgttaaatctgaatgaagtttttctttcagattttttaaacattctttgagataaaaatggacgtccccatggggtgttgtggaaccaaaattgggactcactgatcctcccacagtctggggtgtgagaatgttgctagtcttttttccacggaagtattttatgagtaccctctcattttaacaatatcaacaattagtgtgtttcaggctaatgctgaaagcatctttagggccatagaacattgtagtgagttgaccttcttccccttttttgatacctctatgaaatgtttgcctatttagaaagttcacctgtcacccaggggggaatagaaagctgggatttaggaagccaaaaagtttccttgggtcaccttgtccaagtttctcacttaacaaggaggaaacagaggcacatggagatgagatggcttgccccaaactacagctgatggaactggaaagtttagaagacatttgttgaggtgcctagaatgtagggaccttcatcctcaagccagaactggtcaggatttttctgctttggggattggatataaaatttctagaactgagtttaatggcaggaagatcaattggaccaatatttactgggtacccatgctcagacgtgccaggcacagggggtaggtcagtgagggcttaggccttggggttgaggggtgggggcagggaaggctggaggtggaacataaataagcaattgctgatgcccgcctcagtgattaaacattgatgttggtgttgtattattttgcaggtaaagatgagcccagcagctacacatgtacaacttgcaaacagccattcaccagtgcatggtttctcttgcaacacgcacagaacactcatggattaagaatctacttagaaagcgaacacggaagtcccctgaccccgcgggttggtatcccttcaggactaggtgcagaatgtccttcccagccacctctccatgggattcatattgcagacaataacccctttaacctgctaagaataccaggatcagtatcgagagaggcttccggcctggcagaagggcgctttccacccactccccccctgtttagtccaccaccgagacatcacttggacccccaccgcatagagcgcctgggggcggaagagatggccctggccacccatcacccgagtgcctttgacagggtgctgcggttgaatccaatggctatggagcctcccgccatggatttctctaggagacttagagagctggcagggaacacgtctagcccaccgctgtccccaggccggcccagccctatgcaaaggttactgcaaccattccagccaggtagcaagccgcccttcctggcgacgccccccctccctcctctgcaatccgcccctcctccctcccagcccccggtcaagtccaagtcatgcgagttctgcggcaagacgttcaaatttcagagcaacctggtggtgcaccggcgcagccacacgggcgagaagccctacaagtgcaacctgtgcgaccacgcgtgcacccaggccagcaagctgaagcgccacatgaagacgcacatgcacaaatcgtcccccatgacggtcaagtccgacgacggtctctccaccgccagctccccggaacccggcaccagcgacttggtgggcagcgccagcagcgcgctcaagtccgtggtggccaagttcaagagcgagaacgaccccaacctgatcccggagaacggggacgaggaggaagaggaggacgacgaggaagaggaagaagaggaggaagaggaggaggaggagctgacggagagcgagagggtggactacggcttcgggctgagcctggaggcggcgcgccaccacgagaacagctcgcggggcgcggtcgtgggcgtgggcgacgagagccgcgccctgcccgacgtcatgcagggcatggtgctcagctccatgcagcacttcagcgaggccttccaccaggtcctgggcgagaagcataagcgcggccacctggccgaggccgagggccacagggacacttgcgacgaagactcggtggccggcgagtcggaccgcatagacgatggcactgttaatggccgcggctgctccccgggcgagtcggcctcggggggcctgtccaaaaagctgctgctgggcagccccagctcgctgagccccttctctaagcgcatcaagctcgagaaggagttcgacctgcccccggccgcgatgcccaacacggagaacgtgtactcgcagtggctcgccggctacgcggcctccaggcagctcaaagatcccttccttagcttcggagactccagacaatcgccttttgcctcctcgtcggagcactcctcggagaacgggagtttgcgcttctccacaccgcccggggagctggacggagggatctcggggcgcagcggcacgggaagtggagggagcacgccccatattagtggtccgggcccgggcaggcccagctcaaaagagggcagacgcagcgacacttgtgagtactgtgggaaagtcttcaagaactgtagcaatctcactgtccacaggagaagccacacgggcgaaaggccttataaatgcgagctgtgcaactatgcctgtgcccagagtagcaagctcaccaggcacatgaaaacgcatggccaggtggggaaggacgtttacaaatgtgaaatttgtaagatgccttttagcgtgtacagtaccctggagaaacacatgaaaaaatggcacagtgatcgagtgttgaataatgatataaaaactgaatagaggtatattaatacccctccctcactcccacctgacaccccctttttcaccactccccttccccatcgccctccagccccactccctgtaggatttttttctagtcccatgtgatttaaacaaacaaacaaacaaacagaagtaacgaagctaagaatatgagagtgcttgtcaccagcacacctgttttttttctttttctttttcttttttctttttccttttttttttttttcctttatgttctcaccgtttgaatgcatgatctgtatggggcaatactattgcattttacgcaaactttgagcctttctcttgtgcaataatttacatgttgtgtatgtttttttttaaacttagacagcatgtatggtatgttatggctattttaaattgtccctaattcgttgctgagcaaacatgttgctgtttccagttccgttctgagagaaaaagagagagagagagaaaaagaccatgctgcatacattctgtaatacatatcatgtacagttttattttataacgtgaggaggaaaaacagtctttggattaaccctctatagacagaatagatagcactgaaaaaaaatctctatgagctaaatgtctgtctctaaagggttaaatgtatcaattggaaaggaagaaaaaaggccttgaattgacaaattaacagaaaaacagaacaagtttattctatcatttggttttaaaatatgagtgccttggatctattaaaaccacatcgatggttctttctacttgttataaacttgtagcttaattcagcattgggtgaggtaataaaccttaggaactagcatataattctatattgtatttctcacaacaatggctacctaaaaagatgacccattatgtcctagttaatcatcatttttcctttagtttaattttataaacaaaactgattataccagtataaaagctactttgctcctggtgagagcttaaaagaaatgggctgttttgcccaaagttttattttttttaaacaatgattaaattgaatgtgtaatgtgcaaaagccctggaacgcaattaaatacactagtaaggagttcattttatgaagatatttgctttaataatgtctttttaaaaatactggcaccaaaagaaatagatccagatctacttggttgtcaagtggacaatcaaatgataaactttaagaccttgtataccatattgaaaggaagaggctgacaataaggtttgacagaggggaacagaagaaaataatatgatttattagcacaacgtggtactatttgccatttaaaactagaacaggtatataagctaatattgatacaatgatgattaactatgaattcttaagacttgcatttaaatgtgacattcttaaaaaaagaagagaaagaattttaagagtagcagtatatatgtctgtgctccctaaaagttgtacttcatttcttttccatacactgtgtgctatttgtgttaacatggaagaggattcattgtttttatttttatttttttaattttttcttttttattaagctagcatctgccccagttggtgttcaaatagcacttgactctgcctgtgatatctgtatcttttctctaatcagagatacagaggttgagtataaaataaacctgctcagataggacaattaagtgcactgtacaattttcccagtttacaggtctatacttaagggaaaagttgcaagaatgctgaaaaaaaattgaacacaatctcattgaggagcattttttaaaaactaaaaaaaaaaaaactttgccagccatttacttgactattgagcttacttacttggacgcaacattgcaagcgctgtgaatggaaacagaatacacttaacatagaaatgaatgattgctttcgcttctacagtgcaaggatttttttgtacaaaacttttttaaatataaatgttaagaaaaattttttttaaaaaacacttcattatgtttaggggggaactgcattttagggttccattgtcttggtggtgttacaagacttgttatccatttaaaaatggtagtggaaattctatgccttggatacacaccgctcttcaggttgtaaaaaaaaaaaacatacattggggaaaggtttaagattatatagtacttaaatataggaaaatgcacactcatgttgattcctatgctaaaatacatttatggtcttttttctgtatttctagaatggtatttgaattaaatgttcatctagtgttaggcactatagtatttatattgaagcttgtatttttaactgttgcttgttctcttaaaaggtatcaatgtaccttttttggtagtggaaaaaaaaaagacaggctgccacagtatatttttttaatttggcaggataatatagtgcaaattatttgtatgcttcaaaaaaaaaaaaaagagagaaacaaaaaagtgtgacattacagatgagaagccatataatggcggtttgggggagcctgctagaatgtcacatggatggctgtcataggggttgtacatatccttttttgttcctttttcctgctgccatactgtatgcagtactgcaagctaataacgttggtttgttatgtagtgtgctttttgtccctttccttctatcaccctacattccagcatcttaccttcatatgcagtaaaagaaagaaagaaaaaaaaaggaaaaaaaaaaaaaaccaatgttttgcagtttttttcattgccaaaaactaaatggtgctttatatttagattggaaagaatttcatatgcaaagcatattaaagagaaagcccgctttagtcaatacttttttgtaaatggcaatgcagaatattttgttattggccttttctattcctgtaatgaaagctgtttgtcgtaacttgaaattttatcttttactatgggagtcactatttattattgcttatgtgccctgttcaaaacagaggcacttaatttgatcttttatttttctttgtttttatttttttttttatttagatgaccaaaggtcattacaacctggctttttattgtatttgtttctggtctttgttaagttctattggaaaaaccactgtctgtgtttttttggcagttgtctgcattaacctgttcatacacccattttgtccctttattgaaaaaataaaaaaaattaaagtacacattgtaagcttcttgtgtcctcatttgacacactctgtaaattacttgcaagaaaataacaggttttaagagaaggccagtcagtctttttcaggattatttctatgggcattctgatgcgtgtattataccctaaaggaacataaagtacttactatattaaaatagacatatctcaaaccctggacatagttttaaggctttccagtttagaatagttttcaagaaatggaaggtgttttcagtctgatgttaaaaacttactccatctcttagcagaaatccattcaaacataagtgaaaaaacttgctggtaatagcatcttaaacttttatttcctttaaattttttgctgttcttgttgtctaaaagttcttttctattctcccatccttgctttatcttagaacataatgtaaaaaagatttttttaaaaaaaatcagctctttggtttccatgtaagagtcttttctcataacaaaataaccccacttttgaaatctaaaaatctggaaacaaaggcatcaggttttgttttgttttgttttgttttgtttaaaaaagagggagaaaaaaagagagagacgaaagaaaagaaagcagccactaggggtgtagccagacatagtgaaatctttggaatcagccactgatttcctgagatgcatagtggtttgccttgtggttctgagatcccaggaaccctagatgctacagattactttaggtgttttgatagggtcttcctggatgacagcaaataagggcgggaatacccttcaattatcttctgaccagccagttaggtctattttaaaaatccttagaaatctgtgttgtcacttttacaaatactgcatgttgcagcatctatttgctttactaaacacatacctctgtgatatcgtgtccctgttcccagtgtagatgaatgaatacgacattgttcttatttttgtaaaaaaccaaaacaaaagccgttctgttgtcttcttgtggtagcattttttgtcgctcagttcttatgccctagtgcctgtgaggtggccttttcatgtcatgccttttatctgaggcaagaatagttttatctttctaaagtataaagaaagtcaatgttttctgaaaagccagtttgggtgggaaggagagagtggggctagaggaatccactgagaaaggatgttggagaatattacataggaggtggggtggggtgggcgtgcggtaccttgagaacttgatgtttgtcactgaacttagaaaagatatactgtatgtgttttggattaggtttctccaaaactgaatccaaaatgctgctcaagacagatagaaataattccccagtgccatgccagctttagatgtggtgacttcgactccaccctattaaatgtccataaaacctctgtgtgtccctattactcttttattaggagctatgagtgcaactgtgtaggttttatatacagtattcattttaatttctcagtatatgctgctcttagcgtaattaggttttgcatcctgacagacagaattaatggtggatactgtacacttgtctgttcaaatttcttaaatcaaatggggaatggggaggagtgcaaacatctggtgataaatcacagattatgtttgatttacatggtcccaaagttaaataaatttactgggagatgggttcttcaggttacttagtctcctgacttattgacgccttctgataaaatattatttctgaagctgatgaacaatagaaacatgagaacctagccaacatgatatcacttataaatgatattttgtatccagaactctaaaatttaaaatcttaatataaaataacatgcacatttccaatagtaagatgaattcatgatcttttttttttaaatgaggaactactaagaacattaatgtctcttaaaatcctcaagtaagtttttgtaacaggcttgacgtgctgatggaatgttctctacatacctgaactgatgcttaaaatgttctttttaatcttcatttgagaacaacttaataaacaggaataccgcaaattctatttctcacagattttaaaccagaaactcttccagtgcctatattacctccttcctgaacccatttgctatcctctctttgtttaggacctacaaaaaggctggaaccaacacattacaaaggttgctaagaagtgaggtgaacacagttcttcatttgcactggccatggcagaaagtgtgaagtagttgagtttttcccagggcattctgtagatatagaactgtttatttaaataccatttttgtatatgcaataagtacatattgtatataatcataatgctagaagtgagaacttgaaaggaagtggcgggagatggcttaggtataattccaattggagaaataaggaaatgaggtggtttattcacagacacagtttgctgaaaggtactgggattatttcgggccttcctgaaaaggagttgagaagcctcaggccccatcctctcctgcttgtagtactttgctcacagagactgagggaggaaatacagtgttttcttgttttaagcctcttttccccctccgtacacacatgaacatgacttcttatgactgtgttgtaactgtgtgttcctcattacgattctgttactccattgtccctgggcctggtgtgttcaggaatgtacccatcccattctctttttttcagacaacttcccataaaaaaaaaattgtgggaactttgccgatatgaggatgggattggcagagttctctcaacctgcttggaaaaatgtttcttaaaagactgctaacttttaaaaggcatgagccatctagcagattttcctagttgtctcctaaagccctgcatatttcccaatagaaaataaacgaacccattgttagagaaatggacatcagaacacatagagggaattggtatgatgtgtatttactctagggctgctatagctatgaactgtggacatgggttgtccggtctgcacttctgcttgctggcatctcgttatcccattagcccgctgtttaatttactacatacagcacgaggccagtgactcagcctttaggggaatggggctgtttctctctctctctctctctttctctctctctatttcccagcgtcatctacggtcatgggataccattaattcctcccttccaaatgggaaagagaccaatccagttcacacgggtcattgtacttgagaacctaaacttggctgaacacagctcgatggttgatccaaatacgtttttcctttctgtaaagtggcaaaaactatttcaagggagcacgtgtatcagatctttcatagggatggtagaaaaggcaaattaagccatttccccaagtatcctctaaagcgggagcccctaaacccataggggggctgtgcttttaaatagctgtgaacgtggtacatgcccatgatatactttgtctattagaatttgaatattggtagcaggttggacgaaagggtttgattggggtatcagctaaaggggcctcgacgacagtgacttagcgctggactgggaatgggattccccagaacccacctggacgcagcatgcccctcagcccaggtctccgctgctctgctcaggggtgggatgcgtgagagcagctgagatccagaccccgggcctcctgcggcgccaagtcaggggagaggaggccccaggcccctgcttcgggtcgccatggcaacgaggcctggaatgccacagtggtagccctcttcctcggcacatccggactcccagttctgctgcttcaagtcaatgtccacagcaagggaggaaccccggaggaaaataaccactcccttcttcccttcaccattgccttcccccttccaaaaaagaaaagaaaactgcatgtttgaaagaaactacaggcagtttttggtgcaatttgagagcaactcttttgggttctggttttctcttcagagatttgttcgcctcttgtaaatcattggctgctttgacgttgaacttgatgacatttcatgttttcgttgtgctgcttttacatcagttttgattttttgtttctttataattttattattattttgagaaggtgtcccctttccctcctccctctcccgctctcctcaaccaaaggactgtttcttactaagttttctcagtcataagggcaagtgtttccttccaggtgtgtcccgagtttattaggactatcatacaattgggcaggggtggggggacctgggtcctccttggggggacggaagggagggaggcatgggaagacgactcagaggtcagagatacttggggaggggaggctgagtttgaaatcatgcttaagatgccagtggctcgacctgtggttggtttaagttctaatttttaaaaagctagttagagaacagaaaatcattgggccaagtcacacctgtactttttttttccccctcctctgtctccaacctctttctaggttcttcacacacccccattcggcgtagtacccagagagctcaagatgtgtggcagttttcggatggaagctcgagagcccttaagttctgagaaaatttgaagcccccaggggtggggtggacgcgtgccgcccagtcgacgtcagcgtggtctgtcatcctgctagtttgtgatgttttctgacagtagcctccaagaagccgttgtgcgaagacagagtcctgcagagtccttccagcctaggcctgcagcgccattttatttatattttttaataaaaagtaaaaacaaaaaaacagacccacattggaacagtgaatcagtcccatagagagggcccgtggaccatcgctgtcatgagtgatgccctggcccttctgaaaccagccaacctaattacctgtattgtggaaatgcgcatgagtccccaaccccttgtttctatacattctatgttgtcttttaaaaagtgtgcttaacattgacacaataaatgttggagctttaggtggtgtttgcttgttctttaatttttaatgcttataagacaatgaggctgcttatgattttgtatttctgtacctgtttcctacagacacccatcgggtgggtaggaggaacagatttgagaaatgggcaggagatgtaggaggggaactaggttaccgcttatcagatggcataaattttcaaggagaatcaaaatgcaaaacttgggaataaatcatagcaatatcataattaatgtagtagtaatattgctgtttattaatgctgaagtgtggttttcctaactgtctgacttataatttgcataccattaaataatgcataatatggcacgccgaatcctgtttttcaaatatatgcttttggtggctaccatgcaggatttgaatttgtcttttaatttagcttaggaaagaacatcactgggcgagcggtaaatcctaaagaaggtgataaatgtcagtagtttcttattaaatattctaattttaggttcccaaaccttcaggaaatatatcttaatgcagacaaacaaacataaaacttctttagtacttacatcaggaaatttggggcagattttagaggggggaaattataggaggaaagaagttcacatcagaacagacaatcacagcaatgctctattccttagaaattagtgccacaaataagttacatctacaaacaggtggtaaaaattctttctggcccagttaatttgcacagaacttttctcagtttggtattttttactgcttggagatccagaagagaattagaaacaacatagcaaattaaaataggtttgtcaataatagagctcagacacctgtgtgctgtagattcacatacaggccgtgaacctaagtggggaaaatcctacctatccaccttctggctagattacctagcttagtgaaaagatagccaaataattggcatgtgaattatttcctgcttattcataataaataatgactgtctacagtagtgaactaccttatactgtatacagtgctgtctcgtgcattatttcacctgctctctgggacagatctcacgacttctactttatggaggtggagattgaggcttaccaaggttaagggcttgccagaggccacatcagtaagagagaaagcagagaagccaggttttctggtttcttgtccagagctaatttcaccaaactctgtttaactgatcaaagggagtatcttttcctgtgttagcacataagtcataaatgttcacagacacacacatgtggcttacacatacagacccaggatggcctttggtaaaggcatgcagagttgcctcttcctaccaacagatgtgtgcactgagaaagggaggttgcagcctccttgccatcacctttcccctgtggcttttccatgacaaataaccctgattgcacgagtggcctgtttgtgacttcctatcaattagttgggacttccagacaagaagttatttcataaagaaaccctctccctgccccatgctctgcctatgtgttgctgaaacataagaccattagggtttctgtgatggcttcctccctaaatgtgctgaactccttgctgatgcctagaaagagtgacaccacttccaaagggaggccagaactgaaacaacaatcctgggtcttgagacaagttcagcctttgtaactgcacttggtggtcactacactttcatttctggtctgtgtttctacccccactttttatatatttcttctcagagtcagtttgtaaataagtggatatctctaaaagtgggatttttaaggggcaagaggataacagaagtggataaaggatattgttttatcctcttcactgtggagaagaaccccctcaaaacaaacagaacaaaaagactgtcttttcccatggcttttaaagttgaaagacaacaaaaatttatttacagaatttattaggaaacggtattgtgttagggctagccatttttttttttttttttttttttaagacagaatctcgctctgtcacccaggctggagtgcagtggcaaggactcagctcaccacaacctccgcctactgggttcaagggatcctcctgcctcagcttcccaagtagctgggactacaggcacgcgccaccacgcccagctaatattttttgtatttttagtagatacggcgtttcaccgtgttagccaggatggtctccatctcctgatctcgtgatccaccctcctaggcctcccatagtgctgggattagaggcattgcactacctcacctggcctagggctagacttttgaaaccccatacaagattgacaatttgggaagacatctctctgtgtgatgagtcaagatcatggttatccatgaatggcagaagcagggaagaggctcacaaatctgccaggggttctcactgtgtcctctctgcagagtggaacttcagattgcagagagataaattggttgcctgacatgagcacagactagaggacagagtcccagccacttggatggaggagaccaaatacagggcattgtttttactttcccaagccttttgtgggctgttcagattattattattattattattattattattattattattattattgttgagatggagtctcactctattgcccaggctggagtgcaatggcacgatcttggctcactgcaacctctacctcccgggttcaagtggttctcctgcctcagcctcctgagtggctgggattacaggtgcgtaccacctggctaatttttgtatttttagtagagacggggtttcaccatgttggtcaggctggtctcgaactcctgacctcatgagccacctgcctcggcctcccaaagtgctgggattacaggtgtaagccaccgcgcccggacagattattacactgtataaaaaaggtctgttagaattggggtccatgatgggagagaaagacactcaaagcccctgcagcacccagcatccagcatgttgaatatcagcctgtttgagaaataattgtttcaaaaaccagtgatcatttaaagaaaactcttaggcaaggagtgcaatcttggaatctgctgaggtctaactgagtgccccaaaccttggcagcatattttctgggcacttttgcttggagtttccaagagcattcagattaaaaccaagcccttcaagtggtcaggaatatctttcaggttttgtatgcgttgacatgattttttttttttttgatagtgaggttaacattgacgaagatggctatatttattcctatttttaaaaattcttattttataattcttattttataaatcagtgtccccggaagtaatagtaggattagaatggaagtattttgtaggctgttggttctgttcttacagtatgccacatagctttgactccttttggagtatagtgtgaaggaagcagatttgaggaattttgagtctggtggaagttccaaaataactggtgatgcaagcacaccttccttcttcaagagttcatcttgagttcctaaccagcagagaaacaatattatatttctttcctctgactgcctaggagagacagtactcttcagtttgcattcccctggagttacattaagtcatggaacttctcacttccagtaaaatccagaagcagtcattgtctgtttttctatcttagtttaaattaggatatcttattacgaaccacatggcctttctttttgctttgtattttaaaaaatgctcccaggaagtacttaagctttatagaatacttttatatacatgatagaatcaattttccttgtgattctataaattagataagaaaagaatagactgaagttgaaaggaatcctagtaatcactcattttagagatcagaataataagggcccaaagattaagtgaagtacctaagatcacagtgtgaaaaaaacatcatagccaagcttgaaaccacacagttagtggctgagtcagaattggaacccaagtctcccagctcctgtgcaaaggaattcaagtggcaaatctctccctagtgacccactaaattcagaaataggaatagcagaaaagtatgcatttcagaaggatttaagaacaaacccaaaagcttgttttggtagtgccagtactagcagggaacatgtcagcctgccccatacggaaaacaggtttctaaaatagtattcctatgacggagaagatttaggtcacaacctgaatggattcttctttaattcacccctccaacggtagaaataaacctggagaccaagaattgctgagagacagcttttaaagttaaaagggctgctcatcaaaccaaattcatctccaatgacttaagtgggtctcacaatctgttccattctctagacaagatataagagaaacacccactgaatttgaattttgatgccacatcacatcctgttagagaatccaaataaccaatagcataacctgtatctttttctttcttttttttttttgagatggagtctcaccctgtctcccaggctggagtgcagtggcgtgatctcggctcaccgcaacctctgcctccctggttcaagtgattcccctgcctcagcctcctgagtagctggaactacaggcaaaagccaccatgcccagctaattttttgtatttttagtagaaatggagtttcaccatgttagccaggctggtctcaaactcctgacctcaggtgattcgcccaccttggcctcccaaagtgctgggattacaggcgtgagccaccacacccggcctctgtggccatttcttttcttgccagtcaccctttgattcacatttatttctagtggacatgggttgactttgaatgtcttggggcccggtagggcagcagttgctgtgcgcagcagctgtttagagcctgcacaggcaaagccctccctgaaataggagaaagacagcgggaagcctcactgagcaacagcaaatcaaacatccctgttgaggatggtctgagacgaagtaatttgcctgatttttcccccagtgatagttgcctgaatttccttagatggtaatgcaagcagacaactcccgctgccatttctgaaccttctgcttctctctccctgctgatttgtccctcttctagaatacgtagaaagccaattgagaggtaggaagagattagcttcctttgggctctaagatttgcagttactcatgcttctatttcagagtgactgattttacctgttgcttcaccacacaaaggggaaaaacccaaaatgcaaatattcctcttcagaaactcacccaaagctcagaactcaggaacacaagagatttttctttaaagcggtcctttgtgtggatttgcctgcagccaatatgccttatttgtggaactctttttatttttcagcttctctgagagcacattttcttttccctctgacacaggcctatgtgttgggggcaggatgaggatggggttcctgtgctttttggtctggactggtaaatggtgctgttctctgagcccacagctcagggttatgatcttggctttatcattgccatgctgacccacctggtgtcccctctttctgcatgtgacacattcaaggcccattcctccctctgaaaaaggaaggacacaatctgtttcctacctcctacttcccagcagcacgcaacagtcacagcagtgggagacattcttgtgttccggcctcttgggactggagtgttgacatccagtcttgatggccacggggatgtggggttgtggtccatgttaagggtgggcttttctttgcttttggctagtaaacccatttttctttataagcttatgtcacagaaaaaaagcagcaagcgatttttgttcgaaaaccaaagctgtcgtcatgcacacattttttacacagttgcttgtacagtgctcagggtgcatcttatcactttggttgtactttaaggttgggggtccctcttcaccccttttcctgctggagggtagcatggagggcagccctttcccacagggcctcggcatctcactgagggtggcaaagcaccaaacttcttcgggtgcctggagatccaggcccagatgtttctgaaatgtgatctctgactgagaacctaacccttctcgtccttgattggcagactgcccagagcttggtaaagaggaaaacgtaggttaaagtagaaataatcatatcagctaatgtttattgagaatttactatgttctaggcacagtgataaggattttccaagcatgttcttttttttttttttgagatggagttttgctattgttgcccaggctggagtccaatggcatgatctcagctcactgcaacctccgcctcccggattcaagcaattctcctacctcagcctccagagtagctgggattataggcacgtgccaccacgcccagctaatttttatatttttagtagagacgggctttcactatgttggttagactggtctcgaactcctgacctcaggtgatccacccaccttggcctcccaaagtgctgggattacagacgtgagccaccgtgcctggcctccatgcatgttcttatttcttcttcctgatcatcgtgtggtataggtactattattattttcattctacttaagcttagagagactttaaatgacatgtctaaggttttgcaaatagtactactactgtcatataactacagaatgcttactcccaacctctaccttttgactcctagtatctacctcatcctgaaattttcttaccacttgtaatgccaatgctgagtttaccatcttaaaaaattaacagcagtgctaattaaactgattaagaagtctattcaaagtggttttgctttgagggctctggttctgcagactatggagcaaggctggtgccatttcgtgctgtggtacttgcatttctgtccatttctgatgctgggaggaccggtatggttttgtgaggcatatctgagaaattcactctccagtattctccatctgccgtatggctcattcatttgttcaatcaacaaatatttattaggttcctgctatatgcaacctgctgagttaagtgctggggaagggatgcaaagaggtaaaaggcacagacattgtgcatcagaaattgctaccagtggagaattaaattaattagaatcctattaaataactggttgcagttaagctggtacggtgagaatagtgggctttacaaaatgctgatatagaattcactttgcatgtgtagctagcagtcccaggcaaagggcctgagtactctggaatgaatgggaacgttattcttcatacttcatcagtggtacacacacttaaaacttgtttttcaaatggtagggatgagtatacattgatgtttcctcacatatttggcccagtccttcttgtaaataacaacaccaatgatttagaaagaggttagtaacaggaacacaatctttgtaaagataagagacctgtaacaggggataagtccacgtattttaaccttctgaactgacctctaactgattacctgccactaattcattccaaatggaacaagacaaagaaatctttacttctcctgtttgcagtattatctttctcagatcatcagcataagcaaatattttcccccagcctgcagtgtgcaagaggctctaggcacgtggggaactataaataggtacaagatcaaacccctgtcctcaaagggattacagttggtcctatgggggggctaagattatatgcataaaagcacataacaataggagagggtaatatgattaatccattagtgagagatgccaactggaggaatgcagaggaagataatttctctgaggcccacagagatgttaggcttttagccatcaaagacaggctagaatttagatgacagagagaaaagatgacagcaaaccagttcaaggcagtactgcagtgtctggagggcactgaccagaccagtatggcaggaagaggtttgtctatgaaactagtggaacataaggtgggaaactaatttggggccatgttatggagaaattttgacaataggccaaggggcttgtattttatcttatagtcaataacattttcttaaatctttttttttttttttttttgagactgagtttcactcttgttgcccaagctagagtgcaatggcatgatcttggctcactgcaacctccgcctcccaggttccagcaattctcctgcctcagcctcccgagtagctggaattacaggtgcccaccaccacgcctggctaattttttgtatttttagtagagacagggtttcatcatgttggccaggctggtcttgaactcctgacctcaggcgatccacccgcctcagcctcccaaagtgctgggattacaggagtgagccatcgcacctggcctttcttaaatcttatagtcagttaatgattattcaaaatcatgtccatagaaaagttttggaagagtgtagcagggcatgaaatagattgaaagggaattcaaaacaagccaagagaccagtagaaggccgatcctggaaggcactggttgtttcattgaaggattctgctgtgcatacagtacttgggttaaactatgtagtcatccttgacacattcaaatagacattgaccctgttgtttgaagctgtatctaaattccccatttgtgctggtctagacccatcaaagactgtagaagcttgaaaaagttcttccttatgggttgatcccacaccacaccacaccacaaacagcctaaagataaagaccttgaggcccaaacaggccagttagttcctagggattgactatttttacaacacaaaggacgacttcatgtctcattaagcacttaacactttagtatcatgtctcaaagcaaaatgataaacctaacagaaaaaagaatagaacgctacaagatttttgcagatcagagaggtacaaatacttcttttttgaggggagatttaagaatttttttctttttgtagacacagggtcttgttttgttgccaggctggtctcaaactcctggcttcaaatgatcctcctgccttggcctccccaggtgctgggattataggcgtgagccaccacccagctgtgatttaagaattttttgattctcctatttgtaaaagttacattatattgttttttctttgcaatatgcttgttggtacaggcccgtgtcctgtaataatattattttattgccatttggccacaacattagatgaatttcgtaataaaggcatggattagaataagcaagcatgtatatacataaccaaagaagcattctctgcacaaagtaaggcagtgcaggctggggcttcactctcttggagcttgcatttcaaaaatagagacttggtatttttgtactgcagtcataagtcatatcatctggtgtccttccctatctctctcccccatgcctactatcctgtttctcctggaagcaggactagtctatgactgtccagtgtcttaagtcataatatttagggcatataaagaattcctttttggtgctggattgcaaactctctatttcatcctagagtttctcccagagctctgtggtctccactcctgtgacctgccatggccacaagtctcagcaatgcccaccctgcgacacccccacctcaggacggtggcctaggagcaagcgtgtaaataaatgctaaggatcagtcacaagggaacggccgggaggcgtctgaggggttcaacacacatggaagtgttcccctgaggtgtgaaaacactctgctattaccaggacgccccatatttcccctcccactgaaatatagtaaagtgtaatgaaaaagtgaggtatagaccttgagtggggacagggaggaaagcaaggcctgtgtgagatgaagtctgtgagcaggcaaactt

SEQ ID NO: 2687 - DNA, 1293 bp, Homo sapiens
gccaccgccgcggcgctcgctgcggccactggcactgatgaagatattttctctggagtctccttctttctaacccggctctcccgatgtgaaccgagccgtcgtccgcccgccgccgccgccgccgccgccgccgcccgccccgcagcccaccatgtctcgccgcaagcaaggcaaaccccagcacttaagcaaacgggaattctcgcccgagcctcttgaagccattcttacagatgatgaaccagaccacggcccgttgggagctccagaaggggatcatgacctcctcacctgtgggcagtgccagatgaacttcccattgggggacattcttatttttatcgagcacaaacggaaacaatgcaatggcagcctctgcttagaaaaagctgtggataagccaccttccccttcaccaatcgagatgaaaaaagcatccaatcccgtggaggttggcatccaggtcacgccagaggatgacgattgtttatcaacgtcatctagaggaatttgccccaaacaggaacacatagcagataaacttctgcactggaggggcctctcctcccctcgttctgcacatggagctctaatccccacgcctgggatgagtgcagaatatgccccgcagggtatttgtaaagatgagcccagcagctacacatgtacaacttgcaaacagccattcaccagtgcatggtttctcttgcaacacgcacagaacactcatggattaagaatctacttagaaagcgaacacggaagtcccctgaccccgcgggttcttcacacacccccattcggcgtagtacccagagagctcaagatgtgtggcagttttcggatggaagctcgagagcccttaagttctgagaaaatttgaagcccccaggggtggggtggacgcgtgccgcccagtcgacgtcagcgtggtctgtcatcctgctagtttgtgatgttttctgacagtagcctccaagaagccgttgtgcgaagacagagtcctgcagagtccttccagcctaggcctgcagcgccattttatttatattttttaataaaaagtaaaaacaaaaaaacagacccacattggaacagtgaatcagtcccatagagagggcccgtggaccatcgctgtcatgagtgatgccctggcccttctgaaaccagccaacctaattacctgtattgtggaaatgcgcatgagtccccaaccccttgtttctatacattctatgttgtcttttaaaaagtgtgcttaacattgacacaataaatgttggagcttta

SEQ ID NO: 2688 - protein, 241 aa, Homo sapiens
MSRRKQGKPQHLSKREFSPEPLEAILTDDEPDHGPLGAPEGDHDLLTCGQCQMNFPLGDILIFIEHKRKQCNGSLCLEKAVDKPPSPSPIEMKKNPVEVGIQVTPEDDDCLSTSSRGICPKQEHIADKLLHWRGLSSPRSAHGALIPTPGMSAEYAPQGICKDEPSSYTCTTCKQPFTSAWFLLQHAQNTHGLRIYLESEHGSPLTPRVLHTPPFGVVPRELKMCGSFRMEAREPLSSEKI

SEQ ID NO: 2689 - DNA, 1544 bp, Homo sapiens
cattggtgtgagcttccccttccctcctccccttctctcctgctcgccctgcccatgttttgtgtgtctctgtccatccagactcctgacgttcaagttcgcagggacgtcacgtccgcacttgaacttgcagctcaggggggcttttgccatttttttcatctcttttttttttttttttttttttttttttgcttaaaaaaaagccatgacggctctcccacaattcatcttccctgcgccatctttgtattatttctaatttattttggatgtcaaaaggcactgatgaagatattttctctggagtctccttctttctaacccggctctcccgatgtgaaccgagccgtcgtccgcccgccgccgccgccgccgccgccgccgcccgccccgcagcccaccatgtctcgccgcaagcaaggcaaaccccagcacttaagcaaacgggaattctcgcccgagcctcttgaagccattcttacagatgatgaaccagaccacggcccgttgggagctccagaaggggatcatgacctcctcacctgtgggcagtgccagatgaacttcccattgggggacattcttatttttatcgagcacaaacggaaacaatgcaatggcagcctctgcttagaaaaagctgtggataagccaccttccccttcaccaatcgagatgaaaaaagcatccaatcccgtggaggttggcatccaggtcacgccagaggatgacgattgtttatcaacgtcatctagaggaatttgccccaaacaggaacacatagcagataaacttctgcactggaggggcctctcctcccctcgttctgcacatggagctctaatccccacgcctgggatgagtgcagaatatgccccgcagggtatttgtaaagatgagcccagcagctacacatgtacaacttgcaaacagccattcaccagtgcatggtttctcttgcaacacgcacagaacactcatggattaagaatctacttagaaagcgaacacggaagtcccctgaccccgcgggttcttcacacacccccattcggcgtagtacccagagagctcaagatgtgtggcagttttcggatggaagctcgagagcccttaagttctgagaaaatttgaagcccccaggggtggggtggacgcgtgccgcccagtcgacgtcagcgtggtctgtcatcctgctagtttgtgatgttttctgacagtagcctccaagaagccgttgtgcgaagacagagtcctgcagagtccttccagcctaggcctgcagcgccattttatttatattttttaataaaaagtaaaaacaaaaaaacagacccacattggaacagtgaatcagtcccatagagagggcccgtggaccatcgctgtcatgagtgatgccctggcccttctgaaaccagccaacctaattacctgtattgtggaaatgcgcatgagtccccaaccccttgtttctatacattctatgttgtcttttaaaaagtgtgcttaacattgacacaataaatgttggagcttta

SEQ ID NO: 2690 - protein, 241 aa, Homo sapiens; identical to SEQ ID NO: 2688

SEQ ID NO: 2691 - DNA, 6097 bp, Homo sapiens
cattggtgtgagcttccccttccctcctccccttctctcctgctcgccctgcccatgttttgtgtgtctctgtccatccagactcctgacgttcaagttcgcagggacgtcacgtccgcacttgaacttgcagctcaggggggcttttgccatttttttcatctcttttttttttttttttttttttttttttgcttaaaaaaaagccatgacggctctcccacaattcatcttccctgcgccatctttgtattatttctaatttattttggatgtcaaaaggcactgatgaagatattttctctggagtctccttctttctaacccggctctcccgatgtgaaccgagccgtcgtccgcccgccgccgccgccgccgccgccgccgcccgccccgcagcccaccatgtctcgccgcaagcaaggcaaaccccagcacttaagcaaacgggaattctcgcccgagcctcttgaagccattcttacagatgatgaaccagaccacggcccgttgggagctccagaaggggatcatgacctcctcacctgtgggcagtgccagatgaacttcccattgggggacattcttatttttatcgagcacaaacggaaacaatgcaatggcagcctctgcttagaaaaagctgtggataagccaccttccccttcaccaatcgagatgaaaaaagcatccaatcccgtggaggttggcatccaggtcacgccagaggatgacgattgtttatcaacgtcatctagaggaatttgccccaaacaggaacacatagcagataaacttctgcactggaggggcctctcctcccctcgttctgcacatggagctctaatccccacgcctgggatgagtgcagaatatgccccgcagggtatttgtaaagatgagcccagcagctacacatgtacaacttgcaaacagccattcaccagtgcatggtttctcttgcaacacgcacagaacactcatggattaagaatctacttagaaagcgaacacggaagtcccctgaccccgcgggttggtatcccttcaggactaggtgcagaatgtccttcccagccacctctccatgggattcatattgcagacaataacccctttaacctgctaagaataccaggatcagtatcgagagaggcttccggcctggcagaagggcgctttccacccactccccccctgtttagtccaccaccgagacatcacttggacccccaccgcatagagcgcctgggggcggaagagatggccctggccacccatcacccgagtgcctttgacagggtgctgcggttgaatccaatggctatggagcctcccgccatggatttctctaggagacttagagagctggcagggaacacgtctagcccaccgctgtccccaggccggcccagccctatgcaaaggttactgcaaccattccagccaggtagcaagccgcccttcctggcgacgccccccctccctcctctgcaatccgcccctcctccctcccagcccccggtcaagtccaagtcatgcgagttctgcggcaagacgttcaaatttcagagcaacctggtggtgcaccggcgcagccacacgggcgagaagccctacaagtgcaacctgtgcgaccacgcgtgcacccaggccagcaagctgaagcgccacatgaagacgcacatgcacaaatcgtcccccatgacggtcaagtccgacgacggtctctccaccgccagctccccggaacccggcaccagcgacttggtgggcagcgccagcagcgcgctcaagtccgtggtggccaagttcaagagcgagaacgaccccaacctgatcccggagaacggggacgaggaggaagaggaggacgacgaggaagaggaagaagaggaggaagaggaggaggaggagctgacggagagcgagagggtggactacggcttcgggctgagcctggaggcggcgcgccaccacgagaacagctcgcggggcgcggtcgtgggcgtgggcgacgagagccgcgccctgcccgacgtcatgcagggcatggtgctcagctccatgcagcacttcagcgaggccttccaccaggtcctgggcgagaagcataagcgcggccacctggccgaggccgagggccacagggacacttgcgacgaagactcggtggccggcgagtcggaccgcatagacgatggcactgttaatggccgcggctgctccccgggcgagtcggcctcggggggcctgtccaaaaagctgctgctgggcagccccagctcgctgagccccttctctaagcgcatcaagctcgagaaggagttcgacctgcccccggccgcgatgcccaacacggagaacgtgtactcgcagtggctcgccggctacgcggcctccaggcagctcaaagatcccttccttagcttcggagactccagacaatcgccttttgcctcctcgtcggagcactcctcggagaacgggagtttgcgcttctccacaccgcccggggagctggacggagggatctcggggcgcagcggcacgggaagtggagggagcacgccccatattagtggtccgggcccgggcaggcccagctcaaaagagggcagacgcagcgacacttgtgagtactgtgggaaagtcttcaagaactgtagcaatctcactgtccacaggagaagccacacgggcgaaaggccttataaatgcgagctgtgcaactatgcctgtgcccagagtagcaagctcaccaggcacatgaaaacgcatggccaggtggggaaggacgtttacaaatgtgaaatttgtaagatgccttttagcgtgtacagtaccctggagaaacacatgaaaaaatggcacagtgatcgagtgttgaataatgatataaaaactgaatagaggtatattaatacccctccctcactcccacctgacaccccctttttcaccactccccttccccatcgccctccagccccactccctgtaggatttttttctagtcccatgtgatttaaacaaacaaacaaacaaacagaagtaacgaagctaagaatatgagagtgcttgtcaccagcacacctgttttttttctttttctttttcttttttctttttccttttttttttttttcctttatgttctcaccgtttgaatgcatgatctgtatggggcaatactattgcattttacgcaaactttgagcctttctcttgtgcaataatttacatgttgtgtatgtttttttttaaacttagacagcatgtatggtatgttatggctattttaaattgtccctaattcgttgctgagcaaacatgttgctgtttccagttccgttctgagagaaaaagagagagagagagaaaaagaccatgctgcatacattctgtaatacatatcatgtacagttttattttataacgtgaggaggaaaaacagtctttggattaaccctctatagacagaatagatagcactgaaaaaaaatctctatgagctaaatgtctgtctctaaagggttaaatgtatcaattggaaaggaagaaaaaaggccttgaattgacaaattaacagaaaaacagaacaagtttattctatcatttggttttaaaatatgagtgccttggatctattaaaaccacatcgatggttctttctacttgttataaacttgtagcttaattcagcattgggtgaggtaataaaccttaggaactagcatataattctatattgtatttctcacaacaatggctacctaaaaagatgacccattatgtcctagttaatcatcatttttcctttagtttaattttataaacaaaactgattataccagtataaaagctactttgctcctggtgagagcttaaaagaaatgggctgttttgcccaaagttttattttttttaaacaatgattaaattgaatgtgtaatgtgcaaaagccctggaacgcaattaaatacactagtaaggagttcattttatgaagatatttgctttaataatgtctttttaaaaatactggcaccaaaagaaatagatccagatctacttggttgtcaagtggacaatcaaatgataaactttaagaccttgtataccatattgaaaggaagaggctgacaataaggtttgacagaggggaacagaagaaaataatatgatttattagcacaacgtggtactatttgccatttaaaactagaacaggtatataagctaatattgatacaatgatgattaactatgaattcttaagacttgcatttaaatgtgacattcttaaaaaaagaagagaaagaattttaagagtagcagtatatatgtctgtgctccctaaaagttgtacttcatttcttttccatacactgtgtgctatttgtgttaacatggaagaggattcattgtttttatttttatttttttaattttttcttttttattaagctagcatctgccccagttggtgttcaaatagcacttgactctgcctgtgatatctgtatcttttctctaatcagagatacagaggttgagtataaaataaacctgctcagataggacaattaagtgcactgtacaattttcccagtttacaggtctatacttaagggaaaagttgcaagaatgctgaaaaaaaattgaacacaatctcattgaggagcattttttaaaaactaaaaaaaaaaaaactttgccagccatttacttgactattgagcttacttacttggacgcaacattgcaagcgctgtgaatggaaacagaatacacttaacatagaaatgaatgattgctttcgcttctacagtgcaaggatttttttgtacaaaacttttttaaatataaatgttaagaaaaattttttttaaaaaacacttcattatgtttaggggggaactgcattttagggttccattgtcttggtggtgttacaagacttgttatccatttaaaaatggtagtggaaattctatgccttggatacacaccgctcttcaggttgtaaaaaaaaaaaacatacattggggaaaggtttaagattatatagtacttaaatataggaaaatgcacactcatgttgattcctatgctaaaatacatttatggtcttttttctgtatttctagaatggtatttgaattaaatgttcatctagtgttaggcactatagtatttatattgaagcttgtatttttaactgttgcttgttctcttaaaaggtatcaatgtaccttttttggtagtggaaaaaaaaaagacaggctgccacagtatatttttttaatttggcaggataatatagtgcaaattatttgtatgcttcaaaaaaaaaaaaaagagagaaacaaaaaagtgtgacattacagatgagaagccatataatggcggtttgggggagcctgctagaatgtcacatggatggctgtcataggggttgtacatatccttttttgttcctttttcctgctgccatactgtatgcagtactgcaagctaataacgttggtttgttatgtagtgtgctttttgtccctttccttctatcaccctacattccagcatcttaccttcatatgcagtaaaagaaagaaagaaaaaaaaaggaaaaaaaaaaaaaaccaatgttttgcagtttttttcattgccaaaaactaaatggtgctttatatttagattggaaagaatttcatatgcaaagcatattaaagagaaagcccgctttagtcaatacttttttgtaaatggcaatgcagaatattttgttattggccttttctattcctgtaatgaaagctgtttgtcgtaacttgaaattttatcttttactatgggagtcactatttattattgcttatgtgccctgttcaaaacagaggcacttaatttgatcttttatttttctttgtttttatttttttttttatttagatgaccaaaggtcattacaacctggctttttattgtatttgtttctggtctttgttaagttctattggaaaaaccactgtctgtgtttttttggcagttgtctgcattaacctgttcatacacccattttgtccctttattg

SEQ ID NO: 2692 - protein, 827 aa, Homo sapiens
MSRRKQGKPQHLSKREFSPEPLEAILTDDEPDHGPLGAPEGDHDLLTCGQCQMNFPLGDILIFIEHKRKQCNGSLCLEKAVDKPPSPSPIEMKKNPVEVGIQVTPEDDDCLSTSSRGICPKQEHIADKLLHWRGLSSPRSAHGALIPTPGMSAEYAPQGICKDEPSSYTCTTCKQPFTSAWFLLQHAQNTHGLRIYLESEHGSPLTPRVGIPSGLGAECPSQPPLHGIHIADNNPFNLLRIPGSVSREASGLAEGRFPPTPPLFSPPPRHHLDPHRIERLGAEEMATHHPSAFDRVLRLNPMAMEPPAMDFSRRLRELAGNTSSPPLSPGRPSPMQRLLQPFQPGSKPPFLATPPLPPLQSAPPPSQPPVKSKSCEFCGKTFKFQSNLVVHRRSHTGEKPYKCNLCDHACTQASKLKRHMKTHMHKSSPMTVKSDDGLSTASSPEPGTSDLVGSASSALKSVVAKFKSENDPNLIPENGDEEEEEDDEEEEEEEEEEEEELTESVDYGFGLSLEAARHHENSSRGAVVGVGDESRALPDVMQGMVLSSMQHFSEAFHQVLGEKHKRGHLAEAEGHRDTCDEDSVAGESDRIDDGTVNGRGCSPGESASGGLSKKLLLGSPSSLSPFSKRIKLEKEFDLPPAAMPNTENVYSQWLAGYAASRQLKDPFLSFGDSRQSPFASSSEHSSENGSLRFSTPPGELDGGISGRSGTGSGGSTPHGPGPGRPSSKEGRRSDTCEYCGKVFKNCSNLTVHRRSHTGERPYKCELCNYACAQSSKLTRHMKTHGQVGKDVYKCEICKMPFSVYSTLEKHMKKWHSDRVLNNDIKTE

SEQ ID NO: 2693 - DNA, 5934 bp, Homo sapiens
tcttttttttttttttttttttttttttttgcttaaaaaaaagccatgacggctctcccacaattcatcttccctgcgccatctttgtattatttctaatttattttggatgtcaaaaggcactgatgaagatattttctctggagtctccttctttctaacccggctctcccgatgtgaaccgagccgtcgtccgcccgccgccgccgccgccgccgccgccgcccgccccgcagcccaccatgtctcgccgcaagcaaggcaaaccccagcacttaagcaaacgggaattctcgcccgagcctcttgaagccattcttacagatgatgaaccagaccacggcccgttgggagctccagaaggggatcatgacctcctcacctgtgggcagtgccagatgaacttcccattgggggacattcttatttttatcgagcacaaacggaaacaatgcaatggcagcctctgcttagaaaaagctgtggataagccaccttccccttcaccaatcgagatgaaaaaagcatccaatcccgtggaggttggcatccaggtcacgccagaggatgacgattgtttatcaacgtcatctagaggaatttgccccaaacaggaacacatagcagataaacttctgcactggaggggcctctcctcccctcgttctgcacatggagctctaatccccacgcctgggatgagtgcagaatatgccccgcagggtatttgtaaagatgagcccagcagctacacatgtacaacttgcaaacagccattcaccagtgcatggtttctcttgcaacacgcacagaacactcatggattaagaatctacttagaaagcgaacacggaagtcccctgaccccgcgggttggtatcccttcaggactaggtgcagaatgtccttcccagccacctctccatgggattcatattgcagacaataacccctttaacctgctaagaataccaggatcagtatcgagagaggcttccggcctggcagaagggcgctttccacccactccccccctgtttagtccaccaccgagacatcacttggacccccaccgcatagagcgcctgggggcggaagagatggccctggccacccatcacccgagtgcctttgacagggtgctgcggttgaatccaatggctatggagcctcccgccatggatttctctaggagacttagagagctggcagggaacacgtctagcccaccgctgtccccaggccggcccagccctatgcaaaggttactgcaaccattccagccaggtagcaagccgcccttcctggcgacgccccccctccctcctctgcaatccgcccctcctccctcccagcccccggtcaagtccaagtcatgcgagttctgcggcaagacgttcaaatttcagagcaacctggtggtgcaccggcgcagccacacgggcgagaagccctacaagtgcaacctgtgcgaccacgcgtgcacccaggccagcaagctgaagcgccacatgaagacgcacatgcacaaatcgtcccccatgacggtcaagtccgacgacggtctctccaccgccagctccccggaacccggcaccagcgacttggtgggcagcgccagcagcgcgctcaagtccgtggtggccaagttcaagagcgagaacgaccccaacctgatcccggagaacggggacgaggaggaagaggaggacgacgaggaagaggaagaagaggaggaagaggaggaggaggagctgacggagagcgagagggtggactacggcttcgggctgagcctggaggcggcgcgccaccacgagaacagctcgcggggcgcggtcgtgggcgtgggcgacgagagccgcgccctgcccgacgtcatgcagggcatggtgctcagctccatgcagcacttcagcgaggccttccaccaggtcctgggcgagaagcataagcgcggccacctggccgaggccgagggccacagggacacttgcgacgaagactcggtggccggcgagtcggaccgcatagacgatggcactgttaatggccgcggctgctccccgggcgagtcggcctcggggggcctgtccaaaaagctgctgctgggcagccccagctcgctgagccccttctctaagcgcatcaagctcgagaaggagttcgacctgcccccggccgcgatgcccaacacggagaacgtgtactcgcagtggctcgccggctacgcggcctccaggcagctcaaagatcccttccttagcttcggagactccagacaatcgccttttgcctcctcgtcggagcactcctcggagaacgggagtttgcgcttctccacaccgcccggggagctggacggagggatctcggggcgcagcggcacgggaagtggagggagcacgccccatattagtggtccgggcccgggcaggcccagctcaaaagagggcagacgcagcgacacttgtgagtactgtgggaaagtcttcaagaactgtagcaatctcactgtccacaggagaagccacacgggcgaaaggccttataaatgcgagctgtgcaactatgcctgtgcccagagtagcaagctcaccaggcacatgaaaacgcatggccaggtggggaaggacgtttacaaatgtgaaatttgtaagatgccttttagcgtgtacagtaccctggagaaacacatgaaaaaatggcacagtgatcgagtgttgaataatgatataaaaactgaatagaggtatattaatacccctccctcactcccacctgacaccccctttttcaccactccccttccccatcgccctccagccccactccctgtaggatttttttctagtcccatgtgatttaaacaaacaaacaaacaaacagaagtaacgaagctaagaatatgagagtgcttgtcaccagcacacctgttttttttctttttctttttcttttttctttttccttttttttttttttcctttatgttctcaccgtttgaatgcatgatctgtatggggcaatactattgcattttacgcaaactttgagcctttctcttgtgcaataatttacatgttgtgtatgtttttttttaaacttagacagcatgtatggtatgttatggctattttaaattgtccctaattcgttgctgagcaaacatgttgctgtttccagttccgttctgagagaaaaagagagagagagagaaaaagaccatgctgcatacattctgtaatacatatcatgtacagttttattttataacgtgaggaggaaaaacagtctttggattaaccctctatagacagaatagatagcactgaaaaaaaatctctatgagctaaatgtctgtctctaaagggttaaatgtatcaattggaaaggaagaaaaaaggccttgaattgacaaattaacagaaaaacagaacaagtttattctatcatttggttttaaaatatgagtgccttggatctattaaaaccacatcgatggttctttctacttgttataaacttgtagcttaattcagcattgggtgaggtaataaaccttaggaactagcatataattctatattgtatttctcacaacaatggctacctaaaaagatgacccattatgtcctagttaatcatcatttttcctttagtttaattttataaacaaaactgattataccagtataaaagctactttgctcctggtgagagcttaaaagaaatgggctgttttgcccaaagttttattttttttaaacaatgattaaattgaatgtgtaatgtgcaaaagccctggaacgcaattaaatacactagtaaggagttcattttatgaagatatttgctttaataatgtctttttaaaaatactggcaccaaaagaaatagatccagatctacttggttgtcaagtggacaatcaaatgataaactttaagaccttgtataccatattgaaaggaagaggctgacaataaggtttgacagaggggaacagaagaaaataatatgatttattagcacaacgtggtactatttgccatttaaaactagaacaggtatataagctaatattgatacaatgatgattaactatgaattcttaagacttgcatttaaatgtgacattcttaaaaaaagaagagaaagaattttaagagtagcagtatatatgtctgtgctccctaaaagttgtacttcatttcttttccatacactgtgtgctatttgtgttaacatggaagaggattcattgtttttatttttatttttttaattttttcttttttattaagctagcatctgccccagttggtgttcaaatagcacttgactctgcctgtgatatctgtatcttttctctaatcagagatacagaggttgagtataaaataaacctgctcagataggacaattaagtgcactgtacaattttcccagtttacaggtctatacttaagggaaaagttgcaagaatgctgaaaaaaaattgaacacaatctcattgaggagcattttttaaaaactaaaaaaaaaaaaactttgccagccatttacttgactattgagcttacttacttggacgcaacattgcaagcgctgtgaatggaaacagaatacacttaacatagaaatgaatgattgctttcgcttctacagtgcaaggatttttttgtacaaaacttttttaaatataaatgttaagaaaaattttttttaaaaaacacttcattatgtttaggggggaactgcattttagggttccattgtcttggtggtgttacaagacttgttatccatttaaaaatggtagtggaaattctatgccttggatacacaccgctcttcaggttgtaaaaaaaaaaaacatacattggggaaaggtttaagattatatagtacttaaatataggaaaatgcacactcatgttgattcctatgctaaaatacatttatggtcttttttctgtatttctagaatggtatttgaattaaatgttcatctagtgttaggcactatagtatttatattgaagcttgtatttttaactgttgcttgttctcttaaaaggtatcaatgtaccttttttggtagtggaaaaaaaaaagacaggctgccacagtatatttttttaatttggcaggataatatagtgcaaattatttgtatgcttcaaaaaaaaaaaaaagagagaaacaaaaaagtgtgacattacagatgagaagccatataatggcggtttgggggagcctgctagaatgtcacatggatggctgtcataggggttgtacatatccttttttgttcctttttcctgctgccatactgtatgcagtactgcaagctaataacgttggtttgttatgtagtgtgctttttgtccctttccttctatcaccctacattccagcatcttaccttcatatgcagtaaaagaaagaaagaaaaaaaaaggaaaaaaaaaaaaaaccaatgttttgcagtttttttcattgccaaaaactaaatggtgctttatatttagattggaaagaatttcatatgcaaagcatattaaagagaaagcccgctttagtcaatacttttttgtaaatggcaatgcagaatattttgttattggccttttctattcctgtaatgaaagctgtttgtcgtaacttgaaattttatcttttactatgggagtcactatttattattgcttatgtgccctgttcaaaacagaggcacttaatttgatcttttatttttctttgtttttatttttttttttatttagatgaccaaaggtcattacaacctggctttttattgtatttgtttctggtctttgttaagttctattggaaaaaccactgtctgtgtttttttggcagttgtctgcattaacctgttcatacacccattttgtccctttattg

SEQ ID NO: 2694 - protein, 827 aa, Homo sapiens; identical to SEQ ID NO: 2692

SEQ ID NO: 2695 - DNA, 5846 bp, Homo sapiens
gccaccgccgcggcgctcgctgcggccactggcactgatgaagatattttctctggagtctccttctttctaacccggctctcccgatgtgaaccgagccgtcgtccgcccgccgccgccgccgccgccgccgccgcccgccccgcagcccaccatgtctcgccgcaagcaaggcaaaccccagcacttaagcaaacgggaattctcgcccgagcctcttgaagccattcttacagatgatgaaccagaccacggcccgttgggagctccagaaggggatcatgacctcctcacctgtgggcagtgccagatgaacttcccattgggggacattcttatttttatcgagcacaaacggaaacaatgcaatggcagcctctgcttagaaaaagctgtggataagccaccttccccttcaccaatcgagatgaaaaaagcatccaatcccgtggaggttggcatccaggtcacgccagaggatgacgattgtttatcaacgtcatctagaggaatttgccccaaacaggaacacatagcagataaacttctgcactggaggggcctctcctcccctcgttctgcacatggagctctaatccccacgcctgggatgagtgcagaatatgccccgcagggtatttgtaaagatgagcccagcagctacacatgtacaacttgcaaacagccattcaccagtgcatggtttctcttgcaacacgcacagaacactcatggattaagaatctacttagaaagcgaacacggaagtcccctgaccccgcgggttggtatcccttcaggactaggtgcagaatgtccttcccagccacctctccatgggattcatattgcagacaataacccctttaacctgctaagaataccaggatcagtatcgagagaggcttccggcctggcagaagggcgctttccacccactccccccctgtttagtccaccaccgagacatcacttggacccccaccgcatagagcgcctgggggcggaagagatggccctggccacccatcacccgagtgcctttgacagggtgctgcggttgaatccaatggctatggagcctcccgccatggatttctctaggagacttagagagctggcagggaacacgtctagcccaccgctgtccccaggccggcccagccctatgcaaaggttactgcaaccattccagccaggtagcaagccgcccttcctggcgacgccccccctccctcctctgcaatccgcccctcctccctcccagcccccggtcaagtccaagtcatgcgagttctgcggcaagacgttcaaatttcagagcaacctggtggtgcaccggcgcagccacacgggcgagaagccctacaagtgcaacctgtgcgaccacgcgtgcacccaggccagcaagctgaagcgccacatgaagacgcacatgcacaaatcgtcccccatgacggtcaagtccgacgacggtctctccaccgccagctccccggaacccggcaccagcgacttggtgggcagcgccagcagcgcgctcaagtccgtggtggccaagttcaagagcgagaacgaccccaacctgatcccggagaacggggacgaggaggaagaggaggacgacgaggaagaggaagaagaggaggaagaggaggaggaggagctgacggagagcgagagggtggactacggcttcgggctgagcctggaggcggcgcgccaccacgagaacagctcgcggggcgcggtcgtgggcgtgggcgacgagagccgcgccctgcccgacgtcatgcagggcatggtgctcagctccatgcagcacttcagcgaggccttccaccaggtcctgggcgagaagcataagcgcggccacctggccgaggccgagggccacagggacacttgcgacgaagactcggtggccggcgagtcggaccgcatagacgatggcactgttaatggccgcggctgctccccgggcgagtcggcctcggggggcctgtccaaaaagctgctgctgggcagccccagctcgctgagccccttctctaagcgcatcaagctcgagaaggagttcgacctgcccccggccgcgatgcccaacacggagaacgtgtactcgcagtggctcgccggctacgcggcctccaggcagctcaaagatcccttccttagcttcggagactccagacaatcgccttttgcctcctcgtcggagcactcctcggagaacgggagtttgcgcttctccacaccgcccggggagctggacggagggatctcggggcgcagcggcacgggaagtggagggagcacgccccatattagtggtccgggcccgggcaggcccagctcaaaagagggcagacgcagcgacacttgtgagtactgtgggaaagtcttcaagaactgtagcaatctcactgtccacaggagaagccacacgggcgaaaggccttataaatgcgagctgtgcaactatgcctgtgcccagagtagcaagctcaccaggcacatgaaaacgcatggccaggtggggaaggacgtttacaaatgtgaaatttgtaagatgccttttagcgtgtacagtaccctggagaaacacatgaaaaaatggcacagtgatcgagtgttgaataatgatataaaaactgaatagaggtatattaatacccctccctcactcccacctgacaccccctttttcaccactccccttccccatcgccctccagccccactccctgtaggatttttttctagtcccatgtgatttaaacaaacaaacaaacaaacagaagtaacgaagctaagaatatgagagtgcttgtcaccagcacacctgttttttttctttttctttttcttttttctttttccttttttttttttttcctttatgttctcaccgtttgaatgcatgatctgtatggggcaatactattgcattttacgcaaactttgagcctttctcttgtgcaataatttacatgttgtgtatgtttttttttaaacttagacagcatgtatggtatgttatggctattttaaattgtccctaattcgttgctgagcaaacatgttgctgtttccagttccgttctgagagaaaaagagagagagagagaaaaagaccatgctgcatacattctgtaatacatatcatgtacagttttattttataacgtgaggaggaaaaacagtctttggattaaccctctatagacagaatagatagcactgaaaaaaaatctctatgagctaaatgtctgtctctaaagggttaaatgtatcaattggaaaggaagaaaaaaggccttgaattgacaaattaacagaaaaacagaacaagtttattctatcatttggttttaaaatatgagtgccttggatctattaaaaccacatcgatggttctttctacttgttataaacttgtagcttaattcagcattgggtgaggtaataaaccttaggaactagcatataattctatattgtatttctcacaacaatggctacctaaaaagatgacccattatgtcctagttaatcatcatttttcctttagtttaattttataaacaaaactgattataccagtataaaagctactttgctcctggtgagagcttaaaagaaatgggctgttttgcccaaagttttattttttttaaacaatgattaaattgaatgtgtaatgtgcaaaagccctggaacgcaattaaatacactagtaaggagttcattttatgaagatatttgctttaataatgtctttttaaaaatactggcaccaaaagaaatagatccagatctacttggttgtcaagtggacaatcaaatgataaactttaagaccttgtataccatattgaaaggaagaggctgacaataaggtttgacagaggggaacagaagaaaataatatgatttattagcacaacgtggtactatttgccatttaaaactagaacaggtatataagctaatattgatacaatgatgattaactatgaattcttaagacttgcatttaaatgtgacattcttaaaaaaagaagagaaagaattttaagagtagcagtatatatgtctgtgctccctaaaagttgtacttcatttcttttccatacactgtgtgctatttgtgttaacatggaagaggattcattgtttttatttttatttttttaattttttcttttttattaagctagcatctgccccagttggtgttcaaatagcacttgactctgcctgtgatatctgtatcttttctctaatcagagatacagaggttgagtataaaataaacctgctcagataggacaattaagtgcactgtacaattttcccagtttacaggtctatacttaagggaaaagttgcaagaatgctgaaaaaaaattgaacacaatctcattgaggagcattttttaaaaactaaaaaaaaaaaaactttgccagccatttacttgactattgagcttacttacttggacgcaacattgcaagcgctgtgaatggaaacagaatacacttaacatagaaatgaatgattgctttcgcttctacagtgcaaggatttttttgtacaaaacttttttaaatataaatgttaagaaaaattttttttaaaaaacacttcattatgtttaggggggaactgcattttagggttccattgtcttggtggtgttacaagacttgttatccatttaaaaatggtagtggaaattctatgccttggatacacaccgctcttcaggttgtaaaaaaaaaaaacatacattggggaaaggtttaagattatatagtacttaaatataggaaaatgcacactcatgttgattcctatgctaaaatacatttatggtcttttttctgtatttctagaatggtatttgaattaaatgttcatctagtgttaggcactatagtatttatattgaagcttgtatttttaactgttgcttgttctcttaaaaggtatcaatgtaccttttttggtagtggaaaaaaaaaagacaggctgccacagtatatttttttaatttggcaggataatatagtgcaaattatttgtatgcttcaaaaaaaaaaaaaagagagaaacaaaaaagtgtgacattacagatgagaagccatataatggcggtttgggggagcctgctagaatgtcacatggatggctgtcataggggttgtacatatccttttttgttcctttttcctgctgccatactgtatgcagtactgcaagctaataacgttggtttgttatgtagtgtgctttttgtccctttccttctatcaccctacattccagcatcttaccttcatatgcagtaaaagaaagaaagaaaaaaaaaggaaaaaaaaaaaaaaccaatgttttgcagtttttttcattgccaaaaactaaatggtgctttatatttagattggaaagaatttcatatgcaaagcatattaaagagaaagcccgctttagtcaatacttttttgtaaatggcaatgcagaatattttgttattggccttttctattcctgtaatgaaagctgtttgtcgtaacttgaaattttatcttttactatgggagtcactatttattattgcttatgtgccctgttcaaaacagaggcacttaatttgatcttttatttttctttgtttttatttttttttttatttagatgaccaaaggtcattacaacctggctttttattgtatttgtttctggtctttgttaagttctattggaaaaaccactgtctgtgtttttttggcagttgtctgcattaacctgttcatacacccattttgtccctttattg

SEQ ID NO: 2696 - protein, 827 aa, Homo sapiens; identical to SEQ ID NO: 2692

SEQ ID NO: 2697 - DNA, 804 bp, Homo sapiens
cattggtgtgagcttccccttccctcctccccttctctcctgctcgccctgcccatgttttgtgtgtctctgtccatccagactcctgacgttcaagttcgcagggacgtcacgtccgcacttgaacttgcagctcaggggggcttttgccatttttttcatctcttttttttttttttttttttttttttttgcttaaaaaaaagccatgacggctctcccacaattcatcttccctgcgccatctttgtattatttctaatttattttggatgtcaaaaggcactgatgaagatattttctctggagtctccttctttctaacccggctctcccgatgtgaaccgagccgtcgtccgcccgccgccgccgccgccgccgccgccgcccgccccgcagcccaccatgtctcgccgcaagcaaggcaaaccccagcacttaagcaaacgggaattctcgcccgagcctcttgaagccattcttacagatgatgaaccagaccacggcccgttgggagctccagaaggggatcatgacctcctcacctgtgggcagtgccagatgaacttcccattgggggacattcttatttttatcgagcacaaacggaaacaatgcaatggcagcctctgcttagaaaaagctgtggataagccaccttccccttcaccaatcgagatgaaaaaagcatccaatcccgtggaggttggcatccaggtcacgccagaggatgacgattgtttatcaacgtcatctagaggaatttgccccaaacaggaacacatagcaggtaaatgagaagca

SEQ ID NO: 2698 - protein, 128 aa, Homo sapiens
MSRRKQGKPQHLSKREFSPEPLEAILTDDEPDHGPLGAPEGDHDLLTCGQCQMNFPLGDILIFIEHKRKQCNGSLCLEKAVDKPPSPSPIEMKKNPVEVGIQVTPEDDDCLSTSSRGICPKQEHIAGK

SEQ ID NO: 2699 - DNA, 1447 bp, Homo sapiens
gggggagcagggcgcacgtcttgctcccccccaccctttcctcccacccctgccacccctttcttctctcccggccacgccaccgccgcggcgctcgctgcggccactgccatgacggctctcccacaattcatcttccctgcgccatctttgtattatttctaatttattttggatgtcaaaaggcactgatgaagatattttctctggagtctccttctttctaacccggctctcccgatgtgaaccgagccgtcgtccgcccgccgccgccgccgccgccgccgccgcccgccccgcagcccaccatgtctcgccgcaagcaaggcaaaccccagcacttaagcaaacgggaattctcgcccgagcctcttgaagccattcttacagatgatgaaccagaccacggcccgttgggagctccagaaggggatcatgacctcctcacctgtgggcagtgccagatgaacttcccattgggggacattcttatttttatcgagcacaaacggaaacaatgcaatggcagcctctgcttagaaaaagctgtggataagccaccttccccttcaccaatcgagatgaaaaaagcatccaatcccgtggaggttggcatccaggtcacgccagaggatgacgattgtttatcaacgtcatctagaggaatttgccccaaacaggaacacatagcagataaacttctgcactggaggggcctctcctcccctcgttctgcacatggagctctaatccccacgcctgggatgagtgcagaatatgccccgcagggtatttgtaaagatgagcccagcagctacacatgtacaacttgcaaacagccattcaccagtgcatggtttctcttgcaacacgcacagaacactcatggattaagaatctacttagaaagcgaacacggaagtcccctgaccccgcgggttcttcacacacccccattcggcgtagtacccagagagctcaagatgtgtggcagttttcggatggaagctcgagagcccttaagttctgagaaaatttgaagcccccaggggtggggtggacgcgtgccgcccagtcgacgtcagcgtggtctgtcatcctgctagtttgtgatgttttctgacagtagcctccaagaagccgttgtgcgaagacagagtcctgcagagtccttccagcctaggcctgcagcgccattttatttatattttttaataaaaagtaaaaacaaaaaaacagacccacattggaacagtgaatcagtcccatagagagggcccgtggaccatcgctgtcatgagtgatgccctggcccttctgaaaccagccaacctaattacctgtattgtggaaatgcgcatgagtccccaaccccttgtttctatacattctatgttgtcttttaaaaagtgtgcttaacattgacacaataaatgttggagcttta

SEQ ID NO: 2700 - protein, 241 aa, Homo sapiens; identical to SEQ ID NO: 2688

SEQ ID NO: 2701 - DNA, 2893 bp, Homo sapiens
gccaccgccgcggcgctcgctgcggccactggcactgatgaagatattttctctggagtctccttctttctaacccggctctcccgatgtgaaccgagccgtcgtccgcccgccgccgccgccgccgccgccgccgcccgccccgcagcccaccatgtctcgccgcaagcaaggcaaaccccagcacttaagcaaacgggaattctcgcccgagcctcttgaagccattcttacagatgatgaaccagaccacggcccgttgggagctccagaaggggatcatgacctcctcacctgtgggcagtgccagatgaacttcccattgggggacattcttatttttatcgagcacaaacggaaacaatgcaatggcagcctctgcttagaaaaagctgtggataagccaccttccccttcaccaatcgagatgaaaaaagcatccaatcccgtggaggttggcatccaggtcacgccagaggatgacgattgtttatcaacgtcatctagaggaatttgccccaaacaggaacacatagcagataaacttctgcactggaggggcctctcctcccctcgttctgcacatggagctctaatccccacgcctgggatgagtgcagaatatgccccgcagggtatttgtaaagatgagcccagcagctacacatgtacaacttgcaaacagccattcaccagtgcatggtttctcttgcaacacgcacagaacactcatggattaagaatctacttagaaagcgaacacggaagtcccctgaccccgcgggttggtatcccttcaggactaggtgcagaatgtccttcccagccacctctccatgggattcatattgcagacaataacccctttaacctgctaagaataccaggatcagtatcgagagaggcttccggcctggcagaagggcgctttccacccactccccccctgtttagtccaccaccgagacatcacttggacccccaccgcatagagcgcctgggggcggaagagatggccctggccacccatcacccgagtgcctttgacagggtgctgcggttgaatccaatggctatggagcctcccgccatggatttctctaggagacttagagagctggcagggaacacgtctagcccaccgctgtccccaggccggcccagccctatgcaaaggttactgcaaccattccagccaggtagcaagccgcccttcctggcgacgccccccctccctcctctgcaatccgcccctcctccctcccagcccccggtcaagtccaagtcatgcgagttctgcggcaagacgttcaaatttcagagcaacctggtggtgcaccggcgcagccacacgggcgagaagccctacaagtgcaacctgtgcgaccacgcgtgcacccaggccagcaagctgaagcgccacatgaagacgcacatgcacaaatcgtcccccatgacggtcaagtccgacgacggtctctccaccgccagctccccggaacccggcaccagcgacttggtgggcagcgccagcagcgcgctcaagtccgtggtggccaagttcaagagcgagaacgaccccaacctgatcccggagaacggggacgaggaggaagaggaggacgacgaggaagaggaagaagaggaggaagaggaggaggaggagctgacggagagcgagagggtggactacggcttcgggctgagcctggaggcggcgcgccaccacgagaacagctcgcggggcgcggtcgtgggcgtgggcgacgagagccgcgccctgcccgacgtcatgcagggcatggtgctcagctccatgcagcacttcagcgaggccttccaccaggtcctgggcgagaagcataagcgcggccacctggccgaggccgagggccacagggacacttgcgacgaagactcggtggccggcgagtcggaccgcatagacgatggcactgttaatggccgcggctgctccccgggcgagtcggcctcggggggcctgtccaaaaagctgctgctgggcagccccagctcgctgagccccttctctaagcgcatcaagctcgagaaggagttcgacctgcccccggccgcgatgcccaacacggagaacgtgtactcgcagtggctcgccggctacgcggcctccaggcagctcaaagatcccttccttagcttcggagactccagacaatcgccttttgcctcctcgtcggagcactcctcggagaacgggagtttgcgcttctccacaccgcccggggagctggacggagggatctcggggcgcagcggcacgggaagtggagggagcacgccccatattagtggtccgggcccgggcaggcccagctcaaaagagggcagacgcagcgacacttgttcttcacacacccccattcggcgtagtacccagagagctcaagatgtgtggcagttttcggatggaagctcgagagcccttaagttctgagaaaatttgaagcccccaggggtggggtggacgcgtgccgcccagtcgacgtcagcgtggtctgtcatcctgctagtttgtgatgttttctgacagtagcctccaagaagccgttgtgcgaagacagagtcctgcagagtccttccagcctaggcctgcagcgccattttatttatattttttaataaaaagtaaaaacaaaaaaacagacccacattggaacagtgaatcagtcccatagagagggcccgtggaccatcgctgtcatgagtgatgccctggcccttctgaaaccagccaacctaattacctgtattgtggaaatgcgcatgagtccccaaccccttgtttctatacattctatgttgtcttttaaaaagtgtgcttaacattgacacaataaatgttggagcttta

SEQ ID NO: 2702 - protein, 765 aa, Homo sapiens
MSRRKQGKPQHLSKREFSPEPLEAILTDDEPDHGPLGAPEGDHDLLTCGQCQMNFPLGDILIFIEHKRKQCNGSLCLEKAVDKPPSPSPIEMKKNPVEVGIQVTPEDDDCLSTSSRGICPKQEHIADKLLHWRGLSSPRSAHGALIPTPGMSAEYAPQGICKDEPSSYTCTTCKQPFTSAWFLLQHAQNTHGLRIYLESEHGSPLTPRVGIPSGLGAECPSQPPLHGIHIADNNPFNLLRIPGSVSREASGLAEGRFPPTPPLFSPPPRHHLDPHRIERLGAEEMATHHPSAFDRVLRLNPMAMEPPAMDFSRRLRELAGNTSSPPLSPGRPSPMQRLLQPFQPGSKPPFLATPPLPPLQSAPPPSQPPVKSKSCEFCGKTFKFQSNLVVHRRSHTGEKPYKCNLCDHACTQASKLKRHMKTHMHKSSPMTVKSDDGLSTASSPEPGTSDLVGSASSALKSVVAKFKSENDPNLIPENGDEEEEEDDEEEEEEEEEEEEELTESVDYGFGLSLEAARHHENSSRGAVVGVGDESRALPDVMQGMVLSSMQHFSEAFHQVLGEKHKRGHLAEAEGHRDTCDEDSVAGESDRIDDGTVNGRGCSPGESASGGLSKKLLLGSPSSLSPFSKRIKLEKEFDLPPAAMPNTENVYSQWLAGYAASRQLKDPFLSFGDSRQSPFASSSEHSSENGSLRFSTPPGELDGGISGRSGTGSGGSTPHGPGPGRPSSKEGRRSDTCSSHTPIRRSTQRAQDVWQFSDGSSRALKF

SEQ ID NO: 2703 - DNA, 60657 bp, Mus musculus
  misc_feature (1)...(60657): n = A, C, G or T/U
cttgaactttacagcaagccataactgtcttcagtgttctaaggaatctcagatgctcaattcccctgatcctaacctggttacagtgaagacttttctacatccacagaagcccatgtgaagcaaaaccttgcactacttccctctggcacagcagttgcctaccaggtcactgcttggtaccaggggccattgggaacagctaattatattggagcagagtgatggaaggcttttgtggagaactgaataccaaagagcagacccatgtgtgccctcaggcttgctgtggctatcttctttgagtataaatacaggccatgggtcagaccctaacccccaactcagaggtgaggagagaaagggtaattagacatactgaagcgtcactgaccatgtgtcatttctgagacttcctcctttccattaatggacaaatctattttcctctatgtctgagatgttcattttatctaaagatgctaaatatactggggttctctagttgactgaattttcttattataaaatataagttgcaacaaatctattagtaaatctatatgttgagaatccacactatgtcagcactggtagaatctaaggaggtcttagtcatgctcctttttgtcaagacatttgcaggacattacagtggaaagggcatggaactcctatgtgaatggtaaacccttgtccataatgacagatcataactgtgtggctaagggctttcagacaggtcaattttctcatcaaaaaacaggacactaacacttgtgcacttgaggttgttttgagactttattaatatgacacaattaaaataatttctcataatttctggcatatagagcttcatgtagacatttgacaaaaactgacacagatgacatttcagagagggtaaaatttggagcatggcttatatggtctttgagagtacagaatacaaggaaaacttgatttgattcattgtagtgatcaagaaagattttttcagttagagtcacaccaaggtatttctagagaaacaaataaccctatttaaaaaacggagtacagagctacacaaagaattctcatattgaatggctgagaaacacgtgaagaaatgttcatcatccttagtcatcagggatatgcaaatcacaccagtcagaatggataagatcaaaaattcaggtgacagcagatgttagcaaggatgtagagaaagaggattattcctccattgctggtgggattgcaaactggaaataagtatggcggttcctcagaaaattggacatagtactacctgagactccagcaataccacttctaggcacatatgctgaagatgttccaatatgtaataagggcacatgctccattatgttcatagcagccttagttataatagccagaagctggaaagaacccagatgtccctcaacagaggaatggattcagaaaatgtggtacatttacacaatagagtactactcagttattaaaaacaatgaatttatgaaattcttaggcaaatagctggaactagaaaatatcatcccaagtgaggtaacacaatcacaaaagaacacacatggtatgcactcactgataaaaggatattagctcagaagctcagaatacccaagatacagaccacatgaagctcaagaagaggaagaccaaagtgtggatactttggttcttcttagaatggggaaggaaatacccatggaaggagataaagtgtggagcagagactgaaggaaagcccatccagagactgtcccacctgggggtccatcccatacacagtcaccaaatccagacacttattgtggatgctaagaagtacttgctgaccagaggttgatataggggtctcctgggaggctctgctagtgcctgataaatacagaggtggatgctttcagccaaccattggactgagcacagggttcccattgaaagtgctagagagggtactcaaggagctgaagggttttgcagccccatcggaggaacaacaatatgaaccaaccagtacccacagagttcccaaggactaaaccaccaaccgaagagtacacatggaaggacccatggctccagctgcatatgtaccagaggatggccttgttagtcatcagtgggagaagaggcccttggtcctgtgaaggcttgatgcccaaatgtaggggaatgccaggacagggaagtgggggtgggtgaattggtgagcaggggggatgaatgagnnnnnnnnnnnnnnnnnnnntgctggtgggattgcaaactggaaataagtatggcggttcctcagaaaattggacatagtactacctgaggctccagcaataccacttctaggcacatatgctgaagatgttccaatatgtaataagggcacatgctccattatgttcatagcagccttagttataatagccagaagctggaaagaacccagatgtccctcaacagaggaatggatacagaaaatgtggtacatttacacaatggagtactactcagttattaaaaacaatgaatttatgaaattcttaggcaaatagctggaactagaaaatatcatcccgagtgaggtaacacaatcacaaaagaacacacatggtatgcactcactgataaggggatattagctcagaagctcagaatacccaagatacagatcacatgaagctcaagaagaaggaagaccaaagtgtggatactttggttcttcttagaagggggaaggaaatacccattgaaggagataaagtgtggagcagagactgaaggaaagcccatccagagactgtcccacctggggatccaccaaatccagacactattgtggatgctaagaagtacttgccgaccagaggttgatataggggtctcctgggaggctctgctagtgcctgataaatacagaggtggatgctttcagccaaccattggactgagcacagggttcccattgaaagtgctagagagagtactcaaggagctgaacggttttgcagccccataggaggaacaacaatatgaaccaaccagtacccacagagttcccaaggactaaaccaccaacgggaagagtacacatggaaggacccatggctccagctgcatatgtaccagaggatggccttgttagtcatcagtgggagaagaggcccttggtcctgtgaaggcttgatgcccaaatgtgggggaatgccaggacagggaagtgggcgtgggtgaattggtgagcagggggatgaataagaggataggggggtttttgatgggaaaccaggaaaggggatatcattcgaaatgtaaataaagaaaatatctaataaaaataaccgaaaatttttgagaaaaaaaaagaaaggttttttttcaagagctggtgtggaatttgatcaaatgcatgattaagaggtgttggctctttgttggcaggtagctgggaggagagaagcccaacctgccaggtctcttgggcgacccgacctgagaagaaccacaccaggtcgggagtcttgtagaagcaggaactccctttaatgtggtagcaatttgcttataccgatagggcaagaaggcggggatagaggtatggagtgagatttacttatggggtggagtgagatgatgagaaatgtggggtgatctagtgtggcctataagaaatttacacatcagcagtaactatgcagaggcagtctcattcaggtcattaggtcatgctgagtcgttctcaagtgacaggtctcaaaaatcaagccaggctcaggtttgtcttcaagacccaaaccaaggccaagtgggtccaacaaagtggccctacaaagagggaaagtagttgagcaaagtgctgtagcccctgcaaaactgaaaacatggcaactccagtgtaccttggggaagaatgagatactggcttttctgggctggtgattgagaagactcagcagtcatgagtctagaatgagtcagggttccaggacaggaagactagaatgggagatgtgggtatgtgacattatgacattcagaaagaatgtataattcttgattcaaatcaatcaggagtggtagggaaaaggggggactaaccctttctttctttctttctttctttctttctttctttctttctttctttctttctttctttctctctctctctctctctctctttctttctttctctctttctttctttctctctttctttctttctttctttctttctttctttctttctttctttctttctttctttctttctttctttctttctttgtataacagggagatcgagcatccacctgatcatggataggaaaatgtagagaatccagagagcttgctgtgaagcaatgccaaccacacagcaattacagttttccagttgccccttagagcttggccatgaagtggtggacatagtttcagtgaattcaaactggattctagaacatattttgaatatagagtaaatgacacttcttttctagccatggaagaatggccttcttaccacaggatgttggactagcacatctgtttcactgggctgaactgtatctgtgtcttttctacagttctgatctcagccttgcctgatggctggagaaagtttacttccttttacttttcttcttgcgttgaagattattgttttcaccctctaaaaggaatgaatgcaatgacatcaacttgtcctgcattagcaccaccacacagttggagagaaatctgctcactgggcactcagccagggactgttggtatgactgtctctgacccagtgctctaggaggcacaatcaccatagattaatcagggcactttttatcagtgtaccttcatctgccaagtaactataaactcttcaagactaaggctctacttcatctcaacaacaagagtaaaagacaaaatgaaaaaaaaannnnnnnnnnnnnnnnnnnntctcttgggcgacccgacctgagaagaaccacaccaggtcaggagtcttgtagaagcaggaacttcctttaatgtggtagcaatttgcttataccgacagggcaagaaggtggggggataggggtatggagtgagattacttatggggtggagtgagatgatgagaaatgtggggtgatctagtggggcctataagaaatttacacatcagcagtaactaggcagaggcagtctcattcaggtcattaggtcatgctgagtcgttctcaagtgacaggtctcaaaaatcaagccaggctcaggtttgtcttcaagacccaaaccaaggccaagtgggcccaacaaagtggccctacaaagagggaaagtagttgagcaaagtgctgtagcccctgcaaaactgaaaacatggcaacttcagtgtaccttggagaagaatgagatactggcttttctgggctggtgattgagaagactcagcagtcatgagtctagaatgagtcagggttccaggacaggaagactagaatgggagatgtgggtatgtgacatcatgacattcagaaagaatgtataattcttgattcaaatcaatcaggagtggtagggaaaaggggggactaaccctttatttctttctttgtttgtataacagggagatagggcatccacctgatcatggataggaaaatgtagagaatccagagagcttgctgtgaagcaatgccaaccacacagcaaatgctacttcaattacagttttccagttgccccttagagctcggccatgaagtggtggacatagtttcagtgaattcaaactggattctagaacatattttgaatacagagtaaatgacacttcttttctagccatggaagaatggccttcttaccacaggttgttggactagcacatctatttcactgggctgaactgtatctgtgttttttctacagttctgatctcagccttgcctgatggctggagaaagcttacttccttttacttttcttcttgcattgaagattattgttttcaccctctaaaaggaatgaatgcaatgatatcaacttgtcctgcattagcaccaccacagagttggagagaaatctgctcactgggcactcagccagggactgttggtatgactgtctctgacccagtgctctaggaggcacaatcaccatagattaatcagggcactttttatcagtgtaccttcatctgccaagtaactataaactcttcaagactaaggctctacttcatctcaacaacaagagtaaaagacaaaatgaaaaaaaaaactatattaattatcatacagaatggagatctctttagttaataataactgacttgtctatgagcatggaaccgatacacataaaatccctgaaaatatttgtctcctcccagatactttcatgattttctaattataactatggtagcttttgtattatgtaacaagnnnnnnnnnnnnnnnnnnnnnnnnnnnnnnnnnnnnnnnnnnnnnnnnnnnnnnnnnnnnnnnnnnnnnnnnnnnnnnnnnnnnnnnnnnnnnnnnnnnnnnnnnnnnnnnnnnnnnnnnnnnnnnnnnnnnnnnnnnnnnnnnnnnnnnnnnnnnnnnnnnnnnnnnnnnnnnnnnnnnnnnnnnnnnnnnnnnnnnnnnnnnnnnnnnnnnnnnnnnnnnnnnnnnnnnnnnnnnnnnnnnnnnnnnnnnnnnnnnnnnnnnnnnnnnnnnnnnnnnnnnnnnnnnnnnnnnnnnnnnnnnnnnnnnnnnnnnnnnnnnnnnnnnnnnnnnnnnnnnnnnnnnnnnnnnnnnnnnnnnnnnnnnnnnnnnnnnnnnnnnnnnnnnnnnnnnnnnnnnnnnnnnnnnnnnnnnnnnnnnnnnnnnnnnnnnnnnnnnnnnnnnnnnnnnnnnnnnnnnnnnnnnnnnnnnnnnnnnnnnnnnnnnnnnnnnnnnnnnnnnnnnnnnnnnnnnnnnnnnnnnnnnnnnnnnnnnnnnnnnnnnnnnnnnnnnnnnnnnnnnnnnnnnnnnnnnnnnnnnnnnnnnnnnnnnnnnnnnnnnnnnnnnnnnnnnnnnnnnnnnnnnnnnnnnnnnnnnnnnnnnnnnnnnnnnnnnnnnnnnnnnnnnnnnnnnnnnnnnnnnnnnnnnnnnnnnnnnnnnnnnnnnnnnnnnnnnnnnnnnnnnnnnnnnnnnnnnnnnnnnnnnnnnnnnnnnnnnnnnnnnnnnnnnnnnnnnnnnnnnnnnnnnnnnnnnnnnnnnnnnnnnnnnnnnnnnnnnnnnnnnnnnnnnnnnnnnnnnnnnnnnnnnnnnnnnnnnnnnnnnnnnnnnnnnnnnnnnnnnnnnnnnnnnnnnnnnnnnnnnnnnnnnnnnnnnnnnnnnnnnnnnnnnnnnnnnnnnnnnnnnnnnnnnnnnnnnnnnnnnnnnnnnnnnnnnnnnnnnnnnnnnnnnnnnnnnnnnnnnnnnnnnnnnnnnnnnnnnnnnnnnnnnnnnnnnnnnnnnnnnnnnnnnnnnnnnnnnnnnnnnnnnnnnnnnnnnnnnnnnnnnnnnnnnnnnnnnnnnnnnnnnnnnnnnnnnnnnnnnnnnnnnnnnnnnnnnnnnnnnnnnnnnnnnnnnnnnnnnnnnnnnnnnnnnnnnnnnnnnnnnnnnnnnnnnnnnnnnnnnnnnnnnnnnnnnnnnnnnnnnnnnnnnnnnnnnnnnnnnnnnnnnnnnnnnnnnnnnnnnnnnnnnnnnnnnnnnnnnnnnnnnnnnnnnnnnnnnnnnnnnnnnnnnnnnnnnnnnnnnnnnnnnnnnnnnnnnnnnnnnnnnnnnnnnnnnnnnnnnnnnnnnnnnnnnnnnntcccaattcctcttcacatcccatcagggattcatactctttctgtatcttattaaaaaataaagcttgtaaaggataataagaaagcaaaatataataaaataaaatataataagataaaactaacatattgagttggataagacagacagaaggaaaagagcccaagagaaagcagaagaaacaaaagctcactcatctgcatgctcaggaattccataaaaatgctaaactggagccatatcatctgtgctgaagccctggtgcagctgtgaagtccctatatccttagcctctgagagttcatatgagctctcagagcaatgaactacaggactgtgcgctcagttaatttatagggccttgttttcttggtgtcctccatctcctctgcctcttacactcattatgcctcctcttctacagtgttccctgagatctgaggagagggatttgatggagacatcccatttaggcctatgtgtttgaagatccctcactctctatgaaatgtctagcatctgatggtagtatttcagtatttgtgccccaactaccaacttgcttaaggagaaagcttctccagtgatggctgagctggtcattgagatatgaatgtagtaaaatgtctagtactgattttccacaatgaatcagcaatgtagcaatcgttcttcactttcactactttattttttccaacatgatattttcttggttatttgggaggttcataatgtatcccaatcacatttacttaccaatcttctcaggcccatgaaccccttgtccttgtgacctccctaaaagaaaaggtacaatttatgttgcccatattctccgtagagcatgggcaaagcccttgaagccaacaacttaaagaaaacggagtctttcctcacccatacctccaccagaaaccatcaagtgtgaagagttacactttaggatcaatattataatttttaagaattctcttcaatggcttccctttctaggctgcttcttttagggggagtagcatatggggagaggaagctgtcatagaggtcttctatgtctctctttctcaactatgagtctgaagccattgataccactgcaaaggaagcttccatgccatgctcaggcagtgaaagcgtgggccctagacttatgcatggtttctggcaacagcatggaccaaggacatgcatgtggcttcctacaggagcacagacaatggagaccatcacggcccttgacagcaatatagaacagagacatcaagatggcttcagatgggaacatggaccatggacgtcaacatgatctccagtagcagcacagaccatgtaccctttcactatttaccaaatctttttgttctttaaatttcttcagtaagggcttaggatgggctaggaattttaaaatataacagcaagaaaataatgacaaaatgttttctttcctaattgatgattgttaagaccaagataatttacaaattgtgtaagaataaattcaatatttgtgagttgaaacttattctatgatggttacaatgatgagacacatcatagaataatgaaaacatctagagatttccaagatggagggagggagaatagctcacagttcccatgcatgtgttctcttattagttctggtttgtatttgaactacaaataaaaaagtatcaattacagaaattactctgagacttgcagcagtggccattaggaataaaatcattttggctttgttttaattgtttctattcactttatagcaaaaattcaattttgactttttatttatctatagatattctttatcagcactgataactcagctcttgcaaaatcatacataaaatcctaggcgcctggggtcagggaacctgaagctagcagagaagaaaaagcacaaccacacctgcctctaatccttgctttgatattaaagcatgataatagggaacacattggaataaggaagagatttttagaaacatttgtgctccttcagatttctggcggagaaatggagaacaaattttccagcagactaagtgataaacagcgtaggtcacttccatgcctctgtgactcctatgttgagaactgagtgtagtcatggaatccattatgatgggttctctgctctgtgctttcctacctgctgggcatcattgcaggtttgagggtagtgaggaacttactgtataaaaggacaaaaagagtcgtaatggcaaaagtattatcagttgagtttcagccagggtaaaggaacactctgtacccggcctgagtcagtcagaagtctgggctctggactgagttgctagtagtgactttcaggttttctaagatccaagagctatacatttgcagcttccaggacaccaaaaaggactggacacaaacacatggtgctcacacagtcattgtctgctggtgcactacagaaaccacaaaacttacaagtatgtcatcccagaaagctcatgacctttactaccttgactccctggggaaacaagaaagacaaggaaatggctctggtttctctttctaaccttctagacatgaatgtgacagaacttaatttacaacacactttattcacaaaagaaactggggtataatttttactttcttccaagagtagaaacatgaaattaaggtccagtaggccactcttctgtgttcttcagggacctggaagccaccacttttgagggattttaatgttgacaacttaccagagctgttaactgcaacagcaattaatttcagttagttagaggtgttgtttgggttaggcctagaaggaagggtggatgatttgaggatgaaaatgactggggacagaaaaaatttacatagactcttggcagacagtgatggtggctctaagtacaggacacacaaagaaaggattcacagatatagtgacaacttctattgtcaggactctgttgaagaacagtgcacgagtattaggggtcaaggtggaagacttacttgcattataatgtcagctctgccacattctcccttgcacttcccttctcagcattgctctggggaggatatctctgtagtaaatagagaaatagtggaaggagaaagaggaggagatatcaaacctaataataataatgataaggaaaaggaggaagaggaggggggaggaggaggaggaaggaggaggaggaagagaagaagaagaagaagaagaagaagaagaagaagaagaagaagaagaagaagaagaagaagaagaagaagaagcaccaccaccacaagaaatgattgctatctcttgccaagcttcgcttttcattctaatacatgcctgtagtactaataccaagcactgaagtatgttctccttactgtgctcaggaggcagtgcttacctctcagactggtgctcttgtgatcaagatgcaagaagaaggatgaagactaccattcattgttttccttgcctctagtccaatgcaaacaacaattgtacttccttagggaagggggctttttagagatttattttattatattgggtgtggtgtgtgtgtgtgtgtgtgtgtgtgtgtgtgtgtgtgtgtgtgtatgtgtacttataccttacacatgagcgctattgtccactgaggtcagaggagttcagatctcctgcagatggagttacaggcagttgtgtgccacttgatttcatgcttggaaccaaactcgggtcctctaaaagagcaatatgtgctcttaactcaacagccatctctatagccccaagaaggggaacatttatacaatgatttttgcctatctcttgaacatagactttcttgtttttctagcttcttctctttccccctctcctataatttctttacatttcttcttttcttccccctttttttcttttattataccatcatgctttctcatcacactttccctgctgtctcatttggtatgcaacctctctgtcatctttatctcaagccttttgctccttgctttctgtgttatcccctcttaccccaacttcctattcttttactttggcagtgttccaatcccttccatatttttatactttattccatttatctccggaatagggtccttatgggtttctgtttgtttgttcatttgtatcttgcctcggcatctatcagcttctgagctttctttttttatttcactgcatacatataatacccccattagttttctcctctcacagtttcctcagtgtttcccatagtacacttcttccactcatcctaacatatttctctgctttgttttgagcctctcatcctcttaaagcacagagtaaaaccaaaggaaggtttcctttttcacccctttgtctctttaaaaggtctcatgacttttggtcagatccaaccttctcaggacacttcgttgcctctctgcttataactacatctttgatgaacttttcttcaaacaaagtaagtcattatgggaacagcttttattagattcaccctaaaagattttaaccaaaaaagttcattttgaatcggacttctacagtgcagtttcatggtctgacatctatcctagaaggtttttttcagaggaaaattattttctttagttatacattgtctggaatatgtacacacatgtacatatgaacacatgtacagctgggacatcattatttatccatatgtgtttgtggttcacatgtagatatttacaaacacatgcatagacatacactgagaatcatgcatatgcaaatgaaaacatatctaaaatatacatgcattatatatctgtagtacttatgtatatatgcataacatataattttactaaatgtgcatgttatccaaatagcacatgtatctacacatatatttagtagttggaaatcatggtaattgagctgaaaatttgataggggccttttacttaagaaaaagaaatggtgcctatccagttagtggcaagacattttatacgtaaagactgaaatgtgttgaaatttcaccatattttaaaactatagaagtcattacatgataaattattttatttccatcaattgactccttttcttgttgacttatttcttttcacattttttaaaatctcaaaatactcctgcatagtcagattatgacatgggatagagggagtcaggttgactcatttaattttcaaagttgagaaactgggacagaacctaatgagatcttccacaggccaacgaggagctgacacctaaactgtacctattccatctctcctcaatcattctttatatgtatcccaccttaggagtcttccgaattaaaagagagaaaaaagtgtggatccactgggacatattcaagctggaattaaaggcatttatttttttatatttagccaaataagcatctgatttcagaagtcaacaccataggtcaaattactagatccaatggattaacttgtcttaaatgaacacaaacatttagacattcagtgaaacaggagttaaggcaagaaacatttgcagcaatgcaatggttattgtatgtgagtgtgtgagtatatgcgtgtgtgtgtgtgtgtgtgtatgcatgagtacacatgtgtgagtatgtgtgagtatatgtgggtgcatgcatgtgtgagtgtttgtgtgtatgtgagtgtgtgtgtgcctgtgcctgtgtgagtgtatgtaagtatatgtgtatgtgtgtgaatatgtatatgagtgtgtgtgtgcctgtgtgagtgtatgtgagtatatgtgtgtgtgtgtgtgtgaatatgtatatgtgagtgtgtgtgtgtacctgtgtgagttgtatgtccatatttctctgggtgtgtgtatctgtacgtgcacgtgcattgggtacttccccactgtgaaccttgtgttttgagatggtatctcttactgacctacagttcactgactgatggaagagagccgggtaggtgagttacaggaatctgcctttgctcattccccagcactggagttacagaccactgtggccactttagctttgatatggatgaagacctgagctcaggtactcatgttttgtgctgtaagtacttatcaacttagtcattttcccagcctccctgtagtctttaataatatatgtattactcatggcaaagacttgagggtgtttaaaaataatatattaattatattttctatacagattaatattaattataaaaatattaccaaaattactcatctaaatgttcaaatttgaatatacagctcatttatgctattatgtaaatgtaaactcttaatgtctaggatggaaaaacattcatgtaaattatttttgctttggtttggtggagacattggaattgcacacagtagttagaatagagcctgtatacattagatttataaacttcacacaaatatgagcatcactaacactctcctggttgcccgtctccgttcagcaagacagttctttgacaaagaggcagaaaagcagtgacaaatgactctcctgaagtgatgttcagctggcaaaattcccaggactggtacagagagtgacacgggctcaactcatcagagacaacaaagtgagtccacagagtcatgtgcttggcagacacctttcccacccataggcatagctatatcttcattcccatggccactcactaacctcctcttgggattgcatctgagatggcagtagctgcttgccatcagttggccctgccttacctcatccaggttgatggtgcattgctgaaataaattagctgtgcactttactacactcaaggaaaagcgtggtctcagtccgactgcatgtgaatggggcaggccctgtgctctctaacactcataactacacacatttaccccttgattggacaatgacttcactttgaattgaaaggaaggagctctggccttggctattttggcatagaagcctgcagtatgactctgttttctaagcagacattaatgattctaaaactaatattcattgtttgaagaggcacagcggccttggcatttacttaaccttttgtctcatgtacgagactgagtcagcctaaatccttcccttaattaatatcttttctttttatggccaaccttatttattgaacaatttgcatgtaacaattagagccacaggagattactaaaacccttcctgttcagaaggccatcttttagatttttatttatttaagttttgaagttgcacagataatgcaaacctagaaagcttagctgaataaacgggggataagttaggccagatagataccttatgtcagtgatcccacctgctggaggccagaggaaagaaagaggtttcctgcttttataagacatttgttttgctctaatagctccagaaaaggcaaaatagagagatattaagacattatttacatagttatcctcaagtaataggatgttggacttcatgtctgttaaaataacagagataaaaaataataaagtgtttaaaataaaagcacaataactttattcatgagctcaaatcacccacaaaagtaaacctctgtttttgccttacatcatattcctgtccacatgaacccataaattggcataatatcgagcattagaccgaaacagcatttgctcctatatcaatcataaccttcattttattaatagatcatcttttctttttttaaattagatattttctttatatacatttcaaatttcaaatgctatcccgaaagttccctataccttcccccccacactgctcccctacacacccactcccacttcttggccctggcattcccctgtacttggggcatataaagtttgcaataccaaggggcctctcttcccaatgatggcccactaggctatcttctgttacatatgcagctagagacacgagctcttggggttctggttagttcgtattgttgttccacctatagggttgcagaccccttcagctccttgggtactttctctagcttctccattgggggccctgtgttccatccaatagatgactgtgagcatccacttctgtatttgccagacactggcatagcctcatatgagacagctataccagggtcccttcatcaaaatcttgctggcatatgcaatagtgtctgggtttggtggctgattatggaatggatccgtgggtggggtagtctctggagagtccatcctttcatcttagcttcaaactttgtctctgtaactcctttcatgggtattttgttccctattctgaggaggaatgaagtatccacccattggtcttccctcttcttgattttcttgtgttttgcaaattgtatcttgggtgttctatgttgctgggctaatatccacttatcagtgagtgtatatctaatgatttcttttgtgattggtttacctcactgaggatgactagatcatcttttctacatatattaggatgtacattattttcagctaattagatatagttaatagtttactccttgccatgctatcaatcgttgtttccttgtgatgttctgtttcctggtgttactttccagtatacacctttgaaggacacccagtccacttctcattatggaatcaaagagcataaacattttttttttctaccttggcaatagcatttcttaaaatcttgcttctagtaatatatgggtttgatggccttgctattgatgtctattatcaatattttttaaattgtgataaatgaagatgcatcatctcatatctgctcttgataacttatatctgatttccctgaatccaggatatataatatcagatcacattatttatttttttatcattctcattaattaacatctgaagtcaaaccaaatatttttaattgctaaggtgattttcaggctgtaaggtgaactttaaattgctaaatgccaatagtcattctctactactccatatggaagtgggacgggcatagaagatgcttctgaaggtacgttgattttttaaacacgacttaatatgaacttaagtagtgattattttcctcttacagaactggaagcagagggtgcatactctctatttgagggctctactgaaccaaggttgtaattcagaaaatgcatttttttctttcccaactgtcatttcaaagatatttcaagcacttatattaccaggtattaagcacttcagcaagaaattatctaaatttcccaaactgctccttaaagacttcttgcagactctctttctgctttgcctgaagagttcagactgtatgcctgacactaaatttacacaggtgctaaagatctttccatgattcaaattcctccaacataaaacagagaaagccagtttataccaagtagggttgtggtagcttgatgtagagaaagaaacatctagaaaaaaacaaaagctgtaggtttaattagaaagtagaagcagtaaatatattaattaggacaagtgcttttacaacgctgccattattactcttgcatgtgtatctttacggaatagggaaggttctccaactgaaatgctttacagaaattctctccaaaattgtatttaacaattgaaaaactccatcaagaaagcatgggaatttctacttttgtatattgttgagaacacttgttatcacccttcaggatttgcatctcagattactttaaaaatgatattgcattagttgtaatttgcttttcctagtcactggtggagcagagcacttcccttcatctgtttattggccttcaataaataatcaagtcaaaagtatgagctagtgatgcataaaactacaagaatgggtctggaagggatcaagcaagatcacatatcgtgtgattgcattaagtggttccttccttctttctctcccctctttctttttgtccttttgattatatcctcttaagtttcagagtaaatgcagttcccttgcttaggtttcctaagactgtcttctagacaccccgaaaagccctcagtccttctggtgagaacatgtgtcccaaagtcctggtctctcttaggtatggaagtcagacaattaggatcaactgtcttctgacaatgatcagactctacccattcatcatggccttgcccacctcccaccattccgtcagggcctaatacatgacatttctgtcttaacatatctctggatattattgcactatctattgacatgtggtagctagttatcattagctctttttttaagttagttgagaatcagatagaagggcaactggaatgtcatgagacattagctggaagaaagctgacttttaagtggatcataagcacttgagatagaatatgtatctcagcacgatcagtatcataacattgctcacctaacacctgcagtaggcactatatcacattgttttgcatataaaatttcatttaatttcacaatttgtacaatttgtagagaggtgctctccatttaatagataatgaatattgaatgttcagattcaaagaacaagtcaatgagaaaaaaccttgatttgttttcaatgaatagaagaattgataggggtcattgactggtgagcacatacaaagatcctcagctaagcagaagccatgatagagacaaccaaaacccttgatgctatcaagtgcgaaactgggtgtggatcaatgcaaaatcccatataccctacaggagaagcaaaatggcaaattgtatcaaaatgctttagcagttttttataaattcaaatttttcttgctataaattctactcctgcatacttgccatccccctaaaagtaaaaacaaagcaaagcaaaacaaaaacaagtaaaaccatttctttacaatgtacaatacacattaatagctatagtatccttatcatcaccactagaacagaaaagatattatcacatagtcaatgtatacacaaaagactagtcatcagagagtcaaagatatgaactagtgatatgttagactacaaggatgcatctgcaagggatcagctaagatcacaagttgcatgattacattaaacagttccttccttcttttttcttccctccttcctgttttccttcatcccctcccagcctcccttcatcttgctctcagtcatttcatttataaaggcaacactactggaagagatatgagattagtgcttgagagaggctgtaagtctgagaacagcattcactccaaagtattggcagggctttggggcaggatggaaaggtcttgtatgttgagtgtgatggtgtctgaatgtgctactgcatttattcaagcctgtcactgtatgctctcaaatagaaaattctcttgtatacaaattctattttaataaatgtgacaaaaatataatacccttggaagaccatttaaaggccttctacttaatctgtattcctactatcttaaactacaggtggactctttgttagacattcaataaaggatgtcttgataataccaatagctactttgcctaatttgtttttttcttttgaacttatttattttgtttaaaatgcttgataagagatctaatctcttacaatttttaagtgttcagttaacattatgttaaatctaggcagcccagttttatttagcatagtccaaccacaatcgtccatgcctggttccatttctgtcagctcacacttacacaactgacatttttgtgaagccaacccatgagtaatttctgagtaggtattaaaacaccctcacgtctacaaatctaatatattaataagtgtgctgttttcaataagacatctaaatttgcatgcaccatcctacttgttatgttcagtgttcaattttttaatgtttcttggacactagccagtaagtctgaatccctagttagttcatctattactttctcgccacaatagatttgggtgtcagccaagaagtggactgatattgcataccaaaattgcataatgcatttcctgatcttctgatattgcctttccatgtgaaatgagagagtgcatgtgtccaggcatgcacacacacacacacacacacacacacacacacaggcacacacaaacacacacacattctaccaaagcacatgctccaagctaggtaaacattttttattgctgttattaatattgggtgctttctacaatccatgtgtttgcatccccatttacatggtcttctcaccttgtgaagaagggaacatgaattgcaaaatttgataatgatcaaaaaagttgcctctatatgacagggaggagagaggattgtgaaagaaatgtctcatttccacagaaaaaagcctttttatcctttgcttttgatctggcacattctctgtgtcttaattttaattcttccaatattagatgctctggaagagtggggaggttcactgatgggagtggggagcactttgctccctcattgtcatatcccttaaaacataagcacagatgaatgctattaaaggcacttgtaggaattattctgattgttatctgatgactaactaacctattattgcacttcttgagcagcgattaatgggaaattcgtaaagaataaaggctctaacaagccttagaaatatgtgtgggcccagagtgtaccatgtgacctcagaaagcctaaccctggctgttaatatccttgactaatgaaccaagatgacagttcatgctagcaaagtgtcaagaaataagtaaccagagagatgacctttcaatgtgcttctaaatgtagtttttaacagaaaagtgtcaataagttcaaaaatcccatatgcttttgacctggtatcatcagagagcaatggaaagaaaagaagaaaattttaggggaaaggagaagaagaacctaaatgagtcatctcaactgtaacacggaatctcagggaaaggtagaagaaatccttgttcactgtttcaatgatgccatttccatgaaacagaagttaacaacaataataatacgttcaaatcattactatcttcttactggccatcatctttgttaaggcttgagacacactgcatgagctagctagcctccttcctttcccaggacccagacttcttatactatcctcagaatataaaccctcctatccaacagtcctgggatcaatttctgcttctgtttgattaggtacattgcatatgttgtgctaagctctcattcttttcatttacaagatgagaacatgaatgggatctttactgaatttctatgaaaattgatgttaaaacatataccacgtctttaccactatgccttgtaagtctgttctaattacagtaactacaaatgttgttgccattgatattatagacaatccatgagattgtctattatccctgtattcttcaccaccttccagaggatataccacagccctcattacttgtcaaagtgtgtagcacaacacctcctactgggagacaaggaatgaaacagtgagtggatgcaatacatctttgcttaggtaatactattcttcagtgtagatgtggggggggcaggatgtgtagattaatattgttagtattttgcaagaaaaagggtgaagattgttaaagttgtctaccactagagaaatttacttttattttccattttgtctttttaatcagtgacaatccacatgctaacagtttgtttagagaggtctttaaaagatcaccaaagaaggatggagacatcattttttcaagactaccaggagttgacacttcaaccattccaaatagctgatatctttttttttgtagtatgcttgattccatggtattttttgttaaaatcagtgattttctgtttcaattatgtgtggcccacaaaacaggcatgttctctcatctatcagttccctagcaaggtcaccatgtataagaggagccatgtagtacactgttgcacatattgcatgagcaggaaaacatagtgaacagtgcttgaaaagcatcttttgttttaacaaagtagcaacactaccagtcacattaatgtactgtacatttttaaaagctgaaagaaagtaattagggtgtgttcactaaagaatgatggaagttcatacagacagagatgttgagcctgactttgattccatacaatatattcatgtacaatgatatcacgttacccacatgtttacaatttcatgattacatgtatagattaaaataaatctacattaaaaattaaaataggggcaatctgaataatactactattcatgtatttagcatgtcaaggaaaaatgcccagattgattaacagtgaggcatgagaaccaagaggctgattccttatgtctgtctcctaattgcaccacttactagttgtatggacagtacagtcatttaacagcctcatgtcttggtttcttcacctataggctacatataataagagaaatctcctctgttttagtactagtactaaatgaattaatgttgggaaaagagcctaccacatggtcagcagcagacatacacagaaatcagtgtatgttagaaagaaataaccggtatatctcagtcattgcacatggattcccagcttcaacacacatgcagtcccatgaagtctaaatgaaataatacataaatttaacaagcaagatgagagttacactggatgctgtaaggtggcaagtgttaatcaagccagcaaatgtagaataggatgagaagttcagcaaggtagaaagaggcgaggcccattctaagtgagattgctagtcaacaggctgtgctcattgggaagcagtagatgaaccctgggaagaagtgtgggagaatgttggggggcagggggcagggggcagggagaggtggcttggaggggactgcattggggtaaagaaagggataaaagagctcactatgaaaactcttggccatctaagctcattgaaggactctcttgaattttgaattttacttgggagacatcttccactaaatccctagactttgagaactcccctcccctccacagaagccatcattatgagatgaatgtaaaggaccatttcatttagaacatttcaaaactggcataaccactgcgagataaagaggggactggtccaaacactgtccacagcttccagagaaatgagatccaagaggttcctaaagcatcccctaagagccagagctctttatcattgttgcagtattcttctttggtgaatttacagtcccaagggtatcctgacaaaattctgggagaacatgtcttccctgaagcagaagtcagtccttctgagccactcaaacaaagtcttaaaatcatgggatagggtgaactagaaagtgaggtagtctgtttgacaaaatcttgggtgccataaatgaaattttttctttagatttataggtaatggaaagacataatgtcagggaaaggaaaatgtatttcccgtccagattggagagggttttctccagagctgcttggtccatgtgctgggccaatcattgtggccagaacttatggagggggaagttctacacctgtaaactgaccagcagtggagagcctgtgaaccatgtttgtttctgctacccttctcttccctacttctacttcctgtaactcaccaaagcccaaaaagctgcttagcctctactatgacgtgggtagaaaatcaacaaagagatagcccatgtcttcattgcttttagcttagtaactgtgcacacgggtagagtgcttagcactttggagagttaataaaagtgccaagagtaaagggagactgggaaaataacaaacacacagacaaagctgtcagctgactggattgttttgattatcaggtgattctctcattgcttgggtaaatgttccacttttaagacaatctacccccctccatttgactcaattactgtagaaagttagccgacaaaaagaaaacactccactggtaaaaagcacgctgctgagttgtcacattgacatctctgccacgagtacctgaaacatgctgatggcaagagacgaatcgatgcgatgtgttttgttacttggttgtcttccacaagcatcacaaaggctgctgacctctagtgttaatgctttcaggggaaagatactaaaagcacttgaaaagctactttgagggatgatctaattgttagttggataaccgcaagtacctggaaaggaatgaaaatatttatgatttgtgtttgactttgaattcatatttgaaaatgtgcaggtaaacattataaccagttgagtgttttgaaaataaattgatgtttattgcctacatatgcatgtctatgcctgctccagttgacatattttataacctttattttctttttatgttaacatttgattgcatagccatctgaaggagatggtagaaatttgaagtggaaaagaaagcccttacacattcatagatggttcatgtattaattgattttattatccaagaatctaatgcatacccactatagacagcaacacaatccaaagccttggtgaaatattaccaatcacctaccaaacatgctagaaccttcccatttcaagggttccatactcagctacactgcatttctacataccactctttacatccttagaaaatctatctgccagtatcacttcgtctaaaaagtctatagtcatttttggcacgtgtctgttatactgaacttactgaaatcactttgtctctctctctctctctctctctctctctctctctctctctctctctctcttctgtgtgtgtgtgtgtgtgtgtgtgtgtgtgtgtgtgtgtgtgtgtgtgtgtgtgtgtgtgtgtgtgttataagcgtgtgtgtgtgtgtgtgatgttataagcctgtgcatgaacgcgtggaagtcacagctgtatgtcaactgtctttctcagttgtattctatcttatttcctctctgactgactagatcaagaaggcccagagtccccctctctctgctctccagcaccagaatcacagatgcacatcatgcaaacactcctacttctgaagcaaacatcgagccaccttctctccaatcacttcctaaacattttttttcataaataacaaaaactttaggagactatggcataaaacagttcagcagaaatctcatttctactaaatgtccaaacagattggaggaaaattaaagctaaatatttaaattaatcaaaaggcaccatgacaatacctacaacctattaccacaatgggagttatctaatgtgtactagcagtcacatagcaagaagcaaatatgccttacagaagagccattcttatattttattgaagattctatcctgccccttctccttgaagttaaaaattagaggcctaaatataagcatggatttaaattccagatagtttgatccttcaacagctgtgtgatcctcagaaatgacttaaccttactgaactttgggctatcccagtaagacaggaatgcatggaatctgctttgtagagatgtttcagatgatgataggcaaatggtgcaaggtacattccttcaacacagggcatgtgatgcgggtgggaagtaacaaaaggacgaggaggaaaccgataaaggaaactgttgtcttgtacaacagggaaagtgagagttaagtttccttgggcatagtaattcatgtctataattgcagaattttggaagctgaaacaggagggtggccatgggtctgggtggcacaggcagttacatccacacactgacctccttttcccgaagttaaagatgtcttcagtacaataatgcaatgctctcctttaatcccatcatccagactgtgtcacatgcatggtccacaccaatagctaaacaaaatcagtagtttcagtaactgcactaaactaatcagaacctatccccagactggggaaccgattaccacactgaccctcggatatgtcaacacaataagaattcaactgttgatgagagttgggttcttgggaagggtctcaccagtgatactgtcagtatatagttgtcactcttcaatgcattgtttaatagatcatgacacatccttctaagcagtagttttaacttatgccctccccccaattccatctccacctttctatatcttcctaaaatgcttgctttgacttcactcagctgttgctcagcttttcacatatactacaaggcacaaattcctcagaactgcattttaattcattttgaaataggaaatgcccaagattatctttctgtctttttgtctgaagcttatagcctttgatctactcagcacacataggctctgtgctttcagctatacaaccataccagaaacttgtactcttggaaaccttgcatttactttgctcttgacatagaatataataacatctttgtactttccgtatactgagataaatcttatttgtccttctacatatttatagaattatcttcctcctgaagctgcatgccaaaagtgccacttattcctttgtactgcatcctggtatcataatattcctggggtggggggggggagaacaccaaatacttccattttaattgttacatcatcattttatttttatatgtattcatttagctgtatatgtgcacacatgtgaaaatggggacatgcaagtatcaggacacttctgaaaatcagaggacatcttgtaggagctggttctcctcttccaccatgtgaattacattgactaaacttaggtcatccatcaaggtaacaaaagcctttactcactgagaaatctcactagcctgtattttatttttaaaactataatcatgatacatcaaaaatgattgaataaaactgattctgttaatttaacttattaattaactattagattatcatcaaatcaataggcatatattcagaagtagagtgcattaaataaatacctgtatgtatgtttacattgaaataaatattaaatagcatgagaatagcactgccttcatgaaaaggttgttatgaagatcgtatgaatatgaaacataagacaacattgaaggaaaaagaagattaataaatatcacaccttccacttatgtttattctttataaagggaagacttaccttgtactagattacagacatattgctagaattccatgagcaagagaggaatagtcacagtcccatagaagagatggcattagctaaaatcagttctccaagtgttgaggttaaaaaataggagacaaatttaagctcattccctgaagggtgaataaaattgtgcccacgttttagtttttgccattcctgaatgtgaccaatctcacagaaggaatgaagttgttgctagtgagttctggtaaagtagcataggactcacttcagcatacagcttccaatgttactgactcaatttaaggtcatcagtgttgctaatcacttgaggccacattaatttataaagacatatatgtgcatatatatcctgcatattagaccaaaggaatatgtgtcttcaaattatagatctgctaaaatcatgatattctcataatgaaaaaatgccccattggaaggataatttagtaacttcaatagggcttattgagtttgtaaaagacagttccttttagaatgctacttgatgattaatggaacattgattgagaattaaccactatcttgtttatacaattcatttaaagggctgttaagccccaagctatgatttaaagaatgatctaggctcagtttagcattcattacactaagcatctcagccaatggcagtccacaaaagtaaatacctctttatcaacaaagcacagaaatgctaattgacagctggcagcacccaatcagagactctgatgacaagcaactggtgacttttgtaacatctgtttctctttggtaattctccaaattaccaaaatttgctcttttggaaaacacaatataaaaaggcaaggcatggggtgtcggggcatccatgtggagacagtatggggtggagagggtgggtgggatgtggagcagacagagggtagatgggggggcagggactggaatatagcatgtaaaaataaattaaaataaaatttaaaaataataaaaaatgcaaacaaaaaagacaaacgtgaatttacaaaaaggaaggaaagaaaactccttgtgtatgaaagcatgtgagcatacatgtacatctgcatgtgtgagtgtatgtatgcatatgtgttattggcttctggaatttaagtatccagactgtggaagcagaagaagtagaatgatatatgtgggaaaagttgcctcaaagtctaggcctcattattttgacttacataggaagcatgtagaggcatttaattagctctttcatatattctttcttctctctatattttagaggatgcaacctctccatcatccagtagtatgaaggaaatgctcaccttatggaaactaaaagggaataaatggttatttttagacatatatttcctttgtcatacacccatccaaggttttaggtacatttctcccctaccctttccccaaaggaaaaaattagcaaagaaaattgggaaagagaagaaacagtagaaaaaacaagagtgcaaggggaaggctagtcatttaatgtatttgcctacatggccttatacctttgaacttccaaatgcaactttatacattgccttttgacattatgcagttggcaatcctgaaagctctcagtttagacaactaaattattgcttgtcaatttagcttcgaatgaaagacaggtgttttgtttcacagtaaaattccatttagagcttatattagctctaaatccaatcctagggttgtgttatgagtcggcattgatgtgtgtcttggtagaaattattagtcagacctgagagtcaatccacacaagagccattgctttggttctgactggacacatgtagcatcatttaaaagcaattgagataaagacctcttcagactccaagggttggccctcgtgctgatatttcactaccattttgccttcagccaagaaccttaccctagcacagttgaaaattgctctcagttaccttagaagccaatgcttcataactccttagtgaatacttgttaagactatgtcttcattttgaatagccacttgtttcagtacttccagtcaatgacatggcgtagtgtgagggaccctcttaggcaatgttccaaaggtgcatttatcactttgattggaggaattgcatgtcacaaacacaaaggcatgagatgttccagaagcttccttgcttttccaatagaaccgatcccacttctaacatcatgtattctgaagcatgtgataagaagaggtcatcacccctactagataacaagatatgacacacagcaagtctaaagaattgtattttggtttgcctctttcctaggtacttttcttttcggtgtggtagacaagcaacttaaaggagtcaaattaatgatggctcacagttcagaggaagacagtccatcctggcaggagcaggcatagccatgacattggattggtagttgatgttcacctggaatcagggaaagggcaaggccagagctcaactggccttctttcttatattgtttctcattcagtctaggaccttaatgcttgggatgatgctatccatgtttagagtggctttggcctctctcatgaatctttttggagaccctcatagggccattcaggtgtgtaccccattaatatgtatgagagatgtcttttttgcttttgtttggggttaggtttaggttggtttttggtttgagtttttgttctttgtttgtttgtttttagatgggatcctatttctaatactgtctggctttgaacttacttcatagaccagctcagcttgagtttgtgcccatcctcctgactctgcttctatggtgctgggattgcaagcatgggttatcagattctgccctaggaatgcttgacaatggacaaaatcaaacattctagcatcctatgttagaaaccatgtgttagagaacttgtttaggatagatgagatgaatgtatttttagatttcattatgtttgcagttaaaaaatctcgatatgtcttcacagtaatggaggttttgcagcagaagaagctgttctattaccttggttccaccacgattttcaagatgagagtacccagcttgatgaagactcaagtagcacataatgaagtcaagacccaggtatactttactgctcaataaatttgttccacgtagcttttactacgtatttgtctcatgatatttagaattcttaatgtaattccataggctagacagagaacattatcattgagtatgtatgatagctactgtatagtttccattttgattgtagtaatttttgtattacattttcctgaaaattattggattagaaataaagatggcatacttttcagtgaattgataaaacatgatgaacataaaaacattatcatacttatcattaatcttttggttcctagcataatattttgttcagaaaacatgttttatttgatgtttggatctgaatgtttgaatttccaatttcctgtgccatctataatacatctttaaaactacccactattagttttcctcatcaaaattgtctattaacaaagcacagtcattactctgactttgtcctaatgagcagctgaataaggtgactagatgtgaacatgaccctactaaacatggacctctaatttatgaataagataacatggaaaatgcagtaaagaagaattggattatcttggactgggagaaatttcctatattgaaatagacaaaaagggcttttaaaacatataatcagatatgatttttaatctgtcaggttgaaataccagcttaggagtacagtgaaaagccaaatagattagaagtgattgcacagaagtcttaacagtaacatgcaaacaagacgacgctgagactggtaatcacaattaccacaaaggtgggaactctgaggttgatgcatgcttggggtagaaggaggtgcttggatcaattcccagcaaatggacagagagaaagagtttttcaggttccagggccagtgactctcaacataaaacatgcagaaattgacaacccagggtctccccattggccttcagtttttactctgcctataaaaacagcagtggcggttccatcatagagctcaactcctgacctctgtgtgatctccaggtcacccctaagtcaaagtgttgcaggtttctgggaatgcaatttccagcaggcttctgccacttttcccttacagaaggacagattaatttcatttcagtggttgtttttcaatcctgtggttgtaggcgctcatggaaagattagtgctggtgcccccatcaatttatcagttctagacaatttcccttccttaattcccattttcccatgtatcatgtatctcagaagacaaaaccaaaaagcccaattttccccaaactaatattcattctaggggaagaaaaaaaaaaaaccaaacaactcgttgtttctttatagcactttccaaattgatctttgagttagtgctatgttagatttagaatctatagacaaaaacaaattaagtgggtagatggagctccagaaaccagagtgagatgtggtgtggatggaccattagtccgatttttattgtcctaagtattaattttctgttcatggagttcatttttaggagaaaccatcaacttgtcttctgaggctgtcaggtgtgtgattagccaggtcatttcataaacatggcatttttaaaccaaacttctttttctttcatttaaaaaagcatttagcaggctgtagggacttgctcaaatagtgcaaatcagttaattaagttccatgttaacggtttaaatgcatagggcttttaccatagacttttgattttatttttcagttttttaaaggagtccttgaaaccacaagcacctaattttggtcaaaagattatgtacagtttacacacatttggactactttttgtgtaccacaaaaatagtttaaattgaaactaatataaaacaacaaatttaattatgtatttgctaacaatgtgtgtaccactgacacagttcaaaatagcctgtaaatttttgaactttaaaccaaacatatttcttgatcagaactaatggaaagtttggcttaactagcatggtaattctttgatatccctcagctactgagctggaaaattggtgtgtccctccatcctgggcacatttctgtgccacgtagttgctttgggggttttcaaaacaacaaccaaaacgtcagttctttctctctgctctataactgagtcacatctgaccagtcagctctgagagggacaaagaatgtgagagaatcagaccacgcactgttatttccaggcacttaggttgctattaaaatacaaatctgttaacttttacacttacctgttttcttaggataaacccaatatgaactcacataatacttaatatcattcactatttggcctcagtttacctgaagaacggctgaagcctacccaagccagaattgcttctgcatatccagtgggtttataccccacacttttaattttcagtttcatatgtattcacaacctctcttccacagctcatattcttcttgactttttttgtctaactaaatgtgagtcgttttgtgaaactacccttaagtaacaagttcctaagcagttgtctatggtttgtaactcgttcttttgcacaggccagttcttatagcaccaggtttaaattctgctgcagaaaatctctctctctttctctctctctctctctctctctctctctctctctctctcatgtacacacacacatcacatattagtgttttttcttccttccttccttccttccttccttccttccttccttccttccttccttccttcctttctttctttttctttctttctttctttctttctttctttctttctttctttctttctttctttctttctttctttctttctttctttctttcttcctctctctctctctctctctctctctctctctctctctctctctctctctctttgtctgtccttccttctttctctcttgaaaaaaatgaatggtagtcaaccaaccacccaaccaatcagtctatggtggagacaccagtgaatgacctttctacgtatttttgaatgtgagcccctaccatctcagcaacatgttcctctctttctattctattcccagacatgaaaagtgatgtgtgtaatattttagtaactttgttaaattaaagtttgaatgtctttctctgggacatacctattgagaaaagattatattctttgtggacattcctacattgtgtgctgaaataattctgattttgtacaaaatagccacacccagccccctaaagctaagctagtagccacactttcctgtcactgcttgtagacacatgcttctttgtgtttggataattaaaattactcaccctagatttctcttcccttcaagggcattgtttcccattaacttcaataaagcttgtttgacttcaatggaagttttcacctgcatagggacagtgaggaatcaggacaaatatctttaagtctgtcatttgtcaccatgaacaaaagaaataaagatccttcggcatgaagcaccgcagcacacacttcatgtgccttctctcttaattctatccttgctgacaacccatgactgccacataaaagagagcatcagaattataattgaatggttctgaaatatcagagacagaaactctgaaaaggaggttcacaaacttattctttggcatggttagtgatttgagtgccttcagttgtccagaactgatgatggcatttccaatgcagagcagatgtattccctttgagtcgacatggggtaagaaagcatggaagcttagcttcattccaccagcacacagatccttgacaactttctgctactcaaaatcctctgggaaactggaaaggcagctgaggtatttcactgttataatattcatatcctaagatacaagcattttatttatagtataaaatttcagggaaagaatcaaaaatcttggaaaaaattaaaatgccaacctggataaagactggacaaaattcctcatgatttcacaaaaatattttttttaatttctgttgtgtaagaaaagcccattcatggctttttgagcttcaaatatttctcagcatgtatcttggtagaacaaacatttttgcaggtctactagaatccagatataagttttggggagacctgactgcttcctcttctttagggagatcagtcactgcacctctctccttacttttgaggtcaaccagatgatccagggaaatagagacttgagcctatggtgtcatcctagagctattctgagcccatacaagccagccagtccaaaggtgtgggtggctgtattcttttctgtgggccaatgcactttgggccatggtatctgaatggtgttgatgtacaggtcttaaatgacttttagatcagatggagcaataattcttttcttttttcattttttcttttcttgccttactattattttttaaatgtattttcttaaaattataacaaattattgacgtgctgacagatgtaaaaaaaaagcaatagaattgaatttaaaaaatcagcaaacagatgcaatgtacagaatgaagtaaactctcagttcatgaatgcttggtcatcaacaggcagtctaaggtcagttccgaaccatttgaaaacttagtgtcttcttaaagtcatacattctgagagtgtaatttaccaatcacctacctaagggtgttttacccagaatatcatgggcatttagataatatttgtgggggaggatgaattcactcctacatataaaatatgatacaataaattccaagctgaataaagtttttaaaatgggaaaaaatatagttcagggcaaatggaagtgaccataatccttgttactataatctcagattagcaaatactccacggagcaacacactgtgttgctttcaattacccaaaagatgaaaacacacgagatgcctcattggcaaagtaaaattaagaataaaataatcattgaagaaaaagtctctgtgaaacaaatgcacttctctgatttgagaagcactatctaacttacctttgtctctttttttcttttatgtgagaagatatagtttcagtaaaaaagaaagagcaaggacttgagcttgatattaaacatttccactgcacaatgcagattatgcatcagcattgtgtttgttttccaaatgctgctacttgatctttccatgaatcatcggtgcttttttccgtcattttttccaaaagcttttgtgaaattttattgctttcatatatatgtgttgttcaccattcaagacatgtggataggaacagaataagtcaaagtatccttatctgtgaataatatgatctaggaacaaaaaaatccaagacactccaccagaaaaacctgcattggcacctaccctgtcctgaatgacattgctgatggttttaacaacctttcctgctttctcattctcctttttccatactctttttatcaactacttatgccataattcagactcaaagggtaatagtattatagttctataaataaatttcaatttcaatttaaaaccatgtagttcatttccttttctgtatctattaagataattttaaaatttaaaaaaacacacatttattaaatatagaaatatgtgtgtctattactgctaaaatttaaaagtcatttgtttgaaaacaaataaacttcatctttccaggccattattgattttcaatagaataattcctaaattggtaagttgatgctgctttagagaagaacaaggttggtagaatagtttacaatgacttaaactattgtgtcttgtttttgttttgttttgttttgttttgtttttgatgttatttttatgtttgtgtggctatcttcttttgaagattaccttcttgccttttttagggtgtagtttccctccatgtgttggagttttccatctattatcctttgtaaggctggatttgaggaaggatattgtgaaaatttggttttatcatggaatatcttggtttctctgtctatggcaattgagttttgctgggtatagtagcctcatttggcatttgtgttctcttatggtctgtatgacatctgtccaggatcctctacctttcatagtctctggtgagaagtctggtataattatgataggtctacctttatatattacttgaccatttttccttactgcctctaatattctttctttgttttgtgcatttggtgttttgactattatgtgacgggaggaatttcttttctggtccaatctatttgtagttctgaaggctccttttatgtttatgggcacctctttctttaggttcgggaagttttcctctataattttattgaagatatttactgaccctttaagttagaagtcttcgctctcttttacacctattatccttagctttggtcttctcattgtgtcctggatttcctggatgttttggtttagaaaccttttgcattttgcatttactttgactgttgtgtcaatgttttctatggtatcttctgaacctgagattctctcttctatttcttgtattttgttggtgatgcttgcatccatgactactgatctctttcctaggtttcctatctctagggttgtctctccttgttatttctttattgattctatttccatttttagatcctgggtcattttgttcaattccttcacctttttggttgtgttttcctgtaattctttaagggctacctgtttaccagtgttctcctgtatttctttaagggagttatatatgtctttcttaaagtcttctatcatcatcatgaaatgtgatttttaaataaaaggcttgcttttatggtatgttgaggtatccagggcttgctgtggtggaagaactgggttctgatgattccaagtagttttggtttctgttgtttatgttctttcccttgcctctccccatctggctatctgtgtgtacagggtgttgctgtctctgactgtggcttgtccctgctgcaagcctgtgtgtcagtacttctgggagaccagttctctctgggaggaatttgggtatggagatctgtgtcacaggatcagctccaggtgcagacagaaacttgaaggatcctgtgtcctgactgttctgggtggttccctcttgggctaggaatttgagcagaagtggtggggttacctgtgctcacaggcttttcagcacttcttggagaccagctctcttctggtgggcagtatgaagtactgtgtcagggaatcatctctgggcaatatggcacaggatcagctcctggtgcaaagggaaaccccagatggaggaatttaagactctgagctctccacagtgcgtggccagccttacgtttgaaccatgtgtgtggttaatgcttatccacccatgttttattcaaccatagtggtacccagaagctatactctccaggctgtgatgggggtgagaagattgatgagatttgcttatactccctcttatcattgacatctcagcacactctctcctctgacataagttctgtgctatgagccagacagttcagcaggtgactacacctacatccactgggaccccaataatcaatgattcccacatcaataaattctcttcctattagtgtcttctactgcctccttttgatgggctcatatcatagtatcctggggaagttttggctacattggagaaaaaaaacagacaatgtttgtacaaatggaaccatttttcttcattggttatttgtctattcttctcgctgatagaactgttttaaaggcaaggctgcaaacaacacaagaaagagatcatacactggtgtggcctagttacttcagtagaaggcatggttgaaaaatgcattgagctaaatgtgcactgcagaatgaaatgagtttctcacgttttcctgtacattctggactaaacttacatttatggttatcaccaatgaaaccccaaaacaacctctgagagaattagtgggtgtctgcgttcactaatggcataaggcatgatgaaagagatatataacatagtaaccactattaaaactcatagtgttagggaagcacaggcagtttacaggctctgaggagtcacagcattcagatagcaacaacattgccttgctgtgtcatggtgacaacggtgattgtagtcagaacaagaaatctgaaaattaaaagaagaaaaagatttaaaaaaaatgtagagagaagtttcttttacctgaacagatggtatcctaaacacacacacacacacacacaaaaaaaccccacacacattaattgcacaagaaaaaagtgcttaagttttctttctctgtccatttttctaaatccttgatgattagcctttgaattttgtaatgtaatttaaattgcattaattatgtaaaaagagctttttgacctggagccttgcacaccttaggggcagccctgctggccatgtgctgctgtgctaagcaacttagatgcaaaatctacttttattttcacaagtacagtcactcttagtacttagaaagtaaacccaggacaactacgcagcttcctcatgtgcgtacttcgtaaaggctgaaaagaagagccatgacaggaaaactagattctgatgtggatgttactatctatccaactcaggttgtttttcttaattataagattactcctactcttgtagggtttataatttctattatcaacactacaactaataaagtatgtgttaggcacaagctaagtgtcagcttccagtctcagtacacagtacacattgtgtatcaaagaattttagcaactttatggggaacatttctgatggggggggggagataatacttccattgcgcagatgtgaaaaggaaggcctgaaatagctgggaatataagctgattcacctaattgcaaaacaggaaaatgtacgaggctgtcttactctggagccaaaacaaatcaaaatcaaatacttgagtttgcttctttcaacccaaatttctaaactaaatcaggtcttagacataaaacagcccaaactccattctatgactggaatcgatctatgatttttctctctggtctggtgattctttcaatttattttcacagagcctggcataattggagggcttagagttgccagtccaatggcatctccggttctcacagacatgtctttactgaaaagattcatactgtccaaagggtgaactttacagctggtggtagggccacagggcagagccatggcttcaatcaccatagagctacagaaagagaacactccaaagtggaagctatttaacttcaagaatatgaaaccatgcaatcataagaaagtcatgtggcatgtatgcatgcatatatacatgtatgcatgcgtatgtacatgtatgcatatgtatgcacatgttatttatttgagagtgtgggttttacttgatatgcttctgcttctgttttgaaataaacacatttaaaaagtgaagatacatatttgaaaataaagaatatatcagatcgcacactcatgatagtgatcttggcttaaatacaaatacaacataatgtcaaatatctagctgaaaatcaatagctgtagtcaattaagcaagcaagtggaactattcagagaaattcagataattgactaaaaaattccaattttcattcagacgcctgtcaccattcatcttatcatttgatgtttttgctctcgctactttcgagtaacaaatattttactcctttgcactctatgaaacatacctgcaaaaaaaccgatgaaataacaatgtgacgagttagagactgcagacttccagctttagcttttcttttaattcattcagcttcatttttcctcgtcaactactttcatttcaagatctcagtgatcatttacaagtgtggaaaaacctctttagcccactctgtgtttcctcccaggtggctgaacccacagtttgattttttaaatgggcagatagatgtgctgtaatgagaacacaaaggaacaggtttataacttggtacattatggccccaggttcaaagcggggaaagccgcagagctgtaagcctttgtttctgacttatgcagatcaacagcagcattttctgggagtttaaaaatgcagaatgcaaacagagagggaaaagcaaggaaaggggagaaaatgaattaaaacaaagcaaaactcttgggatggtttatgctgcagggtattttcccagagttctgtccaagaataatctagtaaaaatgtggacagagaaccaccgacccctgctttcccctgaacatatgcagctctgatcagtctggtatttctagaaaaacaaggtcctgaacccgagtcctcagacacataacaaagcgcgcttcacagctgtgatgcacagtgaagagcggctccaaggcctgagtgggtcccaagacaatgcctcctttatcacccagaggacaaatatctagacagcaatattttctgcttgaatgcttcaagcagctcgtgcaactcctgcctgaaagggaaaactgagctcagagtgtttgctgagtgattattttaatttactacttgatgtaaatctaaatgaactgacacccagcttgagatggacagaaaacaatcaccaagggtggggaagctggggggaagagaaggggcttcaggagaggtgctgaggttacacatcagctggagtgcagcccaggtttggacaacttttgcagcggccctgcgagagaagggggcggggggcgagctcagcattccggtcccttctctcaattaccataataagttcggtaattttgtgctgtttatttatcaggccaggataacaaagggagccgctgaagtctgttctgaaggcaccatgacaaagcaccagacagaaagcggtcacgtgtggggagatgagcagacaccacttcgcgggcacctgattattcttttctcgggatttagaagcaaaaattaccctacggaaaacagttgcatatgcaaaaccacaaatcgctgtatgaggcaaatggggcgcgcgggggtgggggtgggggtcgtggagactgaaggaaggtgagggcaactagccagtcaagtttaaatccttatctgcattatatgtcaacatttgttcaaactggtagagataaatgatttttttttaaaatctttttcttaagttctctttccatctgtagctctagtgttttagggcaggaagttctttaggtggagtcactatttctgagaaattgcatggtgaaatcatctctgcttagttaagatactcacactctgccctgtgtgccccagcttataaagcgccccttttccctcctcttgccctctccgtcctcctccttttcgttttgttcatgaagcagtaaacaggcagaagatgaagatgcagattcctatctctaggtttgtctcttttctctaaaaaagtctcgcatttcagccatgtctgcctaatatccttatccaaacagtggcgatgcttgctaatgagcgtggtcttccttatttgcagcagtgttataaatggcacagtgtatgcagataaatccccacgcacggctctgaaaatatgcccagcagaggagaaatactgcacagcttgtctttccacaccccgggtatggaaccaatcacagccacagtgacttctcttttccttatgacctctcgctgccctgtgtggtagcacatgccttcaatgtcagcataaacaaggctgagacaagggggttgcaggacaagtatagtctgggctctttagcaaaagcttgtctcacaaaaactctgtccttatatgtttaggtgtgtttatattaatattaagcccccaaaaaaccacacccatgtgtacacacctgtgtatacaatacatgtatacaactattgcatagctgggtttcttgaactttccactggttgtccttttaacttgagaaatttttacatggcctatagtatccaataacagccacatacacaaaacatttacatataaataaaacagaatgatattttagtatatatatgtatatatatttattattaattacagaagaaaggaaaattgcttactaataggatggatgtgtttattttgacataaagaattaaactgtcttaatagttgatactacaaggtagagaacattccagtgcttttcagatagattgttcattttactattgttaatacctagaacacctctatgtaccagcatgtagctcaaaataacaaatgcatttttgggatcttttcagaaacagttggaattctgtcctaattccaaaccaaaattcacctaatggtcttttataaaactgaactcaataagtagcattatttaaaatcaagaattacaccacaatacaacccaaagatatgctgatttatatttatatactgaggaattatagcaggaagcagtaaaatatttatttactataattaagacattaggttttagttatttgtaagtgtgtatgttatatgtttggggtacatgtggtatgctgtgtgttcctatccatgagtacacataggctagagaataatatcaggtgtctgttatcaccctctgccatattcccttacaacagggtctctcactaactctgtagcttgtaacctagacttgcaacaacaagccccagtgatccatcttcacaccccagtgctcggttttcagatgcaggaaaccacacccaactggaattttcaggattcaatctcaagtcctggtactatatagcaagcgctcttacccactgagtcttcctcccctttaggtttctctaagagaagacagcactgcaccacagtgaatccttcccaattccatgtactgtgctctcaggtcaaagcctgccagtccaggtaccatgcttggcatcctgtgacaggatgacatgcaaagagcacattttgtgtgtgcagaaaccaggccgtacaaaaacatagcatacagcacaaaggctgtcagacctgtttgatttccaattgatttttgtttcctgtgcactcagaaacctttttagcaaactccacatttagtcatgtgaacctgtgtaaagttatgactcatagttcaagaaactggaataaatataatgcaatatatgcatacctgtgtgggtatatgatatatacctacatgtatcttcatattaggtgagcctgaaaggcatgcctctcatagggcctgtattcctgttttccacctggatgcctggagttcctgtaatggccacggatgactccacagtaactgccatatgtgaacagtggggtagaagccagcagcctgaggcttccacttttatctttctttaaaaatatattttggctggttgaggttttgagtaagatcttattttggagagatagtactacatttactttttaaaaaatacttttcccaaagggaatgtctgggtgttgggatttcatccctgcctgacattgtcccttaaagactgaaattaagaagatcatatgccccagcacaggggaatgccaggaccaggaaacgggagtgggtgggttgaggagcagggtaggggagggtataggggactttcaggatagcatttgaaatgtaaatgaagaaaatatctaataaaaaatgaaataaaaaaaagaaatgtaagtaaagaaaatatctaataaaaaaaatgtatagtgtggccttaaaatgcccaccctttgaaataaaagaataacacagtgacttgaaaagatgaccttcagaaactggggtgcctgatgtctttagagagtgcacatcttctgtatcatgagaccaaggcctttcccgaatgacctgtccatttttcctggccatctctacttggacatggaaccattgtgttcacccatgatgtgggattggacagaatccctttgagctcgtctccatattttgtttctgtattttcctactgataggtcactgttagaaccacgttgttcagagtatgctctcagtcagcagcccagaggtgaggcagtgttaactgcttcgtacagagatattcgggacgggatccaaagctcaagtcaggcagcagagttcaccattgatatctctgggtctttcccatggaaatgcatttgggtatataagctctttctttgaccataaaataccaagatatcaaaacatcaattactggagaaacccatttctaccaatcaaaactaaaatactcctttgttagcttgatgaatatttccttttaatacaataccatgttaattggtttgcactgaacagaacacatcaattaatacatgttcttggtatatttcttttcagaaaagttaaatgatgcttagagctcaaggcatgttttgtaagacacacatattatcctgttttttttttactagataacaaacttatcttaaaattctggtagcctttagacaccagaattcatttaaaaattctcttgacttgtagtcttacttaacgctaaactacagaaattggatggctaaaagggagagtagctagactgagtaataaacaagaatgtattgatggaataagcaaactagagttttcttctaaggtatcatccctgcctctagcaaacttggacaagcacgagcagagactttaataggcttttaaaataactttcacaatacagtgtaccatacaatgctgtttagattattttatttccataataaaccttcattaagtatatttatctaatgatatgacagaaccaaaaaggaaaaggaatataaaaaatgtgtgcatgtgttaaacattagcttttgcaatagatttataaataaattacagataatttatagaatcatgccatatttataattgcatgtttaaagcaatcttcttatgataattgcattgtatggctgactctaagaaaggggaaattacaaatttatatttccccagtttacagagatgggctctcttttataggtaaaattgtattgtgtaggattcagagcggaaaatgaagcttctatttcagtgtaactcagaccccattactaaatgttcagaaggctcagtataaaaaattaggtgttcaatgtttctcaaaaaggccattgcttaaattccaaattaattttcagacaaagctgctgtgaaataatcaataaactttgcatgacaaaccaaaactctgctggactcttcaagataaatgataccgaggctctcttttgagaggaatgaaagatttcaactgcaccagcagctttccagtgcttgctgcttcttggttgtctttctagaattatttcagcatgagaaacatgtatatggttacaaaatacctgaagaacaaaaatattcaaattcactggcctcaaatgctttatctattgctggaatatttcttactgacagcctagacagggacagttatgtgaattaacttgcctttgcggtgggaaagaaaatactacagtatctagttttcaaagtctttagcagaaactagagggcaggttgagggtcccattaattcatactctcccatggacctgatctgtgaatcaagtaccagtggtttttatgccaccttccaggcattacccttcctgtgaggaaatcatgcacgaacagaatcaccctggtgtcagaaagttcacatttcgacttgaactcagaaagtaaaaggactttaaagaagtatctcatagcaagggagaaataaacggataaaacagtagcaaagggtacctaccatcttaaactcacaattagggagttctttaaagaaatggttgagtaaagatctggatggagcagtaaggatcatcacctgcagcactttgagagcataaaaaacccatgagggaagaaagtgactggagcacatcaggagaggaagccagataaactgaagaggaaggagagaatgcatcagttgcaaatgaactcacagaaacaggaagttagagcatcttcctatgtaaagaatgatggtgttgctgtcaggatgtgcaaggtgatgccaatgtaagaaacagcccccaaatatcagtgtctgagaaccctataggtttcattcttgctcacaggagctctaccgcagttattctgaagattctccagtctgtcagctttgtcctgcctggaagtcaggcagactgagcaatccttctctaaaacattgtgaattatagcggcagatgggaagacctctcagaagggcctcccatcagcagccagtattcctgcctagaagagcgctctttcacacatgatacaaagatttagtcaaatagttactttccataccatatgggtggaaagaagggacaggaatgggtagcaagcacacacaggtaggaagtacagagttacatgcaaataattagtaaatacagttgtgaactgtgcactaagaatactgagttttacaaagatgagaggggaaggtaccagggggttaggaaatgtgtctgcaggatagtagagtttgtattcagagaatgataatgttagggcagaaagaggaaaatagaagccctgtaaatggattacttcagtgatttagggacataaaatggctagagctggcacggtaatagtgaaggcgggaggatagttggactaaacatctcatattgggcttaagaaattcagattatggcttcacctcttttagtttgttttggttttgttcttattttgaaaaaggaaactcgaatcgttcatcaggttccaccaatgtgggaaatgtctagtgaaacaaagtagtgaagccttaaactaacatgggtgagtgagtgtgcccatcaaaatatgctgacccccctcccactcccactcccactccccctcttcctctggactgggggacattcagatgtgggcactcagcgtactttaagcaatcatagctctgcctgtttcttaaacaacttacagtccctgttcccccctttctctcttgggccctccctcaccgtctttttccctcctttcctcctcccttccaccctttctccattttctgtctgacacccctttctctcttcctgttgatcagttcctccctcctcctcctcttctctccctaccagtgctccctttgtctctccctgctcctctctcttctgtcactcttactagaacatcattgagcttctgaaagttcccaggcacaggatgaggtgcagctaaagaagaccctgtcatttgtacactttagatgagttttctttgtaacccaaatatatcccacagggaatggatagtgctcacctttcactcaagtgttttcaatgcagtcagattgtacctgctccaaacatcagggtcataggactgcagtttagaggaactgtcttatgtgagcatactctagggcagtggttctcaacctgcctaacgctgcaaaccttaaataccatttctcatgttgtggtgaccagcaaccataaaattatttcattgctacttcataactgtaatttttctcctgtttggaatcataacgtaaatatctgcgttttccaatggtcttaactcgctgctgtgaaaagattgttcaactccccaagtgttctcagctcacagttgagaacctctgctctagggcatcagacagaaaaagaaagctcaccactatctcacctcctgtgttataaaatgcagtacaaattctacttcttcttggaattcatcaatattttgaggaacagtttttgtcattgctacccatctccttctcctgggctcatgcattctattatttttaggttaaaaaatatggaatgttcatataaattttcagtttcagcccccaacaagtattgctatttgcctttacacagacttttattgccttcagtgtgaggtcatgcagtggccaggaatttcagcaaaacaaattaacaaaccaaaacaactcaagcctgagaagggagctgactatatagagggtcaggagctctccgtggcaacaaacttaaaatgtggaagtcctattgtatacattatttcctttcataccatggagcacagcaacaaatacaccatgcgagatgcattccttttctgaagtgtgctctattctcttgcactacctacccatacctacatgtcaaatctttatttgctatgattacgtccctcaggtctaccagagaagttactttaatttactctttgcatttcttccaaccttcccaaattacccagctgaagccattaagcaattgcaggctttggaaatcacttttaactttgagagcagacagccgtccactgagcctcagatgctaatctgttgaatgggtaaatctttccaaccctttccagtctaaggctctgtgacacaaccacaaagtggtagtcgtcctggtttaggggcctttggtggtgggatctgttttaacactgtgctgactcaggccaaaagccatgagcaccctggcaccccataagcctggcccgtcagtactctgagagtaagctatagccatccatatcgtctcatggtcactgaacttggacggaacattccaaggagaaaaaaagaatgtaacaagagaatgtgagattgccttttgattttttttccagattgctgctctgttcttccatggtattgtttaatccaagaatgataaggaccttttatttgtatgtttggagcatgctgctactttaaaaaagaaatcacagtttttctacaggcagaaggatggtcaagatgagctgcagcagctcctcctagccagctttatttggaacgtggtacgttataattgacagccctgacaagcacgttggtctcatcggctgcatgtcaggattcctgccctatatttccatatcagcgagcacttccagtgtgtccttgaactaattgaaaatctccctgggtttcaggttccccatctttgttgagggcccctcgtcatttgccacacactcgcaggaggctcctgagcatgcggaatgctgtcctatagccttgagagatttcctatctctttacagtgtgactctgatgtctatttgcttatcctttagagagagcaactcatattgtacttctcattccccaaatagcatgtgaattacatcagtctgctaaaaaaaaaaaaaaattaaaaacccagacaattggtgatttttagagccacagacccagttcctctgcattagtttttcagtttttcatccttccgacttttacttcttattaggaaaacaacttaaaaattttgaaggcttaaaattgcccatgtcctctcaaatgctgttttagttaatacttgggaaaggaaggggttataaaagaatgatggccagactcctgtatttctagttgatttatggcataaaaatatcctacatagcaactgggattttaaatacagaactttatttcccatactacaggaagacaagagctcatcctgttggatgcatagagaagcaaattggcaaagatcaggagaaggtaacaggctgttttaaagaactatgtaaaagaaaacgtctgaattcaaaggaggtcagattcttcattgacccagggcgtcagaaagggaagccggcatgtgcaatcttgtcctctttcatttttacctccatggtcaaaaagcctcgccagaatgaacactgtaaagaatttgctttcttccctcagcttgagcatggaggaattagctccctgggtgagcgaaggtgaaaagaagctactttggggaaataagcaatgttcacaggcaagagaaagtttgaagcaaacatatggttggaatgctcaagtcgattttagatcaagctgagagagttgagatccgagggttcagggatccagttcagtgcacattcctactgtgcccgactactaattgcaacctatgtttgtcaatcaaatatttgcaattaacaaaaatattcccctaagagacatagaacagagctggcgaaggggtctggcacactgctaaatagagcgagctgcacacagaaaataaaataaaatatggtattaaaaatattctgcagctgataacactgctagacactcccagtcaaaacattaacaagcaggataggtggcatggaggcttttcaaagggattttgctcaaagaacagaaactttgatctcagggcctctgacccctcctccacctctgattcttcaatctacaagtacatatagtggtttaatttaactctgtgcataatttgcctaaggataaaacttgatctagattttttttcactccaatttttcaaatgctctactttccccctcccccgttctcccctcccacacagattttgagagggaaaggctgaagaggaaggtgactggaatattaaggactgtcagatattcggaggaaactctaatttgtaaattggtagaaatgccagtaatttgttgggaattgaagaccttctgtattcacaagtgaagcttggcagctgtgcactgttgttttgtaaatcaatattacatctgaaggtgctgtttgaatgcttgtgtgtcatcggggtttgtctgcaacacagttctgtgataagaaatgttaaaacaaaacaaacacaatcccttccctgtcctttaggataaattccaaacacaagtcctcaacatgaatatagcattccaatcaagatagaccttttgtaattaataaaatccattgaccacacacacaaaaatgctattgaatggaagctccctcccaatattccacaagaaaggattgcgtggctgtcagattaacagaagtcaagaggagatgagacaacactcagtactactaaaagagtgccatgcataatgaacagaatacacaggcctgtttaggaaattaaggggattccaaggtgacttggggtcacataggaagtcacaacggccactaactagaaaagtgagcattaaaaattcgtcgtttggtttaaataaactcatctcaatcattattagagactgcataggtttaatcaaaattaattgcttgagtgaatttttcagttttatctggtcattatcagtcttggagctgcggtgactttgtgctgtgatgctggctgctggaggagaaaagagctgaggctcagctgccttttgactgtctacaattcttactattgtgggcacagttaggagcagccacaaagataggggaatgtaatcattagaaagacactgtttcatttattatcattattatttttaatttgtgggcatgcatgtgtgtatgggattatgcattcatgtcttgtgtataaggatgcacaaatatgtatgtatgtatgtgtgtgtgtgtgtgtgtgtgtgtgtgtgtgtgtgtgtgtgtgtgtgtgtgatatatatggggggttaggaataaaagttggatgtcttattttatcatcctctaccttagtttttgagtcagagtcccttattttgtttctaagctgcttgtccagcaagcttcaaggacctttcactatccatcatgttttcactgtccatccatgccagagctggagttagagctgtgaggactctatccagttcttttttttccatattttttattaggtattttcttcatttacatttccaatgctaccccaaaagtcccgaaaaccctccccccactctcctcccccttcttggccctggcatttccctgtactgaggcatataaagtttacaagaccagtgggcctctctttccactgatggctgactagatcatcttctgatacatatgcagctagagacacaagttccgggggtattggttagttcatattgttgttccacctatagggttgcagatccctttagctccttgggtactttctctagctcctccattgggggccctgtgatccatccaatagctgactgtgagcatccacttctgtgtttgctaggccctggcatagtctcacaagagacagctatatcagggtcctttcagcaaaatcttgctagtgtgtgcaatggtgtcagtgtttggaggctgattatgggatggatccccagatatggcagtctctagatggtccatcctttcatctcagctctaatctttgtctctgtaactccttccatgggtgttttgtccccaattctaaggaggagcaaagtgtccacactttagtctttgttcttcttgagtttcatgtgttttgcaaattgtatcttaggatgtggagaaagaggaacactcctccattgttggtggaattgcaagcttgtacaaccactctggaaatcagtctggcagtttctcagaaaattggacatactactggagaatcccacaatacctctcctgggcataaatccagaagacgttccaactgttaagaaggacacgtgctcaactatgttcatagcagctttatttgtaatagccaaaagctggaaagaacccagatatccctcagcagaggaatggatcccgaaaatgtggtacatttatacaatggagtactactcagctattaaaaagaatgattttatgaaattcctaggcaaatggatggacctggagggcatcatcctgagtgaggtaatccaatcacaaaagaactcacatgatatgtactcactgataagatgacaagtggatattagcccagaaacttagaataccctatccagttcttaagtggatgttgggatggtaagtcaagtcctcatgggcagccagcatttcacctgctgaccattctcactagcttccacattgtcttgatgaaatagataacatcaagtgtaattgtcattctggctccctttacgagataactattgccttgagtttactaataaaacagcccacattagaggttctgaagatgcaagtccaagataatattctcacattggttcaacggcttctaaagattttcttaatgccatatccttcattaataaaacttttgaaaacattatttataatggtttacaatgtatacaattagcaaagcagaaattttaataggtcatcatgcaaaataattagaaagcaacagccccttcccaaactctatcttctttaggctcctagatgactctctccacagtaagaagcagatgaacttggcagggcccaagtctccatgtgtagtctgggtctttgctgaccagaagcccaacagcaagtagaaggtccttgtgtgccatcacagaacagcagcatagatccgagggaaagtggggaagtgaatagacttaggttcgtaatgctatggctggttcactctgattgcttcaacacagaggcacaggcacagagcccactcctagccagataatattgaaagcatatctttttgattaagctcaagtaccacctaataatagtagagattgatttttttttaatactcggtaaggaatttgcacaatacccttagtatggggaaaaggaaggaaaatacagatcattcttgagagagagagagagagagagagagagtgtgtgtgtgtgtgtgtgtgtgtgtgtgtaaaatcacaggggagcttacttgagtaaagataataaaaactcttttgacttattaatggatgtggtcctgttgtgttcctgctagttgactttcaggctcaagtgtaattgaccagatagagttcccttagtcttctattcttaactacttatctgtaaaagagacaatttgtagactatttgtaagcatttgggaacattttttgaagtgattcatacaatatattgtagtatttgctcattaaatcatgaccattcttattgtaaagctggaagagacagtgaatcctaggttcagtctaaaaaggccattcaggacaagccccttccgctccactcgagccccgggctactttgccagcggagtctcccccaacacccgcaagggcccacacaggattccccacgggatcctaagacctctggtgagtggaacacagcgcctgccccaatccaatcgggcagaacctgagactgcagtacataaggaagcagactacccgggcctgacctggggcacaagccccttccgctccactcgagccccggctaccttgccagcggagtcacctgacacccaagggcgcacacaggattccacacgggatcctaagacctctagtgagtggaacacaacttctgccaggagtctggttggaacaccagatatctgggtaccttcccagcaagaagagagcttgcctgcagagaatactctgcccactgaaactaagaagagtgctaccctccaggtctgctaatagaggctaacagagtcacctgaagaacaagctcttaacagtgacaactaaaacagctagcttcagagattaccagatggcgaaaggcaaacgtaagaatcctactaacagaaatcaagaccactcaccatcatcagaacgcagcactcccaccccacctagtcctgggcaccccaacacaaccgaaaatcaagacacagatttaaaaacatttctcatgatgatgatagaggacatcaagaaggactttcataagtcacttaaagaattacaggagagcactgctaaagagttacaggcccttaaagaaaagcagaaaaacacagccaaacaggtagaagtcattaaagaaaaacaggaaaacacatccaaacaggtaatggaagtgaacaaaaccatactagaactaaaaagggaagtagacacaataaagaaaacccaaagcgaggcaacgctggagatagaaaccctaggaaagagatctggaaccatagatgggagcatcagcaacagaatacaagaaatggaagagagaatctcaggtgcagaagattccatagagaacatcgacacaacagtcaaagaaaatacaaaatgcaaaaggatcctaactcaaaacatccaggtaatccaggacacaatgagaagaccaaacctacgagtaataggaattgatgagaatgaagattttcaacttaaagggccagctaatatcttcaacaaaataatagaagaaaacttcccaaacataaagaaagagatgcccatgatcatacaagaagcctacagaactccaaatagactggaccagaaaagaaattcctcccgacacataataatcagaacaacaaatgcactaaataaagatagaatattaaaagcagtaagggagaaaggtcaagtaacatataaaggaaggcctatcagaattacaccagacttttcaccaaagactatgaaagccagaagagcctggacagatgttatacagacactaagagaacacaaatgccagcccaggctactatacccggccaaactctcaattaccatagatggagaaaccaaagtattccacgacaaaaccaaattcacacaatatctttccacagatccagcccttcaaaggataataacagaaaagaagcaatacaaggacggaaatcacgccctagaacaagcaagaaagtaatcactcaacaaaccaaaaagaagacagccacaagaacagaatgccaactctaacaacaaaaataaaaggcagcaacaattacttttccttaatatctcttaatatcaatggactcaattccccaataaaaagacatagactaacagactggctacacaaacaggacccaacattctgctgcttacaggaaacccatctcagggaaaaagacagacactacctcagagtgaaaggctggaaaacaattttccaagcaaatggactgaagaaacaagctggagtagccattttaatatcggataaaatcgacttccaacccaaagttatcaaaaaagacaaggagggacacttcatactcatcaaaggtaaaatcctccaagaggaactctcaattctgaatatctacgcaccaaatgcaagggcagccacattcattaaggacactttagtaaagctcaaagcacacattgcacctcacacaataatagtgggagacttcaacacaccaatttcttcaatggacagatcgtggaaacagaaactaaacagggacacagtgaaactaacagaagttatgaaacaaatggacctgacagatatctacagaacattttatcctaaaacaaaaggatataccttcttctcagcacctcacgggaccttctccaaaattgaccatataattggtcacaaaacaggcctcaacagatacaaaaatannnnnnnnnnnnnnnnnnnnnnnnnnnnnnnnnnnnnnnnnnnnnnnnnnnnnnnnnnnnnnnnnnnnnnnnnnnnnnnnnnnnnnnnnnnnnnnnnnnnnnnnnnnnnnnnnnnnnnnnnnnnnnnnnnnnnnnnnnnnnnnnnnnnnnnnnnnnnnnnnnnnnnnnnnnnnnnnnnnnnnnnnnnnnnnnnnnnnnnnnnnnnnnnnnnnnnnnnnnnnnnnnnnnnnnnnnnnnnnnnnnnnnnnnnnnnnnnnnnnnnnnnnnnnnnnnnnnnnnnnnnnnnnnnnnnnnnnnnnnnnnnnnnnnnnnnnnnnnnnnnnnnnnnnnnnnnnnnnnnnnnnnnnnnnnnnnnnnnnnnnnnnnnnnnnnnnnnnnnnnnnnnnnnnnnnnnnnnnnnnnnnnnnnnnnnnnnnnnnnnnnnnnnnnnnnnnnnnnnnnnnnnnnnnnnnnnnnnnnnnnnnnnnnnnnnnnnnnnnnnnnnnnnnnnnnnnnnnnnnnnnnnnnnnnnnnnnnnnnnnnnnnnnnnnnnnnnnnnnnnnnnnnnnnnnnnnnnnnnnnnnnnnnnnnnnnnnnnnnnnnnnnnnnnnnnnnnnnnnnnnnnnnnnnnnnnnnnnnnnnnnnnnnnnnnnnnnnnnnnnnnnnnnnnnnnnnnnnnnnnnnnnnnnnnnnnnnnnnnnnnnnnnnnnnnnnnnnnnnnnnnnnnnnnnnnnnnnnnnnnnnnnnnnnnnnnnnnnnnnnnnnnnnnnnnnnnnnnnnnnnnnnnnnnnnnnnnnnnnnnnnnnnnnnnnnnnnnnnnnnnnnnnnnnnnnnnnnnnnnnnnnnnnnnnnnnnnnnnnnnnnnnnnnnnnnnnnnnnnnnnnnnnnnnnnnnnnnnnnnnnnnnnnnnnnnnnnnnnnnnnnnnnnnnnnnnnnnnnnnnnnnnnnnnnnnnnnnnnnnnnnnnnnnnnnnnnnnnnnnnnnnnnnnnnnnnnnnnnnnnnnnnnnnnnnnnnnnnnnnnnnnnnnnnnnnnnnnnnnnnnnnnnnnnnnnnnnnnnnnnnnnnnnnnnnnnnnnnnnnnnnnnnnnnnnnnnnnnnnnnnnnnnnnnnnnnnnnnnnnnnnnnnnnnnnnnnnnnnnnnnnnnnnnnnnnnnnnnnnnnnnnnnnnnnnnnnnnnnnnnnnnnnnnnnnnnnnnnnnnnnnnnnnnnnnnnnnnnnnnnnnnnnnnnnnnnnnnnnnnnnnnnnnnnnnnnnnnnnnnnnnnnnnnnnnnnnnnnnnnnnnnnnnnnnnnnnnnnnnnnnnnnnnnnnnnnnnnnnnnnnnnnnnnnnnnnnnnnnnnnnnnnnnnnnnnnnnnnnnnnnnnnnnnnnnnnnnnnnnnnnnnnnnnnnnnnnnnnnnnnnnnnnnnnnnnnnnnnnnnnnnnnnnnnnnnnnnnnnnnnnnnnnnnnnnnnnnnnnnnnnnnnnnnnnnnnnnnnnnnnnnnnnnnnnnnnnnnnnnnnnnnnnnnnnnnnnnnnnnnnnnnnnnnnnnnnnnnnnnnnnnnnnnnnnnnnnnnnnnnnnnnnnnnnnnnnnnnnnnnnnnnnnnnnnnnnnnnnnnnnnnnnnnnnnnnnnnnnnnnnnnnnnnnnnnnnnnnnnnnnnnnnnnnnnnnnnnnnnnnnnnnnnnnnnnnnnnnnnnnnnnnnnnnnnnnnnnnnnnnnnnnnnnnnnnnnnnnnnnnnnnnnnnnnnnnnnnnnnnnnnnnnnnnnnnnnnnnnnnnnnnnnnnnnnnnnnnnnnnnnnnnnnnnnnnnnnnnnnnnnnnnnnnnnnnnnnnnnnnnnnnnnnnnnnnnnnnnnnnnnnnnnnnnnnnnnnnnnnnnnnnnnnnnnnnnnnnnnnnnnnnnnnnnnnnnnnnnnnnnnnnnnnnnnnnnnnnnnnnnnnnnnnnnnnnnnnnnnnnnnnnnnnnnnnnnnnnnnnnnnnnnnnnnnnnnnnnnnnnnnnnnnnnnnnnnnnnnnnnnnnnnnnnnnnnnnnnnnnnnnnnnnnnnnnnnnnnnnnnnnnnnnnnnnnnnnnnnnnnnnnnnnnnnnnnnnnnnnnnnnnnnnnnnnnnnnnnnnnnnnnnnnnnnnnnnnnnnnnnnnnnnnnnnnnnnnnnnnnnnnnnnnnnnnnnnnnnnnnnnnnnnnnnnnnnnnnnnnnnnnnnnnnnnnnnnnnnnnnnnnnnnnnnnnnnnnnnnnnnnnnnnnnnnnnnnnnnnnnnnnnnnnnnnnnnnnnnnnnnnnnnnnnnnnnnnnnnnnnnnnnnnnnnnnnnnnnnnnnnnnnnnnnaccttcaataagacaaaaagaccaccaacaggattgggaaaggatctttacctatcctaaatcagataggggactaatatccaacatatataaagaactcaagaaggtggacttcagaaaatcaaataaccccattaaaaaatggggctcagaactgaacaaagaattctcacctgaggaataccgaatggcagagaagcacctgaaaaaatgttcaacatccttaatcatcagggaaatgcaaatcaaaacaaccctgagattctacctcacaccagtcagaatggctaagatcaaaaattcaggtgacagcagatgctggcgtggatgtggagaaagaggaacactcctccattgttggtgggattgcaggcttgtacaaccactctggaaatcagtctggcggttcctcagaaaattggacatagtactaccggaggatccagcaatacctctcctgggcatatatccagaagatgccccaactggtaagaaggacacatgctccactatgttcatagcagccttatttataatacccagaagctggaaagaacccagatgcccctccacagaggaatggatacagaaaatgtgtacatctacacaatggagtactactcagctattaaaaagaatgaatttatgaaattcctagccaaatggatggacctggagggcatcatcctgagtgaggtaacacattcacaaaggaactcacacaatatgtactcactgataagtggatattagccccaatcctaggatacccaagatataagatacaatttgctaaacacatggaactcaagaagaatgaagactgaagtgtggacactatgcccctccttagaattgggaacaaaacacccatggagttacaaagacaaagtttggagctgagatgaaaggatggaccatgtagagactgccatatccagggatccaccccataatcagcatccaaacgctgacaccattgcatatactagcaagattttatcgaaaggacccagatgtagctgtctcttgtgagactatgccggggcctagcaaacacagaagtggatgctcacagtcagctaatggatggatcacagggctcccaatggaggagctagagaaagtacccaaggagctaaagggaactgcaaccctataggtggaacaacattatgaactaaccagtaccccggatctcttgactctagctgcatatgtatcaaaagatggcctagttggccatcactggaaagagaggcccattggacacgcaaactttatatgccccagtacaggggaacgccagggccaaaaagggggagtgggtgggtaggggagtgggggtgggtgggtatgggggacttttggtatagcattggaaatgtaaatgagctaaatacctaataaaaatggaaaaaaaaataaaaaggccattcagttttcaagtggactgaactgcaattgtaacaagtgtgagaatattttcctcttagaatacagcttcccctgataatatcatatttaggctctacaaaggtttttaaagagaaagaaaaagtttgatttttttcctatttaaaaatgatgaaagtttgataaaccattgtcacttggataacagaactgaaaatcaaaattggactttcttatttttagtccagacttgtttgtgctatatcactatcagaaaccttaatcagatagatagtatgtgtatatgtgtgattaatgaggcttttcttctcttaagtcttaatcctgtgctctctccttgatacaccctacttcttccttctctccccctttccttcctctctcttctcccttccacattttttctctccctcctctaccaaattatttggtaacaaaaggaacatcacaacaggataaactgaaaagaatgctaaaggtttctgttacatcttttatacattaaatttttgctttggctgttattttaagcataatagacaatacatttctatacttctgaatatacttttattttcttcctttcacaacatgaaattat

SEQ ID NO: 2704 - DNA, 1497 bp, Mus musculus
tcattgcaggtttgagggtagtgaggaacttactgtataaaaggacaaaaagagtcgtaatggcaaaagtattatcagttgagtttcagccagggtaaaggaacactctgtacccggcctgagtcagtcagaagtctgggctctggactgagttgctagtagtgactttcaggttttctaagatccaagagctatacatttgcagcttccaggacaccaaaaaggactggacacaaacacatggtgctcacacagtcattgtctgctggtgcactacagaaaccacaaaacttacaattcactgactgatggaagagagccgggtaggtgagttacaggaatctgcctttgctcattccccagcactggagttacagaccactgtggccactttagctttgatatggatgaagacctgagctcaggtactcatgttttgtgcttaatggaggttttgcagcagaagaagctgttctattaccttggttccaccacgattttcaagatgagagtacccagcttgatgaagactcaagtagcacataatgaagtcaagacccaggccaggataacaaagggagccgctgaagtctgttctgaaggcaccatgacaaagcaccagacagaaagcggtcacgtgtggggagatgagcagacaccacttcgcgggcacctgattattcttttctcgggatttagaagcaaaaattaccctacggaaaacagttgcatatgcaaaaccacaaatcgctcagtgttataaatggcacagtgtatgcagataaatccccacgcacggctctgaaaatatgcccagcagaggagaaatactgcacagcttgtctttccacaccccggattgctgctctgttcttccatggtattgtttaatccaagaatgataaggaccttttatttgtatgtttggagcatgctgctactttaaaaaagaaatcacagtttttctacaggcagaaggatggtcaagatgagctgcagcagctcctcctagccagctttatttggaacgtggaagacaagagctcatcctgttggatgcatagagaagcaaattggcaaagatcaggagaaggtaacaggctgttttaaagaactatgtaaaagaaaacgtctgaattcaaaggaggtcagattcttcattgacccagggcgtcagaaagggaagccggcatgtgcaatcttgtcctctttcatttttacctccatggtcaaaaagcctcgccagaatgaacactgtaaagaatttgctttcttccctcagcttgagcatggaggaattagctccctggattttgagagggaaaggctgaagaggaaggtgactggaatattaaggactgtcagatattcggaggaaactctaatttgtaaattggtagaaatgccagtaatttgttgggaattgaagaccttctgtattcacaagtgaagcttggcagctgtgcactgttgttttgtaaatcaatattacatctg

SEQ ID NO: 2705 - protein, 119 aa, Mus musculus
MDEDLSSGTHVLCLMEVLQQKKLFYYLGSTTIFKMRVPSLMKTQVAHNEVKTQARITKGAAEVCSEGTMTKHQTESGHVWGDEQTPLRGHLIILFSGFRSKNYPTENSCICKTTNRSVL

SEQ ID NO: 2706 - DNA, 30854 bp, Homo sapiens
gcattgtacatcaattgactcctaggctttttaacatggacatttggttccccctagttttttaaggagtttctaaaaccacacgtaccaaatattattcaaaagattgcataaggtttacatacatttgtactactatttttgtgtatacaaaagcgtcttaaattaaaattaatttaaaatgcatgatttcgttatacattttcttacaacatgtgtacaactgttactgttgcaaaatggcctataaattttttttggccttaaagggagcattcttgttcaaaaatattggaaacatggcttaaataaaatgacttttttttttttttagtctttagctactgggctataaagtaggtacatgtcagacttttcttctcagaaaactgtctgtgccaaatgaccactttgggattttctaaacctaaaactcatttttttctgtttgacctataagccttgagacatacttgaactaccttttaattctctttaggaattgtaaagatttgttaactaacctgactatggctcaatggtcatgtggcacttacatttgaatggaggattttatcaaatgaatgataagttcaccaaaatgttaatttttaacataatgataaatccttcaactattgtattcaccagttcacacaagataatgtttatattcactcaaataatatttaagatccttcataatttttttctcaatataccagcacctcatacactagagtaaggtttggcaaactttccattaagggggaaatagtaaatacttcaggctatgtgggccatacattctctgtcactaccacccaactctgcctttgtagcacaaaggcagccatagacaacatgcatatgaatgattgttgatgtgtttcaataatactttattcatggaaaccgaaatataaatttcatgtaattttcatatgccacgaaatagtcttcttatttttcattttttcccctagccatttaaaatttcaaaacattcttagctcatgggctgtacaaaaacaaatggtgggttggatatggcttctgggctgtagtttgctgacccttacactagagcattttcaaatattttctgaacatgctatgagtttctgtgcttccacacctttcctttttataatttgttttctatttatttcaataggtttttagggagcgggtgttgtttggctacatggataagttctttagtgatgatttctgagattttagtacacccatcacctgagcagtgtacactgtaatcaatgtgcagtcttttatcccgcaccctccttgcacacattcccccaaatccccagagtccattgtatcattcttatgcctttgtgtctcgtagcttaggtcccacttatgagcaagaacatacgatgtttggttttccattgctgagttacttcacttagaataataatctccaattctatccaagttgctgcgaatgccattatttaattctgttttatgctgagtagtattccatggtatgcctataccatgttttctttatccactcattgattgatggacatttgggctagttccatatttttggaattgcaaattgtgctactataaacatgcctctgcaaatatctttttcgtataatgacttcttttcctctgggtaaatacctagtagtgggactgctggatcaaatggtagatctacttttagttatttaaggaatctccatactgttttccatagtggttatactagtttacattcccaccaatggtgtaaaagtgttccattttcaccatatccatgccaacatctattattttttttattttctcattatggctattcttgagggagtaaggtggtattgcatttggttttgatttgcatttccctaataaataaataccttccattatatagttcccacattcttatatctttccctttttactttgcctaactaaatgctagcaaaactaagctcaagtgacactctctctaagaatctttccatgattataactcaccatgtcatgcaaaacaagaattttatcccatttggttctagtagtactttgcacatgctctgttataggaacagaggcaaaacacttagaaagtctgtgccgaatatttcttcaatgaaccaatcaatcaatgaataaatgaatgatagagacactaacgaatgacttgtaccacaactgtttactgaggtatttccatgacctaaaagtgagtcccatatggggttccagttgtagtcatctttctttccccaaggcctgaaacatgtttgctgtgtggtaatattggtaatattttaggagttttgttgaattagtgtattgaaggtgaagctcagagatacagctagggaaaatggattttattttttatgggcattcttatgtttctgagttgaaatagtttcatctgattctctacaaaatggccatacctagctccccaaagctaagttaaaagtcacagatatccactttcctgtcactacttgtagacacatgcttgtttatatttggctaattaaaattaatcaccctagttctcccttcccttcaagggcattacttcccattaacttcaatgaagcttgtttgacttcagtgaaagttttttacctgcatagggacagtgaggaatcaggacaaatatctttaaggctgtcatttgtcaccatgaacaaaagaaatagagatccttaggcatgagccgccgtaacacacttcatgtgcctctcttaattctatccttgctgacaacccatgactgccacataaaagaaagcatcagaattataattgaatggttctgaaatatcagagacagaacctctgaaaagaaggttcacaaacttattcgttggcaaggttagtgatttgatacctacaaacggccagaacactggtgacagcatttccaatgcacgcatatgcattcactttgagtcagggttgaataggaaagcatggtaactcaacttcattccaccagcacacagttctttgacaaccctctactattcagaatacccctgagcaagagaaagtgaaagaagaggaaagtgaaagaagggaaaggcatctgagacactacagtgatatcataatatccatactctgaaacttgagcattttattcatggtatatttatttcagtcagagtaacagatactaggagcatttggcaaaattggagtgccaatctggagagtacctaagcagaaagcctccgtttttaaagattctccatgtataaaaaaattaaggcaaactagtcttattgtttctaataatcatcaagttaattatttttcacaggaacagcatggcacaccccctaagatgattgttccagaatccccaccttaatcatgccatgtagcaactgtttctactgtatttttataacttatttaacaagactatttgccagcatttaagtgagataatacatatataatccccagtcctacaacctggcactcaataaataaactagttccttctttaagccttatctcttccgaataaaatagaatttttaactgaataatctaaaaaaagaaacatgcagcaaaagattacagggcaacccacactcacccatatgggcatgagggtgtaaggaaaaaactgacgtttattgaattccaagtcttagagctggggctttatatatgtgatctcatttaaatgtcctaagtagtccagtaaagaagttgatatggcttgcattaatatttagagcttataattaaaattttaaaatttaaattataaaaagaactgttccctaaaccttgttcatcctctactcgacttggttagttagcctccctcaatgtgaacaaacatctacctgaaatttcgtcattaagtcattcttttggttaagacactgtctctgtaaaagtttcctattaaagtgcatgttatctgggtcagataaactacaaagtcattaaaatgcactaaaattttcatagaaatcaagtaatcagataaaaacagctttgcctttgggagaaaaggataaatgagactctgagagaaagaaagctagatcttagaagctgaaaccaggaacaacccatttttgggggttctggcttttgggatgtagcatgtgtatgttatggttcagagtagtaggggattgcatggataacacaaagcatccttgttaaagagtgcatcaaaatcaaattccacttcacagttctgatgaggacaaagggcattgcagtaaacataaaaccatcttctaactcactcctccactctccaatcagaaggtcctttcccttctttgctattggctttccaatggagcagcagataagcattgtgtgtgcttcatagcaggcactgcactgtaaaacaaaaaatcacaatatcaatcaccataattgatactaaagcctgaagctggatttgggtgggaggctgagtcggtcaatctgtcagtcaacgaacgagacatttctattggcagaagtttccagccccatttctcagtgccagagaggtacactgtccagagagcttattccttatggttttagcttcttctatttgttttaccttgtagagtagcttagcaaacctccttttaacatcttctgcctatgatgcttatgtgaatgtagtagaatatcctatatctgcattcatgtataatttctctctatgtagattatcttaacacatccaaaaccaaatgcattattttgtgaagaatttcccaaactctcatgatgaaaagtgttacttggggcaattgttaaaaacacaaatccttggactctggaacccatgcctgctcagggagaggcccagctctctgcatatttaacatggaagtgattcccacctctgaaagcccatcatgatcagaactcctctatcttctgtatttcctacacagggcctagcacttggagacacatcgcttcacaaaattttatgaactaaattaatgaacagatatcatagttatagagacattaagtgaccagtctattcctccagcacccattcaattgtcttcaaattttgctgactttacctttacaagaataatgaattcttccctcttctccattctcattctgttatcctaattgaggttctcttcatcactctccagaagtgatgaattaaagatcatagctctttaatctcctttttcatggtctcatccactgttatccaacccttaaagttccaccagtggaatctttcaaaaacacagatcactgtgttgcttgaaaacctttcaacaatttactcttctccccccaaaacctggaataatgtctctaaggctcagagcctggcataaagtaagccccttaaatatatagggatataatttgtactcaaagctcttcaaaacctgatctccatgtaacttttctgtttcaattctaatctcaatctgcacctacttcagtgcccctactggcccctgcatttccctcaaaaactagaccatttgcattccactctgttgtgctcaggctgttgcctctgctttgtatacctattctttccttccttctctttcccacgctaaaagaaactccaattcgtcaaaaaatgtttaagtctcaaatttttcttaaatttatttaagtctctctttgggcacaggtagcatgtgagcaggtctaacagaactcagatacagattcttgtgagtcctgactcatccttttcctttggggtgctctgacaccccatttcacttctgcacttatggggccaaccagatgccccaagacctctgcagcttgagcctatgggatcattgtggggttgtcctgaagccacatggacatctggttccaggaaagtgacctggtgaatgtatttttcctgctagccggtacagtatttctttaggagtatcatgtcataatggtgctgacatgctgattttgtatgactttcaaatcagacacagaaggagtttaggactctggactacctatagtccactgccagccttgagcttgaactatgtgtgatccatgcttatccacccatgttctgaccaatcacagtgctggcttcaggctacagcacctgagggagtggaggtaaccccagacatcacttactcatgggaccgttactgttggcatccagaacagtcatcctattccttctgcaggctctgtaccatatttagacaatctaccaggtggctgcaactatctcccctgaggcttccaagaccactgctccacacagtaagggggccttcccattaatgttctttattgcctccaattgatgtggtcacatcatgaaattctggatagatttaggccatgctggtcaaaggacagacttttttgtacaaataggaccatttttctcacttagtgccttcctccttttctacccttctagctagtggaagtgagtggaaggtacggatgcagacaacattgaaagagatcacattctaggaatgcaatgttacagcccaattagttcatgagaaagcatggttggaagatatattgtttctatttgtatgctatagaattctgaacggtaaacttaacatgatcagggaataagttattcctcacattttctgcatcctctgggtaagacttacaatcgtggtcatcatcaatgaagcacaaaaacagcctttgagagaattactggaaaccaacatctacaaacagtgcaatggatgatgaagtgacacaagtcctattataactagacttttacaaaatggtactagggaagctcagaagcaagatcatcaatattatatcaatatatacaagttctgaagagtcatggcagagtaagtaatatcagcattgctagcttttttcacagtgggagttgtgatttagtcagacccggtaattctgaaaatcaaaaagtaaaagaaaaaacataaagagaagtttcttgcacctgaacagatggtgcctggacactgaaaagctttcacacacgttaattacacaagaaaaaatatgtaagattttcttctctacccttttctctaaatttttaataactggctcttgaggtttgtaatattattttaaatcaaactggttataaaaaaggagaccttttttaatttttggcctggagaataacacaacttaggagcagcccttctggccacacaaggtactaagcaagtgatgtgtacggtctattttcatctttacaacagccacagtaaccggttattatcttattacatagaaaataaaataatttgcctatgcacacagttagtaaatggttaaacggtgactcttattctggacaacctaatttttgtttgtttgtttgtttgtttgtttttgtttctgagatgggggtctcactctgtcaccctggctggagtgcagccgcacgatcttggctcactgcaacctctgcctcctgggttcaggtgattctcatgcctcagcctcccgagtagctgggactacaggcacgtgccactacacccagctaatttttttattttttgtagagatgggttttcaccatgttggttaggttggtctcaaactcctgacctcaggtgatccacccgcctcggcctcccaaagtgctgggattacaggtgtgagccacctcacccagccccaggacaacctaatattaatgtgtataccaaccttggaagagtaggacaaatctattattccaccttagttgtgtttcctagataagtgttaccttttttcttgttgtagaaattattatcattattatcatcatcattatcactaataaaatattttttgaatattagctatgtgccagacatcattctaagcatttaatatgtttaatattcattaaacaattttaacaaacttacttatgaggtgcctattaataatatttccaaagcacagatggaaaaattgaggtatcagagtgactaggtaatttactcaaggttactcagctatcagtgacagacaggggaattaaataagactctggctctggagcccaggaaaatcagaaccaaattttctagtttggttccttttacctatatttatgaactaaattgggacttggacataaaacatcacaaaccacaatatatgactggaagccatctgtgattttactctggtgaataaatttattttcattggcataatctaaggacttagcattgctggttttaatggcacctctggttcctatagatacagtggtcgaaagggtaagctttgcagctggttgcagtggggtcaccatgaaaacatccctaaggggaactcatttaattcaagaacatgaaatcattcattcatgagtacatcatgcacatgaccatatatatgtgcctgtaatacatacatgtccatcccattcctttatttctttttggcttataatagtaatgttctttctatgtaggaatggagaattttataattgaaaaatgtatatttagccagagcacagacataaggaatatatcaaatagcacattcactgtagctagcttggcttaaatatagcacgatgccaaatttctagccaaaaattgataagagtagtcaataagccaagcatgcagaactatttgtaaaaatttagataattgactaaaaatttcaattttcattcctacgcctgcaaccatgttccttaacatttaatgtttttctgtcactacttagagtaacaaatatttcacttcttcacactcttagcaatagcatacctacaaaatagctgaaataaaaatgtgatgactttaagatttacaagtgataattatctttttaaaaaaattctcattcagagcaaaatttccgatttgttttctcctatcaactccttgttttgtttcaagatctcactgatcatttgcaaatggtgaaaagcctctttagcccactctatatttcatcccaggtgactgaactctgcattttgatttccaaatgggcagatagatgtactgtaatgagaacacaaagaagcaggtttataactcagtacattatggcaccaggttcaaagcaaaaggaagcagcaatgccgtaagcctttgtttctgactcatgcagataaactccagcattttccaggactgtaacaatgcagaatatggagggaaaaaaaataaagatgcaagaaagagaaagaaagaaaatgaattaaaacaaagcaaaactcttgggatggtttatgctgcagggtattttcccagagttctgtccaagaataatctagtaaaaatgtggacagagaaccaccgacccctgatttcccccgaacatatgcagctctgatcagtctggtatttcaagaaaaacaaggtcctgaacccgaatcctcagacacataacaaagcgcacttcacagctgtgatgcacagcgacgatcggctccgaggcctgagtgggtcccaagacaatgcctcctttatcacccagaggacaaatatctagacagcaatattttctgcttgaatgcttcgagcagctcgcacaactcctgactgaaagagaaaactgagctcagagtgtttgctgagtgattattttaatttactacttgatgtaaatctaaacgaagtgacacccagctcaagatggacagaaagcaatcatcgtggagggtggggggctacggcaataaaggggggcgcataggagaggggctgatgttacactatcagctgaggtttggcacaggtttgcccaacttttgcaatggcagcgtaacagatagcggggcaggctcggcattccgttcccttctctcaattaccataataagttcggtaattttgtgctgtttatttatcaggagaggataacaaaggaagctgaggaagtctgttctggaggcaccatgacaaagcaccagacagaaagcagtcacgtgtggggagatgagcagagacaccacttctcaagcacctgattattctttctcagtatttagaagcaaaaattatccttaagaaaaacaaccgcaaacgcaacacaggctacacagatgagaaaatggggtaaaatggggattgagaaaattgaagggcaacttaataacgaagttttaatttcttacaaaaagctatcttctcttcatgtcaattatttgtccaaacttgccagtagagagaaaagatttttcaaaagaacgtttggttaagttcccctttcccctttttcaagatagaagttctttagatacagtgaatatttttgagaaactagatggcaaaatcatagctatgcctgtttaagatgaacatcagatttctttgcggtgcttgtaagatattatacaaagcaccatttttctctcttgtgctctctctctcttttttagctcatgaaacactgcactaaacagtcacaggaccaagatatagattcctatttccaggtttgtcgcttctgtctaaaaaagactttcatttcagccatgtctgcctagcatccccttcaaaaaagtggcaatgtttgctaatgagcataatcctcgttatttgcagcactgttataaatggcacagggtatgcatataaatccccaggcatgattctgaaaatatgtccaatagaggaaaaatatatcaccacttgttttccacaatcacaatatggaaccaaattatggtctctatcatgtagatatatatatatgtgtgtgtgagtatatgtgtgtatatatatacatatatagtcaatttatatctttatatatttatttagtgaatgcaacatcgatatatatgcatctgtctagtgcaattgaaaaatatctatttcctatggatctgggtcactgcttttctaactaggagccctcgagttctctgtaatggccttaaacattgccatgatggctgccatatgcggtatgtaaaaagaaatcagcacagtgactcttccacctttacttttatctttttcatatattgaggttgttgaaattgtttgttagtataatttatttcgggggaggtagtgcagcatttgcctttaaaaaaagattaaaaataaaaaaaggaggagggagttttcttgaaaactgttgtgctaggttgccctttgaagactatgagaaaagtaacagaaaaatacagtcgcctgtccagatgctgtaactatggggtacctaataccttgtggacgatacacatatcagtgttacttatgtagaaagatacagcatttccaacatcgcgttttccttacttttctccagtcatttctatttgtacatgtaaatgcatacatactgtgtgggatcctggtagaattgttttgagttctcctttacatttgttttaacacctttctggtgctagcttacttgtgttatcattatatatagaatacctcaaatagttagttagtgggtgaagggtgcagttgggtactaaggatctaaagatgattagggtaggaccccagaactcaagttctggggagatttagtggggagagcttgattaatgtttgttttctttggagggcacagtagagtgggtaaattttgtcacatggattgggattagatatgtaagaaagacctttctgtgatccaaaaatgtcatgaattaccctctgtgtctcacttactaggggaatcccattttacgaatcaaaatggaagcatttcattgtcagcaaggttaaagtatatctctttgactataatatcacaacaaattttcctgctatatacagaacttgcaaaatctagctacaaatatttaatacttaacatatttctttttaaaaagcgaattgatgcttagaacttacagtagtcttttgtaagggatatgtgtttctctcctgtgtttttggtgggtgaaaaagttgactcaaaacctggtctttttaataccatagacagaccatgaagaagaaattagtctcttgacttttatggttttatctgaatgtaacttatagacatcgagtagcagaaagagaaaactgcagatttgattgaataatacaagagaatatacttgattgaataatcaaaataggaattttcttctaggttatcattcctcacttatgctaacttggacaagcctaagcagggactttaataggcttttaaaatcactctttcataatacggtagaccatataatactgtttagattattttatttccataataaaccctcattaagtatatttatctaatgatatgacagaactgaagggaaaaggagcataaaaaaatatctgcatgtgttaaacattagcccttgcagcagatttataaataaattacaggtaatttatagaatcatgccatgtttataattgcatgtttaaagcaatcttctcatggtaattgtattgtatggctgactctaagtaggaagaaatcacaaatttatatttctagagtttactgagatgtgctgtcttttataagtaaaattgtattgtgtaaaattcaggttagaaagtgaagcttctatttcagtgtgacccatactccattactagatgctcagaaggctcagcataaaaaattacgtgttcactatttctagaagaggtcattgcttaaattccatattaattttcaagcaaggctgctggaaaagaatcaataaactttgtatgaccaagcaaaactctgccaatgcctccaagataaatgatacccagattcacttttgagaagaatgaaggatttcaactgtatgtgcagcctttcagtgcatgccagttctcatagttccttctggaattattttcacataagaaacaactatgagactgtaaactacctgagaaacccaaaggtcaagcccattggcctcaaaggcattatttattgttaggatgctttctcttaacaccttagatgagaacatttaagtgaattaacctaccattatggtgagaaaataaaatatattgtgctttctacttctgaaactataacataacattgtagagtatgttgagggtcatgttaagccatactttcggatgagaagaatgatagttgtgtgataagaatgaataactcattaattcatcaaatattaatatttattaactatctaccccaggcattgctcatgctattgggaaaacacctgtgaacaaaatgtccctgccctcaaggaatttatacttcagttttagaagcaaaaagtaaaatcataaaggaaaactatctcagacatagagaaaaataaacaggataagaatagaataataaagggtgctgttttagatctgtagtcagggatgctccccctaagaaggagacttttgagcaaagatctggatgaagtaagagaacatggaaagatgcatccataaacagtgcaaaggcccagtattgggcagaaagctggaattcactaggaaagcaaatagagccaaacaaaaggggagaggataaaagaggatggggatgaagtcagagagataggtggaggttggctcacataggccttgtagacaaatgtcagagtagcagtcagcatatgcccgactatgctatggtaacaaacaaccctgaatctcaacggctgaaaacatgaaaggtttattttttgctcacatcatgtctaccacagttaggttggaggctctgcactgtgtcatcctcatcccaggaaacagatgggcagagaaaccactgtcaaaatcactgccaaacatattatcagagaaaagacatctctgaaagatctcatatcagcaattaatgttccagcatggaaaggacacatagcacttccacaaacaactcactggccagatctagtcatataaccacatgcaatgatggcggaggaggagagaagggacaggtgtgtgtgggcagggagcacaattctaccatgtgtccactatgcagagacctataaatattttgtaaacagcatgcatgaatcctatggtaaaattgttggattttattccaatgagatgggaagctatgagagggttatgagctgtttgagctggcttttgtgtagagaacatagagctatgacagtgagagaaacagaaagacccataattagattataacattactttaggtgagagataataatagcttgggctagggtggtggtagtggaggtggtgagggatggttggatttgggatcccatacagagtagagtagagctgtcagctcattattttgttttgttttattttggtttttgaggttgcaagcccaaatacttgagctagtaccatcagtgtgtaatacaacctggtgaaatataatgggaagtgatggagcctgtggccaaactgggcagagcatgttcataaggacgtctaaattcattcttttttttttttcatctcatatttatttatttttgagacagaatctcactctgtcacccaggctgcagtgcagtggcacaatctcggttcactgcaacctctgcttcccaggttcaagcgattctcattcctcagcctcccaggtagatgagattacaggcacacaccactatgcccagccaatttttatatttttagtagagatggggcttgaccatgttggccaggctggtctcgaattcctgagctcaagtgatccaccctcccctagacctctcaaagtgctgacattacaggcgtgagccatagcgcccagcctaaattcacttgtttaaaccacagtatcaaccaaacaaaatagaattttgttacttttgtagtttgcatacttcgtaattaaatcaacctagttaaaataataacaaatgaataaataaaacaaccaattcccaaattctgtgtctagagaattttagtgacactttggcagatacatggcagcacataaacttatattaacaaagcacccaccagtcaggtaaaaattcagcttaatcaagaagtgtcagattgatgtagcatctattcaaaattaactgtataattttcaactcaactgaatttaatcagattgtgtgaaccttgtgattgcaggctcaaattacaggttgctaagaccttctccacctaagggtacttccaccaaaatttggtgtgcaaaattgaaggtgcaaaggaattacctggcatgcacaaatacataattcctgtgtgccattagatcatggagggttgggggagcatgggagtctacattcacagcaagcatgccttcccaatgtgggccatctagggaatatactttgataaatcacggctctacctgattctttaaacgagttacaaatttgacctttaccaaacatagaaagagcttgtacagtctgaaaattcccacgaagttcctgtactattattcctggatgtatatcggcaatggccattactaacacttagtgagggagagaactcgcagagaagtcatcagatgccttgctttgttttctctttctctctctctttccctcccttccttcctttctccctccctccctctccttccttctttcctttcccctttcttctttctttttattttgtctttctcagttgtctttttttcctagaacattattgagctcttacaacattccagacacagcactaggttctagaagtttagtattgatcaagacaaacagatccctgtctctgtgtagtgtgtttcttagaaggagctttctttctaattcagagaagtgagactagcaatactactacagtgaataaacaatgaggcaagaatattttggctagtcaaatggtagccactacaaaagtaagtgtcagaacactgcaacatctactcattattttggctgaatttagaagagttgttttgtatagatacactctagggtgtcagaaagaatcagaaggctcactgcaatcttgttacaaccacctgtcctcctcttttgaagtttagtgcaaataacttttcttcctgaaacttctacaagtattccaggcaatagctgtcccccggacatccaacacccctttctcaggacacatatatgggtcaactcaggaactcagcaagaaaaataaatgaatggcatgcatctgataaaaatgcatacatatacattgtgtgaatgtcagagactggagcaaataggagagaatttagtgccatctgtttgtttcatgccaaatttgggcacagtgaatgtttaagttttgtgtgttttttaatgactaaaaatctggaatatttatataatttttcattgtaagccattagctcaaaaatttcaaaatgttgtatgagccaaacaaaacatatccacaagccagattttatcttgggctctctagtttgtggcctctgtctacacaccataaatattggcacttgtcctttagcacttgaattttaacgaatgctgttgtgtttgtaatcccagcgagactgtaaattccacgaaggtgtgccacttatacatcgcatcacatcgcccagtccagtatttgtcactggggtcgctgggacagtagtgtaggatgagcaggaacacagtcccagatcacctaggttcaaatccttgctatgctgtttactagctatgtgactataggcaattttcttaatttatttgtgcctcagttttcttaattgttaaatgggggtgataccaattatacccatctcgtggggtatgaggattaaatgacttcatattcataaagcacttaaaataacaccaggaacatagtaagaactctgtaaattttcatataagttaaaataaatatgtaaataatatatttgttacctagaactgagtcatctacttctaatttcatgtggagataaaaacttatctggaaaataagaatcctttatttttatttatataaagaaccaaaggtataagcatctgacccaaagactatcaaggaatgtaaatctattccgaatttttttttcatattgctttctttttatttacttatatttaaatttttttaaagatatttttgttagaaaactaacataaatattcttaacttttgaatactaagccacaggtgtatatgcttacaaaacagctgatgaacatctgggccacttagtgtcctgattttgaaggttttccattatttattcattatgtgctagcccattaaaccatttagtgattccccataaattaaaacaaactgattaattccttcaaatgttctaatagaaatattttttagtacagaggatttctatgctctttttcacatggaatcatattagtaaacaggctacctgtagatttcttcacatttagatcattggatactgaggcataatttaagatgcacttcttaaagaatgcctcccaattcatttcaaagagaagaagggcccctcccagttggcaaacgtattttcaccaatagctatgtaagacaaaggagtatgtttacactacagcacgctgctaagaagaactgtaacaaaagttattttatttactcctccacaatatccctacttcccccaatttaaaactgagaaaactaaggtttaaaaatattagataatgatatttgaacacagcctgggatatggctgacagagaaaaaagttttggaatttactcaacttcataatttgttttgagcaatataagcaaatggagagtaacatcaatcctcaactcaatcgatcaaaaatatttattgagcagctggtacctgccaatattattttgttctccaactcttatctttttttatacaggtgaacataaagatttttcagtcaatagcatacactgaacattgcttctatataaagagcagtgtttctcaaagtgtggtccttggaacagcagcatcagtagcatcggtgagcttttatacaaatgcagattctggggccctacctcaaaaatgttaaatcagaatctctgagggtggagcccagcaatctgcattttaataggccttgaaggtgcttctggtgcacacttacatttgccagtctctggtagagtggcagagagtccctactaagagttataaaaaaaagagaagaatccccttacacaagcctttacaatctcagatgtgagctcacttacaggccacagcattagcgaacgaactgcaaactgagacaaacgaggaaattctgagaagagacctgattccctgagggccactagttttctctgaaggcagcatttagggaaatatataccttagaaatccaacaacagtatccagtgcattatctgatttcctatcataaaatttgaggttatggactcatcatctgaggtgttatcctattctactcgaaaaaatatacaccgtccttccctcacaagccccgcctccccacatacaaaatgttcatctcagaaagctgtcactagatcagtcaaatctatctgtgtagctgcttcaatttattcttctcattgatttctcccccatgcctcatactcttccaggcttgcagagctcaaaccattacaccattcagaagctggctttggtattacttcaagttattcaaaacagtcaccacttgctgagcctctgatgtctcatctgttgaatgggtacattttcttcctgatccttccacctctaaacttgtctatttccaaggatctatggcatccaggcatatggtgagcttacgtgagttaggggaccttagctgatgtgatcagcttagacaatgccttgactaatggcaaaagccacagggcacacagacacccaaggagctgctgtgtcagtgctctacgcagtaaaccagatccatcccaatagtttcatggtcactgagcttaggatcatcattccaagaaggaagaaataaagagagagagagagaaaaacaagagaacacgagattgttttcttatttttccaaattcctagtttgctctactatggttttatttaaattctaaacatgaagaacaccttttatttgtatgtttgaagcagactgctagttttaaaaaattaatcacagcttttctagaggcaggaggatggtcaagatgaaccacagcagtgccttgcagccttgcgacacccatttttaaagctttatttggaatgtggcacattataattgacagacttgacaagcattctggtttcatgggctgcatgtcaggattcctgccctatatttccatatcaccgagcacttccagtgtgtccttgaactaatttaaaatctccctgggtttcaggttccccatcttcgttgaaggccccacatcatttgccatgaacttgcagaatgttcgtaagcatacagtatgctctcctccagctttgagagatgtcttatctctttacccacaatgttgataactctttgcttatccttcagagagagcaactcatattgtatatctcatccccctaaaataacatgagaactgcatcaacgagttaaaaaaattgagaactgctgttttagagccacaaccccaatttgactacattattttttttgttttcaactttgttttttacatcatgtatgtgggtaaacagcgtacattttcttaagactttttaaagctggtacttaaggctttgaagtttgctctttcccctcaaattttgtgagttttaattaatttctcaagggggaaggaagttcagaatatctgatagcatcagattccagttcctcccattgatttgtggcaaacagaatacctttaaaataaatggtatattttgaaaacagaaatttatttcacatactgcagtaagacagaacaaacagctcatcttgctatatgcataaagaagcaaaatgtaattgataaagataatcagatgttgccaggttgttttaaatagctatgaaaaataaaatgtctgaattcagaagagattagattcttttttccacctagggctttggagagaaacaactggcatgtgtaattttgtccacattaatttttacagccatggtcaaatagccccaccagactgaaacttgtgaagaattttctttcttcatttggcttgatcatagaggaattagctccctcagtgagccaaggtgaaaagaagctagtttggggaaataagcaacattcataggaaagagaaagtttgaggcaaacatatggttgaaatgctctagtcgatttcagatcaagctgagagagttgagttgagatccgttggttcagggatccagttcactgcacattcctactgtgcctgactactaattgcatcctatgtttgtcaatcaaatatttgcaattaacaaaaatattcccctaagagacatagaacagagctggcaaaggatctggtgctttgctaagtagagctagctgcacacagaaaataaaataaaatatggtactaaaaatattctgctgccgatgacacggctagacactcccagtcaaaacattaacaagcaggataggtggcatggggggcttttcaaagggattttgttcaaagaacagaaactttgatctcggtgtctctgacccctcctccacctctgattcttcaatctacaagtacatatagtggtttaatttaactctgtgcataatttgcctaaggataaaagttgatctagatttttttaactccaattttacaaatgctctactttctccctcctccctcctccccacacacagatttcaagagagaaggctgaaaaggaaggtgactggaatattaagaactgtgagatattctgaggaaactctaatttgtaaattggtagaaatgccagtaatttgttgggaattgaagaccctctgtattcaagagcgaagcttggcagctgtgcactgttgttttataaatcaatattacatctgaaggtggtgtttgaatgtttgtgtcattggggtttgtctccaacatagtcctgtgacaagaaatgttcaaacaaaacaaacacaatcccttccctgtcctttaggataaagtccaaacgtaattccacaacagggatataacattcaaatcaactacagaacttctgtaattatataaaaccccacgaccacagaaatgcaattgaattgaagacactttgcaatattccccaagaaaggactgtgtggctgtcagattaacaaaagtcaagaggtggtgagacaatgctcaccattgcaaaaaagagctttgtgcataatgaacagaatttgcatgcctgtttaggaaattaaggtgaagccaaggtgacttagggtcacatgaggagtcacaacggtcactaactagaaaagtgagcattaaacattagtcatttggtttaaataagttcatctcaattattattagatattattacatagatttaataaaaaataatagcttaagtgaaattttcaacattatctggttattacctgccctgagcttctgtgattctgtgccatgattttggttgctatatcagaaaggagagttgaggctgagctgctttttgattgttgtcaattcctccatcattgagatacagcccacttgcacagttatgaccagggtaaaccatgaagaatgggcaatggggcatttagtacattaactcattttcataggcaaaaccggctacgtgatcaggaaggaaaaaaaaatgaagtgtcattgccattctggccttctttaacccaaagaactatctcatagagtttacaaacaaaataggtcatgccaaggattctaaaaacaccagtccaagccaaggatggagcgaaatgcctctactgctccggttcagtggttttaaaattgttttaaatcatattgtccatcagtaaaatattttcgagcacacatctccaatatttctgcaattgtactactagattagatatattacaaagcattatcaaacagaaaatgttaaaggacaggataaaaagtaattagaaatcaatgctatcttcctgaattctatcttctgtaaactagaagattaacacactccattctcaacagaggagaggcagatgaaattggcaggaccccaggttttcctgagtggtctgggtctagctaaactggaacagagaagcaagtgggaaacctcttttgccgtcactgaacaccagcactaagccgaggattaagtaggggaaatggttgtacttagacttgcaaaactgcatgtggaacactcttgtttcattttgattccatctgcactgaaccacagaaactcagagcctgctaataaccagatgaaaatcaaaaaattctctcaaacaattctttttgattatgcccaagtgccatctaataatggttgagattgatttattaaaaaaataaataaataactaatttgctcaacgtgcttggtatgggggagagggagaaagatgcagatgaatgtgagtgtgtgtgcgtgtgtgtgtgtgtgtgtgtgtgtgacagagagagagaaatcccaggggtatcttggtggaggggagagaaagaaaaaccaacttgactttggcagaaattcctggccttgccacgtgcaagttgtgctactcggaagctaaaacgagttgaccaggcagagctcacttagaccttgttgcagttacttctgttcaaaatggggacaacaaagtctattttgcagagtcattgtgagcagtaggaattgtttttataaagtgactcacacagcactttatagcagttgctcaataaatggtggccgctcttgttacataactggacaagacaataaatcctagactttgccaagaatacccattcagtattcaagtgcaccaacagtatatggcaatcacgagaatatgtttttactttagaattcaaattcattttatttccatgatcacatttaatcttcacaatgaatttgaaagatagaacaagtgtaattatccccattttacagacacagaaaggttgataaattattgacattcagtggtagagcttacaatcaatcactcagaactcctgctttctataccagcaatgggaaggaagcagacatatttggcatatgttactttctattaagtaactcaacctcataaactgtgtatgcatatatgggtttaaaaattttttcatctaaagtcaactcggtttagcccagtcttttcctctctctctctctctccagtctcttcatcacccaacacattccttgctaataaaacaaatatcacaatatgatgaattgaagaaatgaaaaaagcatctgttacatgtgctctccattaaaactttgctttgctttggctgttattttgagacataataaatagcaaatgcctatatcttctgctaagtatatgtttttgtttttgtttctcttccaccaacttgaaagttgaatgatgtcaatatagtttacaaaacagacagtggggggaggggagagattgagagatagagagagagaaaagaaaacaaacaaacaaaaaaacccagaggcgtttcatatccaccaccctcagctctcccacataacaaataatgtgacaaacaatgcactgcacttaagaaatattgactgatttcctggctgttttgaagcaggatagaaagcctgttgttcattatctccatttgggtgtctatactagtttgaatggtgttccccaaaaattcatgtccaatggaacctcagaatgttaccttatttagaaataggggttttatagatataattagtttaaataaggtcatactggattagggtggccctaaatttattatgagctggtgtccttacaagaagagaagaggacaaacagaaccagagacacacacaagggaagagggtcatctggggatggaggcagaaattcgagtgacgtagctatcagacaagggatgccagggattctcagcaaccacagaagctaggaagaggcaagggagtttctaccctagagtctttggatggagtgcagccctgctgaccccttgcttttggacttctagcctctaggactgtgacaggataaaatttctgttttgactactcagcttacagcaatttgttatggcagccctaggtaataatgcagtgtccaaatgtattactgttatagaaatgaacttgtgtgttcatgttttatgccatgtcttagtggctatttaattccttaaggtaactgtccccatgcaatttgataagaacactgacagacaccaagagtccaggtcatttctatcttcatttaaataatatgaaccaattctggaataactttcactcattgattacctctaccaaacaaacaagaacaaaactaaaattaactcattaattccatttttgtttcacagtaagaaattataagacaccagtttccaaagtaactataagctttggattttagatttgtgtgctattttcctttgtacaacatttcaaatataactttatggcccagcactgttagccaaatgttaaccttcacccacaaatcccaaagacctgttaggatcaaaaactgatttgggttcctgctagaacttctctacctgcacatcataattttgacctcagtcctgaccaagtcaccttcccagattacacgcccctcataacttcttaaacagatgcctttgtaatacttataaccttttccacacttttgagtacgtatgtctggggtgaaggagagaatctgaagctgtattctcacagcttcaggatacatagagatacagatctattttttttttaagtaaggcattttccgaagaacagatgctgaaagtcttctgcctccaacacccttcttgcagcattttagcacacaatgaagcctctttctaacatggtgatgaagtcttttgaggggttctggggctgggaattttgcttactttgctcttatgctgttttccagcaggccatttctatgtattttaattccatggtccttataatttgtcgagggtcctctcccagcacatcatgggaacaatattactaaagattaggcagagtggagagaattaacatggctgtcatcttttggatgtttactatttgctaagcactgcagtatacgctccatatacttatctctttatttctcacctctgagttaagcattatcatcctctttataaataaaacaactgaagctcagagaggtgaagtgatttgaccactaatagctcatagctaatcaaatgcactttatttcagtcatctagacagcctgaaaagattgctgtacatcatgaaagctgggggatctctagaaaacccttggataagcgctgcctgaggccgggaaccagacctggatagaggtagacaggtcgggggaggcctccaatgcctgtagttaggaaagagagtcctgtatgctaaggcttaattgaaaatccactaacaaagagatgccagtgttcactgacaaccatactggccagagaaaacacccttagtgtatttggcagcatatggtatatgtaacacatgtgagtcagatgcttttaaatccaggatggcttcaaaggcaaaaatatcaggatttgtaaagagctttagatctactcagaatcccatgtgaaggtcagctgaggcctctacagcaagaagagtcctagactgagcccttggggtgatccattagttagccctagttgcacagagccgcataacaaccacagaccttggtggtatataatgatattactttagctcattatctgtaaggcctggactgggcatggctgatcttactgtattcactcatggatttgcagaaatctataaatcagctgggtagttctgctgatgttgcctggatttcctcatatgcctgggggaagattggctattgactgatctaggatctacatcagcatagatgtctggggcagcatggctcagttccatgtctctcatcctccagcagagtggcccagacatgttctcctgctgatggcagacagcaagaatgagtaagttccatcattcaacctttctcaagcctctgtttgctccatatttgtggttatcctattggccatgcatgtcacatggctgggctcagagtggcaagctactgcacagtcacatggaaaagtcatggacacaagagggtaaataactggggaattaaccactggagattttgactctacaaaggcaatggagcaccttgaggaattcaactgcagtttactcattttataatctcagcccctgtgatataagctcaataaatgctttatccatgaatgaatgaatacataaatgaatgaatagcagtcctactctgaagtaggctgggctatcttgctactttttggagaaaaagtgtacttagtttagtctaacagcatagaggaaaaaaaacatgttctattactaaacagatttatttttttttctctctctcagaaaagttcctactctaaataaaacaacagaattcctgggcactattcatgttagagtgatatggaagcaccccaaacaaaacactacgagaatattttggggaagaaaacagatcaaattgtgctgaatccagcttctagcctcagcctgatgctgtgctggattagctatgcccccgtcaggcaattatatgggactcgtaacacgtcttcagttctgtgctcattttcataataaacctctggtttcacttcctctagaactgttttctctaagatttaccatttgagaataacaaacactaaatagaacaagtatttctgctgagttaaagctcaaccattcacgttacattttcatggttctatctcggtgtctgtagcttcccacctagaatctatatttcttgcctacagtagttatagcatctgtctggctgcactcatcctatattttttagcagcatggaagaaaggtgggatagaagcagtctgtaaatttggctggaaatgtgtctttcagtatgtcgcctctttcgaaacaaaaagagtattttgagcctgccacaaaacatggttgtgctggtttgaagagacaccacagaggtgtgttcaacttggagacacacgtgatggagctaatgaaagaaatacagagttttgacctttaaaaagaagtattattatattagcatctttccaagaattaggtagcttaggtcatattaatcatagagttgcaataccagggaatagatggaaacctttcttccccaccaagttgcgcttaaagttttgatccttgggagccagcagtaatgtgtgataaatagcaatcagctccttcactctgggcctcgtagcctgcccaggggctctatgccgccccaccgagctactttggaggcagatgatgcctttttaaataggacattaatgttaaaaatagttcggaacagatcaagggcaaaaccattccttcacaggaatttaaacctcatgtacaactcatgccacttcctcatatgtgtcagatggtcctgacctcttaaaacacatattcagtccacatgagtggagattaacacatgtggcaatagtgaatggtgacaatgcctcaaaatcagacaagtgtctggcagtgagtgcccggtgtatgagagaatattcatggaaagacaatatgtcctttctttatatcaatgcagtagagctttaattcagaggccattttgtcatcctaaacaaatctctgttgctagaatctcactgtttctttcctccagggaaagcggaaggaaaaaaaggtctgtacatttttcctcaacctccctcccatttgtccttgcaatcttctcagtattctgttctttcttgaccatggttcagaaacggaatgggctctggcttagatcctgccctctggcatctccaccctcagagtctatgaaatggctccaatgccccaagtcagatgccagtggcccctcttgagtgcttaccttctcctaacaggaagtgtgtcttaccccactgtgtttgttgatggaataaatatgaagagaaaagttacacatgaaaatctttgtacattttacaaattctatgacattaattctaagatattaacttgatggctattaccagacatctcatctccactgctccagggaatctgggagggaaagacaagtaacatgaaagatcagatagagaggctgacaaaggttaggttctccagaggtagatcctaactgaagtttgggtgcaaggtgtttatcaggagtgaatgcctgtgaacagaagggagaagatgcaggaatggacagagacagaagcctaactgctatgcaggctcaataagtcctagaccaacctacttgggccttgatgccctggcctccctcagtcactggatgtgagctgccaccagagaagcaggatgtccaacaaggtgggcttgccacctgaacaggacctgaaggtgctcatagctggaggcagtctgctcactgcactccccaatgctggacagcaagttcttccttgaaggataatctgggcagctcatctccatgtataccacaggcctcagtgactatgcctaaatatccaaagcttgtagagtgagtgccatataactgagaagtaaagacagctgtgctgatgaacagaaatgggtttgactggttccccagatagaaagcagcaccatcaatcatgaggtcttgggaggcaaaacagccttaaatgtgaggcaagacaggtctgggaggcaagacagccctaaagccaaggatgcgggtgaggatgagggttcatacaatgcagtcccaatctaactagtcactttttccaaaaatcaaaacaaaacaacaacaacaaaaattataagcatcttgaagttgggattaaactcatccatcactgaaagttggaagccatgttcttctcaaccaggaattaaaagttataatgaacatagaacatgttaggttcaggaatctacctgttccctttgagagctgtgaaaggagcctctcatatgtttgatgtatattttatgagcaattgaacattttatatcagaatctatgaatatgtggctgtgtatgggtgttgtacatacatatctcagcagatattatgccagttggattctgattcagagggaaattacaaaagtattattttaaatttttttctcaaaagtaaaattattgggcataattaaaaagtctttattaaatatctggcctttagagtttcttattgctttcttctgggacactcaatattcctggaataattacatatctttaaatacaaataggaaacatgctcattttgagatctcaagaacttgacattgaaaaacctttgactattccaaacgttggcattaatatttactatacctgttgttaaactaaattttactatcaatgctataaacagtaattcaattttagggcgatgacaggatgatctgctgagctttggccatacaaaatgagggttaaatagccttcctagatagtatcagcatgtatgtagtattaatgatgcatcagctatgtgccagggatattaatcatcacagaaattccatgaagttggtgtttgtaatgaaagtttgcagtaaccattatcttagctgaggatatatagcactttcaacagttaaaggaaaatgtaggttgtaggcctttgttaggagatgaattgtgtccccccaaaatcatattttgaagtcccagtcccagtgcctcagaatggaaccatgtttggagataaggtctttaaggagtgattaagttaaaatgagcccttacagggtgaagtccttctcccatatgactgatattcttgttagaagaggaagagacattaagggtactcatgcacatagaaaggccatgtaaagatgagagaaagtggatatctgcaagccaatgaaagaggcctcagaagaaaccaaacctaccaacgcctttatttcgaacttttaaggctccagaaatgttagaaaaagaatacattctgttgtttaagccaccaaatttgtggtatttttttatggcagccctagaaaactaacagtctccttcctcttgggtggtatgatacagatggtgtgttacagtaaaagtggaccgccaaccaaataaatatcttccagtaagtaggcccaagaacaatcattcaatgtatgctataagctcaagaattatggcatcttttaagttgttactgaaagggtcaagaatgtagatgagacatgtagatgtcttatatattggcaggattcaattagatttctaattggagacaatgagaggctgttgtttggaatcctcagcttgaggtcctgttacagtgggttacttagggctgactagattcttacaccctgttcatgataaggttaatgtgctgtagagcatttctagccaatctacacatcctaaacactacttatattagttatgattaaaatgttttaatattaaatatccattgtactaattagtggtatgcagccatctctgtatatgagtttctaatttgaatcttccaaatgtaaactcagcacttgattttggcatttagatattaatcaccagtccctagggcatcaggtgaaatcaacaaatccatacatgtgtgtcgtacagtttatgaggaagtactttattttattaatttaatgttttcagggttttttatttgacttaatttcaagacttacagaaaagttgcaagaataatgcaaaaaaatctccagacacccatacctttcagacaaatttattctttcctctctttctcaatctgtatcctcaccccaaaatattttctagtgcattttcataaaacataactttgtataactgggaaattaacatttacgaatggtgattcctaatttcattattccttcaacagtttttaattggctttcta

SEQ ID NO: 2707 - DNA, 379 bp, Homo sapiens
ctcagtatttagaagcaaaaattatccttaagaaaaacaaccgcaaacgcaacacaggctacacagatgagaaaatggggcttgcagagctcaaaccattacaccattcagaagctggctttggtattacttcaagttattcaaaacagtcaccacttgctgagcctctgatgtctcatctgttgaatggatttcaagagagaaggctgaaaaggaaggtgactggaatattaagaactgtgagatattctgaggaaactctaatttgtaaattggtagaaatgccagtaatttgttgggaattgaagaccctctgtattcaagagcgaagcttggcagctgtgcactgttgttttataaatcaatattacatctgaag

SEQ ID NO: 2708 - protein, 100 aa, Homo sapiens
MGLAELKPLHHSEAGFGITSSYSKQSPLAEPLMSHLLNGFQERRLKRKVTGILRTVRYSEETLICKLVEMPVICWELKTLCIQERSLAAVHCCFINQYYI

SEQ ID NO: 2709 - DNA, 72518 bp, Mus musculus
  misc_feature (1)...(72518): n = A, C, G or T/U
tgtgaaggagccttactaaggtcttctctgctagacaactgttgggtgctggagactgtgctaggctctttatgtgtctaccactactatgggtattgtttcctgtgttacacaggctgagtaccattcccaggtctgtcacacatgattgtgtgactgtgggcaaactatttaccctctcggagtccaaagccagtggcatatcgtaaaggaagtaattgtgtggtgcacttagtgggtgttgtcatcagttccattgccctgggcaaccctgtcaacacggggaagccccaactgtcttcaacccctctcacattgcccagtcacctgggcagttgtcaagatctcagcaagtcgaatgcctgccctggagttgttcctagaaagccagcctgcaggttggtgttttgagcctgggctttgacgccagcaccgctgcttgccattggaaagttcctatgctgtgcgggccagatgtgtgcagagatctgtgagctggcagctcaggcccagctggagccgcagggtcaggccagcggtgttgagtgctttgcctggccagtccagtagcagctccagcccttggccatgaatgtcccctggaaacgaagggacatgcacccaagtatgagtagtcccaggtgtgtccatccgtgcacaaagacctgtggcctggcttcctggcttcctagtactccaacttctcctgctagcatgactttcaccacagggtccaagtgtgcacaagggaagggacaggtcaaaccttgagttgttattaccaggcctgggcactgactgtggccaaacagaggataggtacttctaactctccagcagacctgaatctccaatcctagtactcaagagtagaggaaggagggaggatcaggagttgaaagccagcctgggctaaagagatccccatctcaaaacaacacaaaacagaacaggtaatgatattaatcaatgttccttttgagatagggtctatccgtatatccttgggcagcctaaaactggctacatagaccatactgggctcgaactcatagggatccacttgactctgcctcctgagtgctgggatcaaagtgcaccacctcacctgataggtctaatgttctgtgaccacggttctcaacctgtgagttgtgacccctttgggggttgaatgatcctttcccagggatcaccaaagactctcagaaaacacgttgtgattcataacagcagcaaagttatagttatgaaagtagcaacacaataattctatggttgggcgtcaccaaaacatgaggaacggtgttaaaggatcgcagagtcaggaaggttggtctgtgagttctaataatggctgccagtcagggcactggatagttgagttctcccaaagaatgcccaagtcctctcagacagtgctgggatgaagctgcagggcagtctctatgtctcagggatgttgtgcttccattactgcccagagcagccattagagtgaggcgctccaccaggctcagcccagggctgcattcttcttattgattgcccttggcagttgagctattcatttgaccatttcaggagccttgtgactgtccaggcacagagtctgagaaaggccactgtgatctttgaccatggagccatttggccttttcctctttcctctattgaatgtctccactgttcccaggccctggcagggtggtaagacagacctgctgctggagggtcctgtgagagtgagttgacagacattcacatggcttggggctctctgatgctgtgctgagatggtggccctgacacctagggaacccagagaattgaggctgacacaggctatctgttgaggctccactgggaggggacttagtgactaagcatgagagggcggagaagttatccccaggagagacagtcacatgtgctcctggggaggagggatggatggctgaggcccctaccatcatgtgacattctctggtcttcacagccacgtccccagtcgccacatagcaggtctgtgtgtatctgccttgtgaccagatgaagctaagtagcatgttgggcaaaaggctgaactttccctttagagtcctctccacctccttcatgcaggtgtaaccacagccctcagccatcagcccctgtcttacagtctgctgagtggacaaagagcagccgggagggacctagcctcaaactggagcatcctaactggtgcagggcactgtgggctcttgtgtctgggccccatgccagccattcacttaactgaaaaaaaaatggaaaagagagagagaatgagagaatggccgcctgccatctccagcatctctatgcaggatgttaccaagagtctggtgattcctgctactgacttcaggacaggaaggctctggcctgcagaactgggagccaggacttcagagccaggtgggctggggtggaactaatctgccctcctcactggttgacctcaagtatgtgtggtttcctccctaccctgtctcaccccaaggtgaccccactttcctgccaggtgaactgtgagggctggtcctggtggtgacaataaacaggcccagatgcagggcagctcttcctgcatgcacctcagcttgtctatcttcacttcttagcacccagcctcccctctgagcactcagagttttctcctagcactcagtactttctggtagtactcagtactccctcctagcacccagcactccctcttagcacccagaactgccctctagcacccagcactccctcctagcacccagaactgccctctagcacccagcactccctcctagcacccagcactaccctatagtacccagtgttccctcctagaatcatgaaacgtggcagcatttctatccaggagtaaactgaacgtgtttttatttaagagaaacccacatttttcggcacttcctgtggcagtcccactgtggggtgctgggaaatcaaacaaactgcaccgtgttgcaatttcagaaagagactggaggtgctgacctacataggccagatgttgggcagacagctggagagagctggcagatcggaaccaaagggaacccagggtctccaggaatcatgtttcctattagctcaggcccaaatggggccagctgcagctacctcaccccgctagtcctccatctgcactccgctggtgctgcacccaggcttctcccaaccccactctcttcctccttgccatctctctccctctcttttccccctctatccccacccctcccgtttcctctctctcccaccctttctttccacctgtcacccccaactctgttgttcacgttgggcctcttgacaaggatagcacatggccagatgtaggagcccaaactggctcctccctggatctctcaacttggaaacacagccagggtgggagctttaaggggaattcgcctccattttagagatgtttttgagacaggatttctgtgtatagccctgactatcttgaaacttgtagaccaggctggcatcaaactcagagatccacctatctctgtcttccagattaaagtgctggcattaaaggtgtgggctacatctaagcctggctagaaatgatttttgatggctgaggtcggtaaactccttaaatacatcactcctaacaggaaatgggcttatttgggtcactttaagctactttttcacatattatggagtacagcgtggtgtttgtgtacatgtttgttttacaattgaattggtcagtgtgatgtccattgccttaaatggttatcctttccattttcactcatagtccttcctcttgctgtgttttgttttgttttgtttgttattgttgttgttgttgttgtttgggtttggggttttttgtttgtttgttttttgtttttcaaaacagggtttctctgtgtagccctggctgtccagtcctgaaactcactgtcctgtcctgaaactcactctgtaaaccaggctggtctcgaactcagaaatctgcctgcttctgcctcccaagtgctggaattaaaggcgtgcaccaccactgcctggctcactgttttaaaatacatgacaacttattattaagcacagccatcctaccacacagtagaaacccagacttcctcctcccgtcttactgttctactgaccctgcgcttccttccctctgcctgggatggctgatggctccctggactaaccatggtccatgagcagaagccatagcctctcaatgatgctctttgtgccctctgcactgccccttccctggggtcaagcacagcattctagagggaagactccagccccagcccctcccaaggggagccctggcttcccgttccaactctcctctccatagactacgtggccttggacagatcctttcaactttccctaaccataaaataaagggtagcctaaagcagggatttcctgtattaagtcttggaagcccctacagtctgccaagagctcgggccttggctgcaggttccaggatggttacccatggcatcatggacccacagtgcttaacagtttagtctgcgggctgctggctacacccttcctacatatagaagagctaaaagcagcatgtactatggaaaccacagtagacagtccagaggcccacccaacttggcgtctgcaggatcttggggcttcttgaaggccagtttcacagctggactaagagttctctagatttacacttctctgagcaagccattgtgtggaaagcccaaaggttatcacagagagcttgtaagaaaattccatgtcatggaagtagaaagagcccacagctgaagtgtaaacctgaagacattgatctctgccttagtgtgaggtctgggtctgctgacagagtctggattgcagcatgcatttcactgttcagcttgccctcgtggcagacgttgctagtgaataccagcaccatctctttggtgtgtctttctcaagcctcctgtagggaaactgcctcggttccactcgggcctcttctttagatctttttttcagtcaccccaagtcactgcagaccacccactggcacagaaaaggcagggatgtgcttctaactttagaaatgccatccactgtgatatggaccacagaattccagctgcagagagaatggcagggaactctgggaactcagggccaacctcattctcagctctccggacaccatcagagtttttctgtgtctacagattgccttgctgtatattcttaacccagcctggctcctcaagtgcactcacttagacaattgggctgcttttaaagggaaactgtagccgtctaccataaatggaaaaacagttacacttgctagaaataggactaagaaactcctgaccagtgtggcctgctctgagattgttggttcttcctgataggagaccagaaagtgctagaaaataatctgaggaaggtcaataagcttccacctctggccccctgcatccccccagtgtggtgactgtcctgagaccagcatggtggcctcacccagtcattgctgtcagcctggagtttgagccaggcccagaacctcctagaaaattcagcaacagatctgctattggaagctgcccctgagcctccaaagaacaactccacatgtttgccgttcagttgatgaaactctaagagcacatcactgtgtgggccaagcagcagctgccagccatctcaggctgctctggggaacggcccatccatgtgctgcagctaggtgcaggactgtaagctgatgggcaagcatgtctgttcatgaccccagcctctggggccccacaggagatggcttgactatctctgtcctaatgcttacttttgctagggccctgctctgatttcccaaggggctacaagctggatgctggctttagtctttattcttggaagaacaaaccatttggtgtgggacattggaaatgggcctaggttcctacatgttctgtggggagtcctgcaaggacttggggctcacagcccaggtgtagacttggcaagggtggtaagggcaaagaattgaacaacattcagagaacatttcctacaaatccgatccctgggctgagattttattcagcatgtgtttcatttctggaactttccattggctcaggaggtaagaatgaccagcatccttggcctgttttgcagagaacacaaaggttccaggacagatgtcacacctgacctcatacactaagttctggatgcagagtgcacagctgaatctaccgaggtcaatgctagaacctgccatcctgtacttggcatccctgtagcactggcctcacttgaacacagtggccttggggaacaatcgagaagatgctagcctaggactcaaagcagagagtgcttgtcagccttcccaggaagtgatgtctacccccccccccccgccccctacacacaccccacccccaggcaacacgggaatctctgtcttgtagccatttaacttgtgactttaaagcacactttggttttgagttgtctctttgcccaggcccgggttgtttggtcaaatactcttgtgatgtcacattgctatgaagaagccacggcttaggtggacacagtgcattttctgcttacggtgttcaacttaggggattatcaagatataacccattgtaaattggggagcatttgtacagcataaagcatctgagaatatgagaaggcattataagcagaattcttagaaatcccccatattcctagctcagagtaaccactggcgtgtgtgtttacatgatcatacacacatttatgtgtaggtctgattcttttttatatttatgattctgtacacttgatgacatttatctgtggccctgatcatcactggagactgttggagatatttacagacatgggcttgccccagtgtcaaatttacagcatccaggaatacatgacattcttggctaaggttgagcaaagtgtcatttagctcttatttttgcttttgtgtctggaacatgtgtcctttccacacctcttttacattttgtgctttttgttggtgattttacgattttaaatggacccaggtctggggctgaggtacagcctgggaccctgggttagaaggcttactgggcctcatatgtgcacgtgggttagaaagctttgtttaggcttgagtgatggagcgccctgccactgagttcagggtaaatgaactgattatccatataaatatggtgtctttaaacataagcatagacaatgaagttatatagtgatcttatgctaaaatacttgaaaacgtgaaggaccatccctaactgttcttccaaagagtaaactttatgtattgactaagttattgttgtgtgtgtgtacatgcatgtgtgatgcatacatgtatatacatttttaggtactgtgtatagccatccgttggtattcatgagggcttggttacagccccttcacccccacaggtatcaaaatctgcagatgcttatgtaaaattgcacaggcagtgctgtgtttgaccaggtgtgggaaacacttccctatagcaagacagtaagaaaggaggaagggtaattctccaagagaaactggtactgaagccaaagtgggggaagggtatcagataggagcatggggtgaccacagcatggggggagctgagcactcctaatgtacaccaggagccagataaggtctatagctgtgggctgtcacgcatgatcctcaagaagactgctgtctccattgcagagtaagggtgccacagccagagaagccagcacctcctgaatgtcccgtagccacagagctggtgtgtgccatcttccaaccctgagccctcaggaccgagcgtaggacagagtgtgtgacagagtctggcctgtgcctacaagcactgcatcagacttgctcaggggttcatgcccacaaagcaggttggcctgctgcggcccaacaccttcagagtgggagcaggcagccaggagtgagttgtacctgaagaggcttttcatgcgtgggaagctgctctgtgttgattttaagaaaacaaaatatttggcggtctttctttctttttttttaaggtatatttattattatacactgtacactgtagctgtcttcagatgcaccagaagagggcatcaaatctcattacgggtagttgagccatcatgtggttgctgggaattgaactcaagacctttggaagaggagttagtactcttaccctctgagccatctcgccagcccggtctttcttaatatcttttatttttctattaaacttcagtggccatgtctttagcatctagccaaactttgcttgggcatctccagggacaggtacctttgatagcgtggttgctctttctaggcctcagtttacccaactagaaggtcaactcattagcgtagccaagttctacagtttctttcagcttaaacttcttcaatttccaaccccaacaccattatgtgtgtatatgtgtgtgtgcatatgcacatgtatttatcatgtgtctatcatatatgtcaatcacatattacacacacttggattttatcactacacatggtatgcatacatcagatgatcataccatgccccataaatgtgcataactaaaaatgataattaagctattttattataattatacagatttattataattatacatagctctctgtggaccacatggtaattactggcccagaaaacaggtgtctgtagacttagcttcaagctgaaatagacatggtcagattgtatttttagtctcctgacatgaagaatgaagtcccatgactgactcttactgactccagttggtccagctgggggcacgtctgtcaccccctccgggtcaccatggatagtgtctcctctgtttctaaggggctgagcaagatggagaagaggctccctggagaaaagttgaggtgctgtggtaatcaatgccaaccaaagccagcagggtagactattgtctccactgaggcacatgcctgcttgccagcaggtacctcagtttcctccacacttgttatcagcatattgtggatgctgtgatgtgtggtcaaggtgaaagacatgactttgatttttttgttagatgctcatatagcctgggaatcagaggtcacaggttctgttagcccagttcacagatgaagaaactgagactcaagggtacatctgaattagcctgagtcatcactggcagaaacatcaggatggtgcaacactcagaatgtagaagtggttgaggattcagccaccctgacttgtatggataagtgggaaggttttaagaattgctctggcagaagagccacatgggaagcagacagtgctgagggtagcagttgcccaagctgccctgtcccatcctgacacagttctgcaggcaagagctgttattccccttcctttgaggagggaggacactatggcttagagacagcaagggactgactggtccagctggtcctgggccaaactgagattgaaacacaccggttttctggctcaaactcctcagtctcagagatgaaagattcccttagtctgctttgtgttgttgcaattgactggcacaggtgagtaattggtaaagaatagaggtttatttcttagaagcttggaagtctgagatcaaggggctagcatctggcagtggcccttaggatgcttaactcagcacaagaaggaaagtgaatgagggcgcaggagggtggctgaactaaacttgcttttctaacaagcccactgggcatcaggacccacccctgcctttaacccacttgacacccctcaaaggtttacctccctgctctgtcccacagggatgaaattctcggaacctggactggagagagagtgttccaaccatgttgtccccttgtggttaatgcttgtctccttggttcctccctgcaggtctacatcatccgagtcacgtggtccagtggcgccacggaggccatctaccggcgctacagcaagttctttgacctccaggtaggcatctgtggtgggagaggttaattggacgtccacacactgtgactttagagcctcatcttttcatgatctagactctaaattgacatccgtgacttaaggcataagtaaggtcctgactgccttgtgctttgacccatttaactaaataagagaagatgtatttgttggctgccctgaaggggaccagcctggaggccacatgtgcctctggaaccatgttcaactgcattttgtacagtgagcctgtggtgagccaagatgctgaagtctgtctgggcaccttgcacgcacgtttcctcagccccacctgctggtttttactgcccctcacctgggcttggaccctgtgctctcccacctggctcgttggctggataattctctaccaccgtggttcccagcttctggaagccttatgtgactttgttctctgctcagaacaggagccattggttctgcccaccaggagccatcacctagtgctgtgagcttctctatactgatgttgtcagcttttctttcccttccagactgtgatggtcatgggtagggaccatgtcctccttgtcctttctttccttaatgtttttattcaaggcctgggacatagcgtgtgttcatttagtgacttgtgcatgtttgcatgcatgagtatatggatggatggatggatagatggatggatggatggatggatacattaatgaatggatggatggatggatggatggatggatggatggatggatggatagatggatggatacattaatgaatgaacggatggatggatggatggatggatagattgatggatggatagatggatggatacattaatgaagatggatggatggatggatggatggatagattgatggatggatggatgcattaatgaatggatggatggatggatggatggatggatggatacattaatgaatggatggatggatgaatggatggatggatggatggatggatggatggatggatgagtgaaagaatgcatgaaccaatgaacaaccatgcactgccagtctcactgttagctgggtaactcagtaggagcttacagcacagtaggaaccatctccattagctaaccctgggctggcaattttacatcagtgtctccaaaagcaggcaactccaaggaggctggagaagtcagtgtccttcaggagatgacatggcaaagttctctagacaacatctgccacagacacaaagggatgttcctggctttctgaactccctactgtgtggtgaggtccaatgtgagcctccatccatgatggatgaatggtatctgccctactagtaacaggaccaactcagatttccttcattgagtatcccaggaggagaaggctcccaggctttaggcacaactcagtgcaaggttttcattctgccatctgacctgacatctccttctatgtccccataagtggtactgattacatcctcagtcacacttgattgcaaatggctctagcaactctgggctcccactctgtaggaaagagtaacaatgacttctgtcttagggttttattgctgtgaagagccaccatgaccatagcaacttttataaaggaaaacatttcattggggctggcttacagtttcagagattagtccattatggttatggcaagaaacatggcagtgtgcagacaggcatggtgctggaggagctgaaaattctacatcttgaattctacacaggagactgtgccacactgggggtagcttgacctgaaaacacactcacacagtgacactcttcctccaacaagtccacaccctctaatagtgctactccctatgggccaagcattcaaatacatgagtctatgggggccagacctattcataccaccacaacttctaatgtatcctggcaaccactttgcatgtcataggcttagctctatgccaatcactatgacagccaatgaaagggctttcctgagttgctgttccagtatggcatcaagggcatagcctgggttgggaaggagaatctcaggttctcccagggtctgggtaatattaacgtcaggcttccttgactacgtgaacccaagcttttcctgccagtgtggactggagaatatccagagcccatgccccacctctgtaaaggaggagggcagacagcaataggctcctaactgatttctcttgtgcagtttaaacagtctctcacaccttaatgacacacagccaggagtcgctgcttcatgtaaagcgattgagataccagtcacttaattatttaaaacctaatgagctcatctgtgatgctttgtgttcaacaacagcatgcagccgcatctagcagtgtcacgtacacctataattttctgctgctctgccgcaaacgagccgtgtataaataaacagcggggctatccgtaaaacgtgctatggggtgggatgctgcaaagtgggaaagtgcgtgcctcgcacatgcaaggccaggaggttgagcacagccccacaataaataagctgaccactctgcataatgagcagatgggggagaagaaagcacggagggaaaggaggcacagggcagcggtgataatgcagatgacctagagcttttgcccattgctaggctgctgctgttctaggcagtggtgtctaccttgagagctctaccttggcatgtgttcaggggcttcttgccagcctggcacctccaacaaggaacagtggggctaaggataaagaacaacatgaatgtcatcccaggggttattcacgtctacagagcagagcccactcgactagctggcacatgaagagaggagtggggtggatgtgcagacagagcagactgttgcctagaacccagagcaaacactgctctggccttgaaaggacccagtatccactggcagctcctgcccatccgtcttgtggcctcagaaccctctgaccaacctgctttaatttattttcccactgacgcgtttagagcagcctcttcgacagcccattggccaacaccctaagcatcctcaagtcagcaactttagtctctgtcagctctttccctgctgtcagcaacctgaaaactctgggggtgcggggggagaatctggtggtctccaggatcctgggtcagttgccacagcagcctgtcagctgtggtgggaagcaggtgatactggcccagagagtgccagctggaggatgagatgcaagagagagggtgaatgtgtctaatggctggcatgttgaagcatgtagcccaagaataaaggcaaacccaagttcaaggctcagccttctcttttcaggcctcacctggtgtttcctctctgagcctccatttcttctgtgcctctcaacctcgggacttgttatggctgtgaaatgagatggatctggctcagtgtgttaagggtgagctgtccctctctgctgatgttacaaccatggtgacctttatgaggtccggtcacaagtcttttcagcccaaatcctgtgcttattatgccatgttcttactgaccttgcttctaccacaacttaagtcaggttttcttcccagctcagtgtagtactgaggcttcactaggacagaatggtctgcccccggtggccacccctgacatggtgaagctgttcagaagcctggcttcatccagttctaagaagtcccagatggcgtggcgacagagtgggaaagccatatgattccaggcatctggctcaagctagaagcagccttctctcccccatatcaaccccagatgggtaggagaggttggctactcaactcagctgtccccgaggactaggcaagaagaccagcccatgtgggaccatgactccacattagatcatttcatgatttccatgacccaattggcacatggccttgaatttttttttaagtgacttgactctgagtgtgaggggagagctcaggcttggaggaggagcagctgagctagtgtaatgtaacataaaaggcagagagctcatgggcccagccacaatcagctgtatgttcttgggcacactcctttagtcttctttgtctgagcattctcgttggtgatatgggataatatcagtaaaaaacagccagcatttctgaggctctgctcatgggttcagtccattcatttaatcatcaaaagcattttatctgataacacaggtgaaacagcctaggctcagagaagttcactcatttgcccaagtcacacagctagtcagattgacagcacttagattggaggctgtgggataccagagccggtggttttaaccactctgctctctgatgctgcttttgctgccagcttcaagttaaaatggtgcttgtgttcagagggagcaatcccatagggcttagggaagtggacaatggacagatgctggttgtaggtgttgggtttctttggggagtaatgaaaagattctagagctgggttagtggtcatggctgctgactgtgtaaatacacagaaaactgcagagtggggtacattttaaagagtgaattttgtggtatgtgaggtatagctctcttctctctctctctctctctctctctctctctctctctctctctcaagtgtaaactgtaagaacagccctggtctgctgaataggaatgggtgctggctggtagagtgactgacaggcccaattgcttggaatcaagaaggacagacacagtatcagtttctcagggttccagactttgggatctgacaggttggattcaatttatttctccactttctggctcagggtctagtttctgtcataatgcagatagaactccagctaggttggattttcccagattgtgttcatcagctgaatggagctgagaagacaaaggattttggctctggatgcagctggacctagggctgccaagtcaaagacttgtctcttcatgtctgggccccatggtgaggtacatggcagcagctactgctccagcctgcgtctagctcaccagagccattactttggaggaaaaagaaaagaatttcctctgtgactgtcttagagttttactgctgtgaacagacaccatgaccaaggtaactcttataaaggaccacatttaatcagggctggcttacaggtacagaggttcagtccattatcatcaaggtgggaacatagtagcatccaagcaggcatggtgttggaagactaagagttccacatcttcttctgatggcaaacaggaaaagacaggcccttctgcactgggcagagcttcaaaggccacccctacagggacacacttactccagcaaggccacagtagcactccctatgggccaagcgtattcaaaccaccacattgacttaatctcgtcttagaccataggatgaggtgttcaaggcatacagagacaaaagcaggatcaacaaccagctggacaccaactgctggatgttctagagggcatcaaggaagccagaaccgtgggtacctcttcttcttaggcaggaaatttaagcaaaggaaacaaagtaaaaagaggattatctaggggcagcactccacaggctgcttcatggggaaggacactgtcaccagccagcaaaaatatccccatattcctgacatcttagaaaagtctgagtcctttggttatctctgccactatgatgtaaaatctggttatgtgtcttgtacgcatgacactggagcagacagaaaagaaaagacctctgagcttgaagtaggaataggaacacttggtgtgaggtcccaacccttggacaggtcactcagcctccctgagcttcactttctaccttagcctgaactagtgctgtagagtcaatcaggatgtcatagaaggagtggacatccaagccaaggcctgggaatgagtgactggggtgcccacaatgctcacagcaacacccagcagagcaatctattacaactactctttgctagaactttgaggtgtctttctttctttcttaaatgccacctcactgaatcctcctttaccagtatgaggtcggtatcacagacacttcacaagtggaaacattcaagtttagagaggcagttatgtgccccaaacagcagggatccaactactaccttcctaggagccaggtatgtctgaaaagatgaacttgccctcaacttccagttcatgggttcatggccacatttccaccctacagtttgagtaccacctgagtccttgacaaataagcctcagacatgagtccacctcacactgtgttctgcagccatcatactctgaatccccaggttcagtatgtccccctggaggagggtcacagctgtcactagagctacccagagacaccctatctcacaaaaaacaaaacaaaacaaaacaaaacaaaacaaaacaaaacagttctgatactggctataatatgattgacttgaacactgtgctctgagcagagtaaggccagagtaatcaactgaagcgaaggtatattcaccagggagggtggatgaagagccatttggtgctctgactgaggcaaagctctgaagatggtggaggagatggctgtctgcatagtggatgcccaattaggccatggaactgtgtacccagatattgttaaaagatttattgtatattgtatatgtgtaacacagttaaaaacatagcaacaacaacaacaacaacaaaacaaaaacaaaaatcaaacaaacaaacaaaaaaacagtctcccgtgctactaagttactcacaaatcagtttcaaagtaacgttattcacagtcccagacagactgtccctcgttcctagatggccatgcatgtggatggaaggatgcctctagtgaggctgtatgccccaaggggccttatttgaggttagacaagtggtgtataaaccagtgtggacatttgttagccaggggaaacattcattagccaatatggacacactgttagctatgtgaatacttattagccagtgtggacactgattaggctataaggacactccttagcccatgtggatactcagcagccagtatggatacttgctagccagtgtggacatccagagagggtctcagaaagcatcaagggaagggaagtagccttgtcactgtgcattctttacaacatgcttccccttggtagtgtttcaactttgtcttaatattgagaaggcaaaaggagataatgctaggcaaatctataaatttcagagcctctgcagctaagactgatgaattgctttggaaaatgtaacgtgctattcctgtgtgcacagaatattaagcctgccttgtctcaagctggtttcccttatccacttaaccctgaacccagctaaagagcgatattagaacatgaatcgacaaaggtgttgggactggtcatgcccctgctctgctgtgtggcttaaggcaagttgattgccctctctgctcccaagtttcctcatctgagacttggaacttgtaatgtttatttcacagagttactgtaaagttcagatgaaactgaatgaaaagactgttaactgtcaactgctgagcactgtaaccattattattgttgctgttactattttatattactagtgtgactgctattcattagagattttaactgtcctttgaagagattcccctttggggggttgcgttctctctgttgaacccattgattcttttcattaaacttctgtgttttcggtagttttaggttcaacataaaatgtcttggagagtccagagcactcttgggtaccacctgcagtaccctgactccccccactgctagcagtctttttgtcggtatttattgaaagcctgctatgtgctggtatagaagaactcttcagaaatgaatccgtcttctcaaggaggaccacagtggccttggcagtcagggaaggacactggaccaagtttcactgtccccatgcaggattgagtaggggccaatgatgaacagccacaaataacaccacaaataacagaacccagggtatcccagtggttataattaatagtagctctcttaactagcatgtacaaggctcttggttccatccctagtactgcacataataataaagaaaatccatgaataaagcctcttccccaggcttctggaagcttgcataccccaactgccctttcgagcccagccaccctgaagctgcgcccctccccagggtattgtgtaaactagcacagaagaagccagaaactgcagcctgatgtacatgccccccaccctctctggtcttcatggcatcacagatatgagatcttgcaatgacaaagctccactgagcttcaggctctggccttgccacactgtgggctgcaggcactgggctgattcctttgcctctgggatcttgagtgctagtgtctacagtaaaggcggggtgggggttggggggtgggtcctgccgagatgcagtgcctgacagcttggagctatgtagttagcttcaggatagctagaacttacttagtgaaactgtctcaaaaacaacaacaacaacagcagcagcagcaaaacaacctgccagatagaagggtagcctgattaactaggccaagagctggaccatgggcagggttgcaaaggctctgtgccctccctccaggactgcagatggcagagaagtcactgtcagggagtatgtccttcacaagagagagggaaatggacaacagcaaactcagatccagctgtcagccccaaccctgaagtgacaaatgttgctggtcattagatgtggcccacttcaaagggctgggagagtacaattcaaacctgggttgagaaacatagacatatctgcagacagctttggtattgctaggcttttgagcttagagcttgttatatatagcagcatatcctgacccatcctgattcacatgtagccaggaagccagaaaggagtcctgaacccagcctagtttgaactgtagtacaatttactacagggacctaaagcaaagacccttaaagttacatcagagcatacaagaattgagtggcagattcgtgtgatttttttttttttttttgagtactgaaccagagattccacattagtttctttctttttctaaaagtaatactttttacaagtctcactctgtacccctgctcagcctggaactcattatgtagaccagactggccttgagctagattctcctgcccctgggaataaaggtgtgtgtcactgtgctcagcttcacttcctttcttaagctgtcagagtcacagtctggttatggtctgcccccagctccatcctcaacactgtcctgttttgtggtatctcacacgctacttcccaatcaccagactgttttccaggctctttgcaagactgcatgtgctcatggtggctcatgcatacagcataggaccaggcaccaggctctgctgagcaggtttggggtttcagggtgggtcaggaatgatgccaaaagcctaggtttaaaggtgaagggcattctaacacacctgtcacttcccagaatacagagcaacatgttgtctgtgaaacacaagtccttaggctattgtttacattttcaagtcccatggcttaaactctaggagaatcaaaaatggtggcctggagggacggctccatggtaagagcacacacagcccttgcttgcagaagagccatcattggcgagttacaacagcctgtaaatccagttccatgtaccctgacatttctggtctcctagggcgacagtgtgtatgtcaaacagatgcatacacatggacacataatttaaaataaatcttttttaaaaaaccaagcaactaagaatggtctcttgcagcttttgagctttcacagtttagaaactgtggatataaacagttgctttccccacgtaagctctcagatccagactccatgcccatagcctcaggtttctgaaaagcttggtgtgaacttctaattcgtcaaatcacaaacttaagatgtcagagaatgtgtattttgttttgtaaaaggttctcacttctattccctcccatttagatgcagatgttggacaagttccccatggaaggaggacagaaagaccccaagcagaggatcattccatttctgccaggtgggtaaggagtacactctcgggcagggcaagcctggtcacttgaagaacagttcctggtccccagaagagcacacaagctcctccccacatcactgttgggggaggggcattgtttctctcctagtttacttctgttgctatgattaacaccactaccaaaaaactacttggggaaaaaggtgtttacttcatcttccatttctctgtcactaacgtagggaaaggtaaaaagaaagagctgacaatgagaccaagaaggaagctggctcactcaccatggcttgctcagcttgctctcttacatagtccagggcctcctgctcagaggtggcaccacccacagtgggctgagctcgtccacaacaattatcaattaatgacatgccccccacccccccacacacaaacacagaccagtctgatggaggcatagaaattttctgacacttcagatccttctaacctccttgtgagagaatgctgtctgcttagaagggtagtcagctctacacccgtgtcacaaaggaggaactgggtcccggaggaactacaaacacatgcataggtgccagatctgggatgcaaacagggttgctggcttcaagcttcatgcttggagtcacttccaactttgtcaccttgggcacacacacacccaactttggcaaatgactcagtagcatgtgaattctactcaattcttccaaattggagatgagaatggtcgtataaagatggtgccggtgaagactgacaggtcactgaggttgtcgctcacttgatgttgttgctcatatatgacaggcacattaacagtctccccaggtacccagggtttggagaactcaccattttcctcctttcttggatccctataaatgtatttttttattcatctgatataattgttatctctgaggcttactacctcagtctgctaacctaaaccttgtcctggaagcttctagcctctgtacaatctaatctatgcctaagatgttttcagcctctgagacttactactgaataagcttaccctttctagttctttctgtgctctggccgactggttcacccttgctgttctggctcaaacttctctccaagctgactgatttaatctggcttctctctcttggttggcctctgctgaattgttctgcttggcctcatactaactttggcagtatgtttctaatcttctggctccttctcattctctggcttactcagtcttcacctgtgtctagcttgttctctctctctctctctgcaacctgtctctgtacaactgtcccagtaaactaccccctccctccctctctgccctgctctcttaagtaacctcctcttcctctctcttcccctgagagttggacataacctattcagtcaaatctttctctgattaatctctttgtctgccactcaattagacatcactttgaaacatgagtgcttccttctacaaaataactttacctccattgtttgggattaaaggtgtgtcaccccaagggctgagccatactacaactagaaacaggttatttttgttgttgttgtccagtaaataatacaatcttgggtttcacagtgtgatcaaatatcctgcaacaggtctctattcacaccagtgctcattcaataggttctcaggcactatcagcctggctgggttgagcaagtgttttctaggccccctctgctgagagaatccttaggggaaaaaaaaaaacaaagacaaaaacaaaaacaaaacaaaacaaaagaaactaacgtttttaagtctctccactgggaaaacatcaactgcactggaatttttcccccagtgaagagaaccccatgtaccagatacaatagccaaaactcagggctacaaagcacacattttggagtcaaacttcttcagccccgtgattttaatcaccatccccagcctccccctcccctgcccctctatttccacatctgctaaataagacagcgactctgcttcccaaagttcagttcctggcacagaataggctcttagcaaaggcggtaagaaaggagagttggggggcccttcctttgggggttctcagttttgtattttggagtcattctggaatgagcagaatgtttaagttcagcctaaaatacaaccttttttcaagaaagagaaaggcagcagtaagatgtagcttttttctggatgaaagaaagtcagctctggaaaacttcccaaggcagaaaacttgagcccgaccctctccccggctcttaaaagcctttgtggttacgtaatacttttccagcaagaattcatgaaaatgctgctcacaagatctaacccctttgtctctgtgcccagttccagcttaggattcccaggggccccaagaccttctgaacctccccgccccccctcagctattcgccaggccaacactgtgggcaggaaatgggtctcctctcctgaggtcaattctctagccagactgccttgtcagcaagacaaaggcaagtttcatgttagcacaaaggcgggggagagggcccagcctgtgcggactttccatcccagcaagggctggggaggccaacttggcagaggagatgacctgaaaactaagaattacagtttggccttcttccactgtggaaaacaaaagccacccattcccaccaaagctgtctctctcctgaacaccctttccactccagtatggaggtagcccaccatcctttcttcctcaccctcccatccgccccagactcaccaaacccacaggtaccaacaacaagaaggaaccactgtgagcattggccaggctgcctggagactggcctgagcgtaacctggctcagacgtggttgactggccccagagagctcgcatgggagaaagaattagcatgtccttatctagactgtcacacgcatgctcatgctttggggacacacagtaattactcctttgtaatgaagacaacaaaacaaagccctattctccccgttcacaggctccagaggtgatcggctcctaggcactaggtgtaggagggattggctgtaactacctaatgtgcctcaaagtccctgcctcagtatccccaaagtccctacaaacccagggaggagtttccccccactgagctccttctgggtgaagctttggcattggtttctggctccctttgctttctattgctttgataaaactccaccaccaaacacgagtaggagaataaagggtttgtttggcttgtatgtccatgtcacagtctactactgagggaagtcaaggcagagccatgaggagtgctgctctttggctagcccctggatcattcagccacctgtgacactacccacagttgattggaccctcccaaatcaatccttaaccaagacaatactctactctataggtttgcctacaggcctgtcttatggagacactttcttttcttttctttttctctttctttttcttttttcttttttgtaaaaggtacaagaagctgtgtttggtgggtaagcatcagatttcttactgcacctagagcagcnnnnnnnnnnnnnnnnnnnnatggaaatgttttctctagacacttagcagccaatttaaaactttcttaaatatgaaatgtattcactcacccttaccaagcccaagctcaccaagcctaccttcatcaggaccacccttaccataccaacccttctcaccacccttaccacatccaatctcaccatgccaattcttaccacacccacccttaccatgcccacccttactaccaccattatcctcttgtgtaccaccactactgagaccaacatcacattcttatttaaagatcccacttttttaaaaagtataaaatataactattcatacaaaataactgaatttctcatcatcaatagaaatgacataatgacatagcaataatcctgagaattagagttataactttgataaacttaatgataaacttcctgatacatagcagaaacttaaatatcggctgggtggaaatctgttgattttttttaaaaaacaaaatttttattagatattttcttcatttacatttcaaatgctatcccaaaagtcccctataccctacctctaccctgctccccaacccacccactaccacttcctggccctggcgttcccgttcccctgtactggggcatataatctttgcaagaccaagggcctctcctcccaatgatggccaactaggccatcctctgctacatatgcagctagagacatgaactctgggggtactggttagttcatattgttgttcctcctatagggttacagctcattgggttctttctctagctccaccgttgggggccctgtgttccatccaatggagacattttcttatgtgaggtttccttttagataactctagcttgtatcaatgtgaccaaacaacaacaacaacaataacaatagtagtaaattaaccaaaacagactctggttgtgtggtggctttgagacaagtctgttccttgcagtgcaggttggcaatagcctcattctagttgtaaatcctttgagcccacttattacctttacagtgagaggcctgtacactgctctcctccctgatgtacagaagggaactgccaccaagtgggagcgcatcagttctggggttgggagtgagggagtcttctcccactttgagaaatggatgaacagctgaaagcatttgctacccagggctgctccgtaggctcatatttcttcttagtcatgaaggttcagagattttcaaacagccttatctacagaggcctgcaagaatgggaagtgaggccatttgactgtcacagtgactggggctggagaggccaccagcttgaaatggatttgaattggagatgctcagcaccttgcagggttggggacagtcctcccctgggaaggatgccccacctagattctcagcaggattgctccatgttaaggcaaataggagaacctgttgtctccgacccttccaggttcccattgaataaaataggttctcacactgtccccctcttctttgggaggatgtttttatgtttctgaaagcaataaatatgggaaagcttagagaaataaaaaatgacctgtcttctgtctgtcagaagacaacactcttcaaatcctttgatgcactatctgctagatctttcatttcagcaagcacgggtagatcagagaggcccagaatcattagacaaatagcacagaagtttagcagacccttaggagcaaggagacatgaacaaggggagggagggaggctgtgtttctcttctgagatgcccaggagcctgtgggtcttgggctgcccaggctgagcttggaggcgctcttcctgcagggctcttctgtgggatttcacatacatgcagagcctagaaaagggacctcatgggaggaacatgtagaagtgtggtcaccagagcctgatggaaagtgttgcaagaggatggggatggttagcaggcgagggaatgactgtcgaccctacagcacggtatggcactgtgtctggccgctgctaactggctatttcagaataactggaagagaggtgtcttagggttttactgctgtgaacagacaccatgaccaaggcaactcttataaggacaacatttaattggggctggcttataggttcagaggttcagtccattatcatcaaggtgtgaacatagcagcatccaggcaggcatggtgcaggaggagctgagagttctacatcttcatctgaaggctgctagcagaatactggcttcctggcagctaggatgaaggtcttaaagaccgcacccacagtgacacacctactccaacagggccacaccttctaacagtgccattccctgggccaggcatatacaaaccatcacaagaggcttatgcctgtttatgcatattcccagcaggaatgagaaatgctggaagtgagagtcatgccagtcatcccactcatcggcattaattgcacatattatagttacacagtgcaggccataagtatgtatagtgactgtgctagcttaacctactcctgggctggctggagtgtaattccattacagagcgtgtgcttagcatgaacaaggctctgagttcaatcctcataaaacttaaaaaaaaaacaaaaacaaaaaacaaaaactcttctccattaggctcattctcccctgctatctcgctagagcagtgggggctttgagaggtttagcctgggtgtggctacccacatacacaggtacagcctggaatattgagggcagccaggaactttggtactattcaggtccaccctcagacagcactgtgagtggtggttgagtgggccactgctgtattgagtgtgttctcatctcctgcaggcaaaatcctcttccgccgcagccacatccgggacgtagccgtcaaacgcctgataccaattgatgaatattgtaaggtaagctgagatgccaacaccatctctctcgtgggtgttctgttttattttcctttctgagtgccaaatgttcactcaagggtaggaaacaaaacagaacaaaacatacccttctcccccaccccccataagactgtggaatcaacctgaatccactttcagtggctgtgtggtgttgccctgggtgtaaatggtccagtcagcattcagtccctgttattgctagagcagctggcctctcaccccttgaatgttccaacagaggaaggcctgcctgttcgtgctgttggatgggaccggttgggaaggaagcatgctgtcacttctgttattgtctctattaattgagtgtagtaagactacaggatgcaggtgccacatgcagtcaccagttgtctctgtatccagaggtgaaattaagaacttccacttgttctggggagatgacctgatcagtaaagagcttgtacaaacatgaaggcctggctttggcccagcacctatgtaaaatcctgagcactaagtgcctgtgatcctagagtctaggagtggacacaggaaggtcttggcagcccactgcctggccagtccagattctgtaagagaccctgtctcaaagcgcagttgagaaaggcacccaataccaactgctggcttttatctgtgcccatactcatgtgcaccttgcatatatcacaaagatagagacacacatgcacagagagacagagatagaaagacagacacagagagaagagttctactcataccagctccaaaaaagagtaaaactcttaaaaatgtacttaactaaaagtgcggggtttatacactgacccacaaagcatggtcaagagaagttcagagagtgattgccttcattcagcactctggggcagacgcacaactctatgagtttgaggtgaactcaatctacacaatgagttctaggtagccagggttacatataaggtgaaaccctatctcaaaaactaactaactaactaaactctaaatgattaggagttgcaaaaacagcatttttctaaaacaggaaaaaaaattctttctctctggatttaatcctacagaaatccagtaggtttcttagaggtgctgataagatcaaccgtgtgtgtgtgtgtgtgtgtgtgtgtgtgtgtgtgtctgtgtctgtgtctgtgtctgtgtctgtgtctgtgtctgtgtctatgtgtataaattcaaaggaccttgaaagataagtcacactgaccatttcctggagcccacaaggctcctcactccctatggtgattcagactccgtggtactatcctgagatctctgcacaagtccgtggacaggagccaggagtaaaggctttcacaagccaggctaactgatactcagggaggtgccgaacagtcctgtgaggaaagttgggttttgggttttgatttttttttttaaataaacaggtaggacagctagctactgcctagttcatcagggccacaaattgtcacagaattggtgatttccacagcaggactttgttttctgtcacttctgaaagctaaaatgcaagccgcagggtctcaggccttgtctgtggctttctgctagctgtctgtgagtgtacaagacacgttgtctttatgtgtccgtaccctagtccaaaaggacgccatttatgttggtcaaggctcactcctggtgatcttgtttaatcttcaattacttctgtaaagacccttctcagctacatatgccctgaggggttagagctgaaccattctctcctttcatctcagacacagccccggtatctgtacacatgcaaaaatacaatggacttgagcccttatttcacactttgtacgaaaatcaactctaaaggggtcacaagagctgcagaaatggctcggtggggaacatgatttcttctggaccgagaaaacctgagtttgaatcctcagcacccatgcagaaggccagatgtgacagacaacatctgtaatccctgtgcaggggacctcagaggctcagtgaccatggagtttatctgacttgctgatctctagagtcactaaaacattgtctcagaaaataaggtaaatggtgacagtgtaggtgtctcacttccacaatgcacgcacatctgcgcacacacacacaactgggccctaaatgaaagagacaaaactggaaaactttcaaaagaaaatgtggaggaaactttcatgaccctagtttaagctatgaattttttactgtgataccaaaagtaacagtccttaaaaatatttggtcaagatctacttaaaaacctctctgctaaaaaaaaaaaaacccaataacaaacaaaaccactaggaaatggaaaagatcggtcacagagataggtcacagatggggcgaaatatttgtaaataacattttaaaggactttctaagaatacatgaagaactcgtaccaggtggtggaatacccctttagtcccagcactcaggaggcagaggcaggtgagttcggggccagcctggtctacagagtgagttccaggacagccagagctacatagtgagaccttgtcttgaaaaaaaaaaaaaaagacaaaaaacaaacaagaagaagaagaacatcaacaacaacctatataactccagattaaaagactttaagacaaggggaaaactccaatagcactcgcatccaagaggagaccaagtttataataaacatgtgagcaaggcatggtggtgcacactttaatttcaacactcaggggatagagtcaagaggagctctgtaatttcaaggccagcctggtctacaaatgagttcaaggccagccaggattacacaatgagagcttttttttttccccaaaaataaaataaatttctaaaataaacatgtgaagaaatgcttatcattgtgaaccctggggtcatgcagacagggactgaagattgatattaatcatgggacagttgtgctagatggtagtgaggatctggcaaataatggggcagtttctgggaggccaagacacaaagatcacaaaattccagtccagcctgggtacataacaagaacctgtttcaacacacccggtgaagatcatcacacagccagccctgggtataaaacttatgtccgcacagaggcttgtatgctaaccttcctagcatcgggaagtcgtaatagccaaatgtaaggggcagtctgtaacttgatgatatcaagtggttaaatttgggtaaattctacgacccagttgaatcacagagacactatgctaagtgaaagaaaccagatgcaggagatgactgacctgagaaatgtgcagacagggagtttacgagcacagagcacagatgagccgtctcctgggccccgggacgatgggcgggaagagggactgaaaattggatgtttggatgatggaaaacttctaaaactgaattgtggggatgaggatagaactctataatttactaaatactgaactgggtacttgcatgtaaattatactgtaatctgaaattttttatacaaaaaggggcagtgttgggacagatgacccctcttggtcaggaggcatctaggaagggctgaaaatcattcttggtggagtagtttgctcctggtcagacatgacctccttgcatccctccagggactgtgtaaggtggatttctgtactcccactgtgtggatgaggaaacgaagccccacatcagaactgtccagacctgggctatgcataacaaccacatcagagggcttgcaagttgagcccagactcaacaccctgtgtaccatctactgcccctatagaaataaaaatgcaagtgttgcagtgatcgggcctgcgctgtgtcacaatgctgtgtggattgagactgtctctcaagaggattttatgttggttgtttgaccttcggtgcagcagtgttcagtttgcagaactgtccagacctgggcttaatactggcctcaagtgaattagttttcttgagaacttgctgatatgaaaaccaagactatctgatgctcttggtctcgtctgtgtttcttcaccatgttgtgacacagtcatgagctctagccagccccacagttgtgagccaaacagacctttatctcatataggccccagcctcagtttgctttgttatagcaacagaaaacagattaacataggcagacaaactccttcctcttaccatctgcagaagggggcagggacagggacaagctctttgatataccttccgacttccagaggagagttctacatcttccatgtccctttttaaaaactaaaaagcctgaaattggcattccaaaggcagcacccatctgtccaggccctgctggcaagaccattaggtccttagggtcaccttgccccactggataattcctgcctgtatattcctctgcccacgtcatcctgccctgttttctcctcagcacatccaattctctccaggtccagctgcattcatgtccagggattcctcaacctctgaacatttattctgaaaaggagatttttagaacttggagctgtgagagacaccagctgcctgcagctgcctgcagctgcctgcaatgtaggatgtcagagactgtgaaccataaggaagaaactgcttaggttatacatgcataagtgattcctaatatttagacatctgttaagaacattgtgaatggacttaaggcaatgggatccatcatactgactttaattttagtagaaagtggtaatccccaacaggtagaaatagccaatggctattggtacccaaacctgactgccaggtgtgtagtaagaagcaagaaagggctctgccagacctagagtaaagttaccaatcggtaccacacagaaaagctactgacagccctgaagtagacccacccgggcatgttggacaggttgacactgacagaaggagccttgcagatcatctggatgactggattcctggtcttcatataaggaggaggtatgggaggtgggcaacctcagcctcatggcacagtgggatcatttccaggaacttaaaagccatcactatgagaggcagtgtatagagattttagaaaataaaaacttcctatctctaggaatagagagactattaaagacacaaaagatactgaccaaaaagaaaatgtgtttatttggccacattacatctaagaacttctgtttagaaagacacaatgagacacacgtgactcctgggctgccaccaagatgcctattgtcacacagccttgtaaacagctactcagcttgctgtggggctgctaggacaccagctgtctttttggcagcccttggcatgagcactgcccgagatgcaacatcttctgagggaagcccagctaaacccagccataaagctctccaggagaggcccagcccatggctccactgtgaaggatgtgagagagacatggtctcaccagcttctgttcacacaggggccagagcatcacactatctctagagcagacttctccagcagagaaaaaaagaatcattcctaatagctgccatgctggcgattacagactggggttgatccaagacagcgatgactgatatcttgaagtcctcttttgaaatgaactatgttttgagttttgatacaggaagcttttggttggttggttgacttggtttggtgttttgttttgtttttcttagacagggtcttactatgtggctctggctgtcctggaactcacaatgtagatgaggctggcctcgaactcacacatctgcctgcctctgcttcccaaattctagaattaaaagtgttcaccacttacaacccactgatactgtgaattaagctcagggtctcatggatgccaaacagatgctctgtcactgagctataccttcagctccaggacacctgagtatagcctgacccagctcatttcctgctgctgtaccagaacatccgagactgcgtatttaataaagaagagaggtttctttcagctcatggttctggaagagtatggtgcgcagcaaggacttcttatacattccaactcgtggtagggggaaaaaaacgagcaaaatgtggcacaaaggcttgatttatacagtgtactgtccctcccccctcccccagcaaatccttgctcactggagagagcattagtttatcttgagagatctgctgaggagccttttactatcacagactagatagatgtaagctgcctgcttgccacagacaaacagacacagttcagctgtctgcagatgtcttctcagatgccgcagggcacaattcagctggcatcccttcagcaattctctaatgtttagctgcaaaagctacaggacttcagaggaaagatccctgggcaggagaatgtagctctgctccctgacaaaggtgaatactggtgccagttacagagtagatgcttcgtgacaaatcaaaatgatcgacaaggggctggtgagatggctcagtggttaggagcactggctgctctactagaggacctggctttgattcccagtgtctacataatagctcacaactttctgtgattccagtcacagggtatccaatgccctcttctggctatcatgggcacgtcacacaaatggtgcacagacatacatgcaggcaaacactcatatacataaaataaaaatgaatatctcaaaaacattatcaacatgccatatgtcagcatctctcacgctgatgggtagcgagtggacagtgagtatggaggggcttccaggaccattgcccacctcacactgtatctttccactttacgcttgtgaaagtagctcatccaggctgaagtgacactaaccctgggactcattcatccccagcaccaatgcaccctaaaaatgtagatccagcggcccacctgtccacagatggatgaagggaatatacatgggtgaccccctgaatgggtaaacaagataccagccagacaaaggagaaacttaaagggacagaggagaatggtggaggaggggcgagacagatgttagcagggacagtttctcttctgcaaggtggaatgagctctggtttggaggtagagaataggagtgtgttcaagccttagctatgcatgtgaagaaagttaatggccaatttggtattagtatgtatttgaccacaattcagaggggaaaatgatgtagggggtcaaaatcccctcagatccgtaggtacagttccaccctggagtcccctgtgcatctccatgatgtgcatctgagcctcgatggatcacatgtgcatcaatgcaggagtgaattcaggcttagttttcagagatgttaggcagaaaatacatggcacatcttattactcaggctacaccaggccagaggtgcaagagaggcaccagggagcacagcctaggaggcgcagagtcttgttgtgctgtggaggcttctgtaggggctgcataaatccctcatatgcatggttgcacccccacctctgtgtctaagtgacatggacctgaaccggctctatcagtcacaggctgtccaatgccctcttctggaggagccttttgcatctccatcttccccatccagcgctaagagaggaggaagggttaagtatttgttgaaaaccacagagttccctcagtgcggtgccatctcttggatgagcaggatgcaccttgttcttttccagtccggcactaggcaaagaagatacctgttagctacttgtatgaatacttggtaggtcagcacacagaacaaacgcccgtattctcctttaccctcacctggcttcttgcagcttgcaggtaagcacagcagggctctttcgtgacccagctgagccactcttccagatgactaggaactggccaatagaaggctggcatgctaaccctggagacttccatccaccccatatccaaattgttgggctttacagcctcagcttgggaaattcagactctcgttggacacactccagatgttctccagtggtgtggtagagccggcagacagcagaatatggttgacaaagatgaaatgaatggaattcacgctgttagtgaaaacatcactttccaaacgagcatgtataatatgagctggattgtgtacatatgaatatataatgtttacacgatgccagcataatgtatcctctccatacatctgggagaatgtgtgtgtgtgtgtgtgtgtgtgtgtgtgtgtgtgtgtgttctccaagtcaaaggcatcagcatcaccaggaagcttgttaaaaatccctgatttcaggcctcaccataggcctgctaaagctccggtgagccccaacctatgtgttaggaatcaatcccgctgtgcagtcctggtgcctgcctgagtttgagaaccactggcgacagcgttctggataccctctccttcctcggactcaccccatctctgctttaggccctgatccagctgcccccctacatctctcagtgtgatgaggttctgcagtttttcgagacaagacctgaggacctgaatcctcccaaagagtaagtcagtctgtggatttccccaggtgacacgtcctccctcgtcccctcccgccaacctttctagacccactgggacccagagtcagcagactgcaaactaagtcagagttcattgcctcagccctgcaaggcctcactgcctgtggcttcatagccactataagtgggtaaaaatcccatttagcaggcaatggaacttgactaagtgtccctaatccgaagttgttttacatgaccaccatgcttatcaaagagggtgatagcagggtagactgagaatttttcctacggtctccattccccaaatgcatagaagccttggtccaaggatccagaacacttattagataaaggcggaactgaagaggggggtctttcttagaagaagcctgggttcctggagtgggcttagattcattctctccctgaggatgctgtggggtggagcctgtcatcgtcctaatggaatctcagcccaatacataacaaggactgaccagctcttttctcacccctgtctcctacacagggagcatattgggaagaagaaatcaggtaagcattgatcccatttccttcctttcattcctgccatgtgcccaggttccaagctagggacacagcagtagacagagggatagatggacagatggatggtgactggatatgtagttggatgggtgggtggatagacagacagagggatggatgaacaatggatgattagttgcacatggagatgatcagcagaatgagtggatgagctggcgattgattgatgaggcctatttcatcttttgccaaaaccactacgaagtgataagacgagagtacctttgtggtgtgggaagacaggcatcttcctaaccatgctgcagagggttctgggtctccatgccactttgtacaaaggaatgtggacactcagagccttctgcagtgctgtaagggtgagagtgggggcaggggtaagatagggaccctgagtcgtggggactgagggtgagctcagggagtacaagactgagaagacactgtgcactggggctcggggggtggactcggcagatctgggcctggtcctctgacagcctctaccagcctactgcctgggcaggttgatacctgtcactcaaaccctgctgggctccttccatacaggaagcttgcttctgcctgcctttctattcttgagatgattcgctcttctggcagaggtggtcgtggaaaagacaaggcatgttctaaagacgacggtcactagtccatctcttcttactacccatgctccttctggccccacagccaatgtgggtttcagagcttctggggccctggcctctaatctctttgaactctaggacgttttaggggctccatgcatggggagggtcacaggcagagattcctaaaatgaaaactaagtttcctcatgtatgacatccaggcctgggtgtggctcagtggtagagcactcaccttcaagcacaaggctttggcttccatttatgtgcatagtcacacatgtgcacatatacaaacacacacacacacacacacacacaccacacatacacacacatacacataacacacatacacacacttatacacacaccatacacatataccacatacatacacataccacacatacatatatatacacatacacaccacacacatatacacaggcacacacatacctcatactcaccatgcacgagatgctctttataggattgtcaaagggtctataataatagatgtaaaacccttcaatagtgctatctagttgatgctgttcaattatccctcctatgactcaagcctgtagatgtccccgttagcactccgtccacacttcaggcctgtgctctccctctcctcctgggagcaggcctaggtcagtttagtctgatcatggcagaaagtgaggatagaaaccatacctcatccctctttcctccaccccagcctgctttgctttgctctctgactacatctggctctcctttggggtttagtggtcactggccacactgtggcatcctgctaaagctgcaactggttctcagccaggataatgacacatttcttttcttagcaaagattagtgagcagctgccgctctgggctggtcatggagtttctggctttgcttatgcagagactcccctggaaggagctggggagaaggagaagggagagagaagagacagctctggttggtgaaaataagagtgtccagttggagcaggcttgatgagggatctgtctgggaaagtgaacagaggctctaatttgtggtgaccgtggttgatatcactcacctgccgtgatggggccaggtttatttatagccccactggctggaactcggcgccttcttttattcagagtcagaaccctccataggctccttgtttatctgactggtggacactgccttgattttagagccggttttcttgactgaatttaagagagatttaaattaaaaacagaccttacccctgcattttcaataccaaaccttggatgggagaaggcttgtctgtccccagcactgcccagtcacagccaactggctcctgcagacttgacttatgtggtcccaaatcctgctcatcccacagggggaaaaaaaatctcaccacaattaagaaggttgtctgaaggcttgcaagtaacatttcttcttgatttttgcttattttcacaatcttccaacaagcctggcaatttagtgagcttatggaaggaaaagtctcactttggctttagtcaacattttaaaaattcaagacatatcatcagaaagagaaaacacctaactcaaaagtttctctggtacaataggcaactatgtggcttaagaatgctttttagcattaatgacagaataactcttctactattcattcctgtgggctatgtaacatagcctagaggatttgggggaggagggggttgttcatttgtttgtttttgtggtttttcgaaagaggctttgtctgtgtagtcctggctctcctggaactcactctgtagaccagggtggcctcaaactcagagatatgcctgcttctgcctctcaagtgttgggattaaaggcatgagctactaatgcccaactaggaatcttttggttgcctctgtggcaatatctagaacctatttgccttgagagagatgttcctggtaccatgcataatggggcttagttgcaatatcacactccaccgctagcgtctctatgtcgcacctaatggtctgaagcctcattattatttgttttttagatttatttatttattctgtgtatgtgagtacactgttgctctcttcaaacaaaccagaggaggacattggatcccattacagatggttgtgagccaccatgtggtttctgggattcgaactcaggatccctggaagagcactcagtgctcttaactgctgagccatctctccagccccctaaagcctcatttaagcctcctgtctaatcacctgaaaccatacattttgtcaccagtgttgataagtggggtattctgagtaaaatgtgcacaacttgtcctggaagcaacacttggaagcagttccctgctcttacctctgaagcatgtctcagtaaagggactatagcctaaagccccaaacccgagccctgagccctgtgctctgctgagctctgctcatgtaaccaaaggccagcactctgccctctgcttcgtatctcatggtttccgattctgtcactcagtatttactgtgtgtttggcagtgctagtccccacggacctagacaagaagtcattaaatccaagttttaaaatattccatttgggtttttattgagctccattgggttccattcgtggtctagatcatgaattgacaaactttttctaaagggccaaataatatatagataattcacacattacaggtcatatgcagtctgtcaccaacaataatattatagtattcacctttcctcctcctcttcctctttctccttttcttcctccttacccacaaacactttaaaaacacttcagagtagatgggatcacctgacgcccttgtagaggacccagggtgagttcccaggacccacactgtggctcagaaccagttccagggatccgacgccctcttctgacctgcaagcatcaggcaggcatttgattcacacacatataggcaaatactcatacacattaattaattaattttttagaagcctgcaaaccagaggattcctgctagaacacagacacctaaaccacagcagggaaacatacacagggagacagggaaatgcatggagttgatttttttttttttaagtaacatggagaggccaaagggatggctcagtagttaagagcacttgtgctcttgctgaaggaccaagctcagtttccagcactcacaccaggctgcccacagctgcatgtaactttagcgctgggtggtcctctgacttccatgggagtcagccggtgtgtgcacatacccacacatttacacacaactcaaattgatctttaaaatatagttttaattaaaaagcaaaccagaaaggaacaaaagttgcagaggcaatgccaggctgtcagaggggtcaacgcaggtgcccttgaggaaaggatccagggatgccaacggctggtgaagactgtctctcgaaaagagaacagcatgtgcttcaagctctgagaaatagggagcgctaaggctgctggctcaacatggctaggtaaggcatacaaacgtgaggtagatttggctgctggtgacagaaacttctaaaggattatagctgaaacgattcaatagtgtttattagttcaaacacaaaagatagctgagcttggcgtagcatttgatggtaaaggatcaggggcctaccttacagctttgccatacgggccagtgttctcaaggttaccttctggtccaagatggctgctggagcaccagccatcacattcccattgaggccaggagaaatgaacaggtgaagcagggcaagcctctttccataagaacatcaagcagttgtacatacctctgtttagacccacaaactgattctaaatctcatactattcccaagtggaaaggtgttttcccaaatgttcaatgtagccagcctcagatcagcagtcttgttagtgtagaataataagaacaggagataagtttcccttctgccctctggagtggggtgtggggatgtgttctcactggttaccaggcagatcaagcagagctttgcaggcactgggcatttcttatgtgaggtgagagccacaatagcagagcattgcctgtggaggatgatcgaaccaagtgattgtctacctgaagactcgtgaacaatatggtggattgaggctggcatcaaagaccaatcaggaaatcaagacaaggtggctcccattagcatgagggttttctggccctcaagcaggctctactccgtgtggactctggtttgtgctgttgaacataaaagaatccttatttgcagtggctaagaactccagagagccagcaccttagacttgttgaccccttgcattatcgggtcctacagtagcagaacttgcctggttaacctggtgggaagttctctccagtagggtcagaccaccagcctatgtagctgtctggctttggtggactgttgaactgtgagaaggtagttaaagacagagagctagaaagagtgataatagactctgagaaatataaagaaaggacacatcgtgactagattctgtggtggacctagaaactgctaaggaaagaaagccggatgacctcagacattaccttcttccctatctatctatggtccgccatccatttccaagcccgggtggggagcccgtggacacgtcacttactatcttcagtgtgtttatatctgtaacaggcagtgcccacctcaagcacaatgataccagaaaggtttgcaatggtttgcagcccatgggggtgaaggacattcttttccaggctctctcccgtctagccttctttgccacctacatcctgcatctctcctctcccctcatcctgcccagtggagactcgggtgcaggtggttagggtataccctgatcatatgccttcttagaagggtcaatgaccagaacctgctcacagagccaagaagcaggcacacacacacacacacacacacacacacacacacacacacacacgtacacgctgcctccttctctttgacgtctctgaacggagatgttccttttaagtcttctgtggagtgtctttgtgagcatgcccatctgtcttagtgggcagcagggcttcacagctccagggtgtgacgcacacactgctcaccagggaagcaggctgcctggaaactcttcccacactttcccctcctgggaccactgcccagctccaatgccacgatttcctcttgcctaacgacttcacaccctcagtctgggtgctctcccccttaccagcctctgcctctctgcacatgacagccagagacacttgtccagctgtacatcctgccattccctgccttaattcaagatttaaaaatccaaacttaccaagtcctcggcctcagaccaatgctttccttggggacttctctcactaccttgcctactacctggcagaactctgcctcccaacctcattctactcctgaaggctcccaggccttctctatcatagaggagcccaatcctccttgactcccaggacaccttccctcatgggtctctgctttctgcttaggaagtcttgctgaccactcatttagtacagtgttgcctttcctgttcattctctgccatcctgggtatccatgctaatataatttgatctcttgttcgtatgtatgtatacacatatctctcattgtttatctcccccatttccttgagttatttgaagctggaaggaatccatttcatctatttttgtgtcaacaaaagtatgtagagcatcacggttgacctatgagttcgtaggtgggcttaggatgaagttggatggatgagacaggctgggtggtgacctcaagctaatttaaaccatccccttgagctccccaaaggcagccagcttctgggcatacgcctcatcttacttacttggaacctcttggtaccccaccccccccagtgctcttggtaaacattagtgcctgagtaagaaaatgaatgagaggatacaaggataaagagttggggcatgagacaaatcctgtaacaaagactgttggggctaatgggatgtttggtggcatttgctgtcctcagggaatgacccgacctcagtggaccctatggtcctggagcagtatgtggtagtggcagactatcagaagcaggagagctcagagatcagcctcagtgtgggccaagtagtggacatcattgagaagaatgagtcaggtaaggacctggaccacctttcccgtaccctgaactatatcacccccagagccactgagggctcatggccactgtctcaggagcctgctggactgggtgttgccgttgtttgaggcctgctcccataaacagtgctggttttcaaatacttatggacagagtcgagcgctcctttgagaattttctgtgttaattttccttgggaatccccaagaaagctgcagatctgagagaggagtcccatagagactgactatcaaaaacaaattagaagaaactcttcagagaagatgggcatctgcctgtctctcaacccacctgtcatcctagggccactggccacatccacccacggtgagatgattaagacagggaacctggatgccaccaggactctacacagcacattagttttgtcttctacaggacacagaagactgtcagggaactctcaaaagagtaaatgagaggaagggcacctaaacctgaatgtggcacacaacatgtgctccagaaaatacaggtttccatccctgctgctgagcaaccatcacaccatgcagggaaagcacggggtgagcagcccctctctccaagggttcccagtagctcatcattttgttaggggccttcatgctttcaggaccattgtcaaggatacagtagaggataccggtgaagggatggatgcacaggcaggttgtgggagattcactgtgcttccaaggtctgtgatagcccagtggccagttaagtccacatagctgtgggaggacagtgcttccagtatccttcaagttacattactattattcatgtgaatcatgagatcagcattagtcaagcagacgctaactgtgcaatctagggatagtccctgcttccaagaataccggaagacagtgtttccggcatcctccaggtcaggtcaccattagtcaggaggctggtggtagccaacaaacctccataattatgcaatctaaaagccattagctttgatgacctggaaggaaggaaggattactctgatgtcatctcagtatcctgtgctctgactctttcaaggtgacttctgtgacagtaaaagatgtgatggttttttcccacagcaggcagcactcccttatggagtggaaattgtctgtcagggcaattctgttctgacactgcacacctagcggtgtgttgggccccctaggctgtctctcaggccatccctcaatgcctcagccaggtgcaaaccagctgttctgcctgcccttcctacagctagttgtcaagcatggtctgcaggcccctctcttgaactattaagttgctcacatgatcaaggaaaacaggctttcagggtcctcgccaaggatgcagtaaaggatacaggtgaagggatggatacacaggcaggttgtaggagaggcactgtgcttccacagtctctgtggatgctgccttgcaggaatttctgtgctcagcaagctctccagacccctggagttctcagcaatttcattgcagaggcacaattgacagctgtgttgacctgtgactaaataaaaggggtcagatcaaatgctaataggcagtgaggaagccagccaggcctgcttagccaggctcttttttttttttttttttttttttttttttttttggcctctgagtttatttcagagtatggggtaggaactcttccaaaatggaattttataatctattatcaaagtgggtcagataatttaatttctttatagccagggggtccgaggtggaaaagattagaacctatttttagcttccatgacttcccttgggagagggaaatcctcgcttccatgcctgccttgagtagaaaaggcaaatgcaaggggcaggcaggaggaggacacagagccactgcatcccagtctcctgaggcctaaagtgccccagttgtattccagacacttaagtcacgagagctatgggactagtgacccacgatgacaactggaaaatatatgtccctgtgctgtcaccgaacgaacaagactccaagtgactcactatttgcccccaggtctctacagagctagatttctgttgttcttaagtctgtattgttttccagttctcaggagcagtgtatgcaagctatatggcaaagagatagcatgggcatgaaggaagaagtgcccattccctgggccaccaaggtggggtgctaggaaggatgtattgggcagataatgctccggtcccttatataaacagctagggtgtttgcttctgacctgtccacagcctccacacactttacatcctcttgaggtgacattaagctttgggtaatgtaggtaccatgtgaatagttattttactgtttgtttagatcagcatgggttgtgacccctttggggtcacatatcatatatcctgcttatcaggtatttacattacaatacacaacagtagcaaagttacagttatcatgtagcaatgaaataatcttatgggggggtgggtttcaccataacacaggaactatattaaaaggtcacagcattaggaaggttgagaaccactggctttagagagtaatattcagagagtaagggtttgtgcattcagtacccatagaggagtttttagggtctttttaaattattattattattatttcatggttggaaaacacaagtgtagaaaccacagatactgagggaatagaacatgagcatctctaggtagcaaccattaggcacacaccagcccatcctcagagagcatatggtatggctgcaaaccctgccaagcatgcgccatacctgcagccaggctccttgccatgcagagtacctttggaggcctctgcctgtaggatcaaatgtggaccacaacaatttgatgcaaacggtcacctcttatgaccctctttgtggctccgtttcttcattgtgcaatgaggaccataatgtgacagtgatatggaataatacaagtacagtgtccattatatacacagtgtccattgcacactctactaatggaaaatgtgctatagtctccttgcttggagcaagcgtcctcactttctgtcccaggcttgggagaaagtttctcttcttgctagcttttttaattattttttttcaacttgtagctattcttgacagtttcattttacacagtgaaccaggaatttttttttagcctaacctgaacaccaacagttgagtggcagaatacacagccagcttccacacctgtggattctgcatccttgcattcaaccaaccatggatagaaaaaagacaaggaaaaaaaatgtggttgcgctgaacacgtccagagcttttccctgtcaggatccctacacagtcatagctaactgttcacagctttggcatcctattggcagaagtcacctgcattaagtgtaaagtctacctaggtgtgtcctataccctttctatgagggagtcctgtgtgcggatctgcctccctcaggacacctctgggacagtcctcacatgccaaaggacagctggattattgcattctcgcttcgcctcactgacagcaccctgaactcttcttgcttgcaggttggtggttcgtcagcactgctgaagagcagggctgggtccctgcaacctgcctggaaggccaggatggcgtgcaagatgagttctccctccagcctgaggaaggtagggggaacttcctcctcaccccttcttggcagcctctgctcaaggactgatagcccactagttcaggatttagagcctgtgagcaggatggaattagaactataaggcaagcctgtacttcccccatgggcttgtgggagctacccttggtgagccttgccaaagctgggcccccacccctttatgagccctccccgcccctcccccccccccagcctgattgctgacagcccactgctctctaacatttctgtggtgctatactaactgtctatactcacttgcaaaactttcaaccccatgtgtttcaacaccatgtgactttttctgctggtttaagtgtccccttgtgtctcccacacacttccttttcctggggacatacatgtttgtggtagatgttctttggagtgatgcctgacactccagcagtgcccaaggccgaagacttcctctcccctgtgggagcttcctaaagcagaggccctcagtgcctcttatagcagagtgtctaggagtcacacaaacctgagtgtgaatcttacctctgctgcatgcagtgcaatcttgggccggagtcacctcttaaagccccctccttctctgctgaccatgggagcatttgaggtctgtgttcccatcctgcctgggggtgagtgttgctggattccagtggatggctttgaggagcacagaggcaaatcaagtatgttgggaaagaaggcaaaggaggggtctagaaaccctaaatgtatacatccaaagattacagtggctttgcatttagttggattgcagtgacactctgcagtgtgtgtgtgctctgcttcagggtccctccaggagctgggggcaaagctagcccaggttaccacagagcgagcacagattaaagggaggggctacaaggcagacagcccgtgtccccttccagtctgtgatggctcgcctgagaaggagctagcgtttcacagatgtggagccacactcagggaggctgagattttcccacacaggcaagagcacattttcccgcaggtttagcatttttcttttccgctcccgtgaccgtgtctcagtataacattctcagaatagaatgactgctgagtacctcttcggtcacactgaagctcattccccaggcatttgtcctctctaggatggctggggctgggggtatactcaggtagatccctcccaggagaacactgctaggtgctgtcaggcttacaagccctggagtatgctcccattaacgctgccttctgccctccttctacatgcttcctgaccagtgtcctggagatactgctctctgccccggtctgtgggtcgccgccggactctgggggacttgtatgccatcagctggcgtcaaggtgcctaccctgggagatttctctgcatttactgtttggagccaagtccctgcatctgcatgagctccctgctctgggactgcccatgcctgctgcatgtaaaaaaaaannnnnnnnnnnnnnnnnnnnnnnnnnnnnnnnnnnnnnnnnnnnnnnnnnnnnnnnnnnnnnnnnnnnnnnnnnnnnnnnnnnnnnnnnnnnnnnnnnnnnnnnnnnnnnnnnnnnnnnnnnnnnnnnnnnnnnnnnnnnnnnnnnnnnnnnnnnnnnnnnnnnnnnnnnnnnnnnnnnnnnnnnnnnnnnnnnnnnnnnnnnnnnnnnnnnnnnnnnnnnnnnnnnnnnnnnnnnnnnnnnnnnnnnnnnnnnnnnnnnnnnnnnnnnnnnnnnnnnnnnnnnnnnnnnnnnnnnnnnnnnnnnnnnnnnnnnnnnnnnnnnnnnnnnnnnnnnnnnnnnnnnnnnnnnnnnnnnnnnnnnnnnnnnnnnnnnnnnnnnnnnnnnnnnnnnnnnnnnnnnnnnnnnnnnnnnnnnnnnnnnnnnnnnnnnnnnnnnnnnnnnnnnnnnnnnnnnnnnnnnnnnnnnnnnnnnnnnnnnnnnnnnnnnnnnnnnnnnnnnnnnnnnnnnnnnnnnnnnnnnnnnnnnnnnnnnnnnnnnnnnnnnnnnnnnnnnnnnnnnnnnnnnnnnnnnnnnnnnnnnnnnnnnnnnnnnnnnnnnnnnnnnnnnnnnnnnnnnnnnnnnnnnnnnnnnnnnnnnnnnnnnnnnnnnnnnnnnnnnnnnnnnnnnnnnnnnnnnnnnnnnnnnnnnnnnnnnnnnnnnnnnnnnnnnnnnnnnnnnnnnnnnnnnnnnnnnnnnnnnnnnnnnnnnnnnnnnnnnnnnnnnnnnnnnnnnnnnnnnnnnnnnnnnnnnnnnnnnnnnnnnnnnnnnnnnnnnnnnnnnnnnnnnnnnnnnnnnnnnnnnnnnnnnnnnnnnnnnnnnnnnnnnnnnnnnnnnnnnnnnnnnnnnnnnnnnnnnnnnnnnnnnnnnnnnnnnnnnnnnncacccccaagagtcctcccactgtgtgtcatcccgaaaccagtcatagcagccaggctttgaaatactgtgactagaccagggtcacgtgccataggggtggctgagcccccagcagaacaggctgtgtttgcgcagccctgagctcagactggtgtctctctgcagctctagcatcccagagcttgagaaccctcccagctggagcccaaggagacccagggctcatgggtttggatgtattcagaacccttcccacctggaccacacaaaactactgtgctaggctggcagaatccttccttccttccttccttccttccttccttcatcctatcccagcctggtgcctgctgattcagcacaagaggaaatagctgaccatgctgaatatagaatgtatgccagaagtcagcacagccccctcagagctggtcagcaggccatttcaataaataaataaacgcctgtgggcttcaacctcctctgcagcagctggctagcaacggatgcctcaagggttttcccaagaactgtgagcgctaagtaatagctggctcagccactcacctatggactgaaatgtcacctaagaacagccctctcatctcctttctggactcctctgggtcatgtttccatgtttctctgtgacactggagatggcagttgctcccttcctctcctgagcactgtgtccaggggctgcaaatgagcaggatctctgggctgctgtagtaacacagtgggagaaagctctgagggaggactgtgggctgtaaggatggagctgtggcttgtgaggagagtggtatgggaagcaacccagccacgaaggctgtaagcatggttggatcagggctgcaacccgaccaataaaaagccactgtctaggtgatgagaagtactctctgtcccttcctgggtggcaattttagcttcatctctgaactcatagtctcaactagcaagaaccaggaggtacccagggggcttaactcactgtgtgagcaaggtgcactccttagggtgggatttcagaatatgcctctttcctaaacagaggctcattcataaaacaattgccagcttttccaggcacattccagtgctggagacaaagatatgactgagatagaccaatccctgtcttcatggatggagatcatactccttcagaggaaagacttgatagtaaaggtcatgttagttagaaggtaattcctggaatgggggtggggggttaacctgagcaagggagatgaagatgctgtgtgtcagaacgttgcatgaagtcatgggccatgaccttgaggcacagattgtctggatacgagggtgattctttgatgctgaggggggtcagagggactggggcctctaagagctccatgggagcctgaggagcccagaaatctcagagagaatttccctctgtgtgattccagttcacacccagcatcctgctcctcctgtctattcctcaccccatcaccctttgtccctgcagaggagaaatatacggtcatctacccgtacacagctcgtgaccaggatgaaatgaacctagagcgaggggctgtggtggaggtcgtccagaagaacctggagggctggtggaagatcaggtaactccctgtggttgggtggagcgtctaggtctctcgtgagctccagcttcacagagtctgtgagcagctacagacaggtgtcatttttacctcagccatgaatacgccttggtacagtttggcctccctccctaccgatatctttcctgtaaagtccaaacagacaagacctttgagttccccaagcctcagagaggagagggctattgtatgttttacagcatagcctgggcatacagcgggccattctgtcaagtctgtgtaagcatactgtggtgttggcagaagccacccaataaagcctttctcagaactcaccccatcagtaaatgacatgtgactgtcacagtaccataatacagacgaacaccctggaacctcacagcgctggagttcaggggtggcgggggggggggtctcaacctggttcagactttgaggcagttgtcagacgagtgtaagggtcccctgagtctgggaagtatgggaacccatgccctctttaccccagagctcctcaccccagaggacgctcatcctccattttgtgctgcctgtgctgtggctttgtgtcccaatgatggccagaggaggtggattgtgctgcattcaactagctttttccacttaaagcaagacttattctctcttagagggcttttgagtttgacaaatgcttgatcgtaaagatttctatctccttgtaaatttgcctccagttacaagtgacctgttttttactaaaacccaggccattttgtttttaaagtagttctttctcttttcttttccttccttccttctcccctccttcctttttgaaagggggttgctatacttagagtgcctatcctggaactcactctatagaccaggatagcctgaacctcagaggtctgcctgcctctgcctcctgagtgctggaatcaaaggtgtgcataacttctttaagtaatgcttaatgagacttggttctgccgtgtatcatgactagttagctggatttattcctctttccccaaaggtatgggaacctgtttggagaggtactagtactagtagcttttggtgggattgactgatctccatagtgtcttgtggccactttcaagtcatcaatgagatgccactaaaatgcggagctcagaagatgcagtgggctctcgtgagccaatgtgcacttgctccagcacgtctctggtccaaacaggcctctctagttattgttttgaaacccgagctttgtcatgtgagaattaagtgattgttgccttcactgataccctttttagggatagtgggctggtgtgtcagagtcgctgtcattcttcagtgcagaggaacatcattcacgtctcagtgtctttgtgtcagcccagagccctttcctgtcagtgtgaggctttgcaccaggagcaggagctgccaggaaagggccaagaacaagttaagagatctgagtccatttctgccacagactcacttgtaaacccaagtttacaagtttacaccaatgggtcccaggcttcttatctttaaaacagatcccaattccagatgaaaatcccttacctgaaatgcatgagaccagaagtctttaggatttgggacgttttcatcgttggggaatgttgcctatgtgtaatgcgatgtcttggatttgaggagggccattgataaaaccaaggttcactgtgttgcatatatggtgtatacacacagtcggaagatgagtttatgcgcgtctaatgcagctgcattttgactgtgatccttcacatgaagtcaagtgtggaattttccatttgtggtgtcacgttgatgcccaagaagcttcgctgggagatgggggccatcttgccaatgttggctgggttcaaacacataagagctgtaaagtgcttaggacgggactaacagaataggtgcccacagtgctggctgtcactgtaatgaccatcaccatcacggtggtacctcaagaagacagctctgatgcagagttttattgccgttcacccgtgatacgattatgcccattggcaacttgtccccttggcctttcatttcttcatcgaattcaccaatacccagttgctcgaacctaagggcttgtgttctaactaggagacaggaaatcctcagccggatacactttgcagatgcgggtgcagggatcacagagtgtgcagaagccagagggccgtcatggagattgggcctcatttgagactcaatgacattaagtaaaacctggaaagaggagcaggtgccaccaggagggagagagaggtgcttgttagagacctaccaagagcagtgctgtggggaggtgactagcaatggtgcatttggagacttcaagtagaagagggtgtatgggatatggtggttgttgggagaggcaaatggagatcaggtggggagggcctggaaggccaagctgaaggcttaggcatcatcagagggcaatgagttgcatggagcctttgacccacaacagttcgaatccactgtccaccatcctggaccagatgtatagaagcatggcttcatcccacccctccaacccccaaaagccccacagaccaacctgactagactccttccccttcctcccaggtaccagggcaaagagggctgggcccctgcttcctacctaaagaagaacagtggggagcccttgcccccaaagcttggccccagctcacctgctcactcgggtgccctcgacctggatggtgtttcccggcatcagaatgctatgggcagggagaaggagctgctgaacaaccagagggatggccggtttgaaggtcgcctggtgcccgatggtgacgttaagcagagtgagtgtcgccctaccctggctcagacagctgaggtctatctgagcttaggcacctcccttctggcatccctgccatctgatgatatcctgaagagaacaataaaagcttggggactttgaataactcacagagaccactggaccagcagatctcagaatctgaacagtccttccctcagattactccagtgagtcatgaccatcgtctcctgactagctcactgcctcctcctttgagggactgcttttggttttacagataaaaatcagagaaataaggccaaggctattcacctggtaacaatgggcctaagggagaaaagctgaccccatattgggtttgcttcacccattttgctttttcagagcttccctatttatattttgctaattgtatcctccccacactgagagccgggctacccaaagctgtctgcattgtacctggaactgtgtccccaacatcctgtgctggtcctgagggcagcgagaatcaaggactccacacttcccagagatggggggctgagcttcatgctgtctgcaggagcctaagtgccaagagcttcatgactgctagaggccatggcaggagttctggccaatcccaagttctgtgattctggtctctcatggtcaagaccacagcccactaatagcaggggaccaaatgaaaacctgaagtaacgtgactttgttaggacattcatatgttaaatcaaagtctcctcccacaacacacacatacacacacattcacacacaccttgattaacaatggctcatttgatccagagactcatttccagtccacacaacagagcaagtttgtgtctacagctaagatgatacttccatgcagtcaagaatcttggttttcaacatctgtttactgtccagccagtgaaaggcaaggaggggtgacatagcacaaatgctccaccttccatcatgttccactggactttttgagtggtaacactaagctgcacagaagtctagaaacagtagttcttataggggtgctaaatgtcttagctaagactcaggtattttctaacataatagaagatgaggcaataggtattttacgttacttctactgccagggaaaggtagatatccattaggctgttccacagaaaaggacctatggctcagagtctaacagtaattgtgtctcgcgctgggagcttgagtctgggcccagccctgtatagctctgagtccatccatgttttatgccctgagtgaacacctcccattacttggggaccagtgccgatcatctattggaatatagaaaaggtccaggggaggccatgctgatggagggtccccagacaagcatgaggaaggcatagccaggctgttctcacatgtggcttctggacagagaagggaggaatgagaccccacctggtttccactgctgggaatctgtctgtggagctctgagtatgaataaactggagtcttattttcccccataggatcaccaaagatgaggcaaagaccccctcctcgccgagacatgaccattgtaagtacacacttgccccagagcctcatctccttggcctggggcttgtctgggacacccactagacctctcatattccagtacttttcaagcagttcttgacaacaacacaacctatgtatagcaggcccaaggttagacaagacacaggtttatctgcagtgacgttttgttattctgatccatttttaactctaaacgtgaatttacttatttatgtatacacagagtctcactatatagccctggttagtctgaaactctctatgtagaccaggccagcctacaactcgcagagattcgcctgcctctgcctctgagatgctggaataaatgggtttcgccaccatgccctacttctaggtaccttttaaccaatgtaggctgagcatccttattccaaaaatctaaaatgcttcaaagtccctctgagcaccaacaagataccaaaagtggaaagacaattccatacctgacctcacgtgacggatcacagtcaaaacacaggtacactaaatatattgtaaaatgctctaccctggctaaatacacatgaagcataaatgtattctgtgtttgaactcggatcctgtccccaagatggctcactgtgtattcaaatattcaaactataaaacaatggtgatcacaagcagtttggaaaggaattgctttggaaatatctgccattgcttgagtatctgtccagcaccataaatataccaggtgtgtcacccagtagcatattttatagtcatagcagatatactaatccagtagtcttaggattcccgttctacaggagatgaagtggaagcttggcatggcccttcatcagcattcctgcccacctgggtcaaattcaaagacttgaggtcttcccatagatagcctcgctgcctcttatattcagacctttgggttttcccaagttctcaccatgtgcccagatgctgtttgtaactgtaaagttgaagggccaggggaacctcaagtaggaggtatgacagtcaagccctccttgttttgcccctcagaggctaattaggcttccttgatgttgtgtacccctcctgactcattcaaccctctatgtaatcctgacagcctcgaggcctcaacctgccgaagccccccatcccaccccaggtggaggaagagtactacaccatcgctgagttccagaccaccatcccagatggcatcagcttccaggcgggcctgaaggtggaggtgagcatctactgctcttcttccttcccaccattggcttctctcatctcacctcctgctatgggggaggggaggagaggttaaaggctttattaagctattgactatatctgcataaacatatcccaaactctttgccactttgtgtgtacaagtcactgttttcttttccttggagttgtgtaactatcgccacactccagtcccaaagcccttagcagaaaccctgtcccatcagcgagcactggtctcccttttcacatcaacccgccctggactttctgagtagaagtggaattatacaatatatggctgccttagtttgggttttattgctgtgaagagacaggatggccaaggtaattcttctaaaggcaaacatttaattggggctggcataactgtttcagaggtccagtctgttaccatcatggagggatcatggcagcacgcaggcagacaaggtgcaagagaaggagctgcgagttctgcagtctgatctgcaggtagccaggaagagactccttctgccagacttgagcatatatatatatatgagagagagagacctcaaagcctactctccagtgacacaccccctccaacaaggctatacctactctcactaggccacattccctgtgggccaagcagtcaaacactgtctcggggggcggggggccaaacctattgaaaccaccacaatgactgtgtgtggctggcttatatttccttttcttttttaaaattttatttatttttatgtttatgggtgttttgccagcatgtatgtctatatatcatgtgcctaatgtgtgtggagaccagagaagggcatcagatccctggggactggaatttcagatagttgagggttgctatgtgggtgctggaattgaacctggttccactggtcaaacagccagtgctcttaactgctgaacccagtgggaggtgtcccctgtggtaggcactgctgtgggaggtgtcccctgtggtaggcactgctgtggaaagcatcccctgtgcaaggcaccctgtgggaggtgtcccctgtggtaggcactgctgtgggaggcatcccctgtgcaaggcactgctgtgggaggcgtcccctgtgctaggtaggcaccctgtggaagccattcctccaagcccctctcttactttttaagaagatgtgtttattgtgtgtgcacatgagactcattgcttgcagaggacaatggacaatttttgcacacgtctctccttgttttgaggcaggctctctggttatttctgctgctgtacttcctatgtgaacttctgacaaatactcctttctccagctcccgttttgccataggagttctgggactggggttatagccaccaggggtccaagaattaaacttggggcattagtgttacaaaaagattcttacccacagaaccatcccttggtctgccgccacctgcttcccctctcctgtcctgcccctcccatactctgtctgtatactctgatccctaggtaaccaaggtaagtcctttctatctcgggtgtatcttttatcttcacaaacataggcatgaaggatgtttcccgtgttcttgagaaagcctgcagggaacaggagagcagcaaagagcaggaactgagttctagcaaggatgcctcctgacagaacaggtggtctggcccctgacgcccccacttctgctctgtcatgagtaagctttggccagagcttcttatcctacttcaggaggcagagattaaatctgcacatctctgacatgcctataatccagtcactacgtgttcccaggatcatatctggggttttgagaagcatttaagaaaaattagcagggcagcagtggcacacacctttgatctcagcactcaggaggcagaggcaggtggatctgtgagttcaaggctagcctagtctagagaacaagtcccaggacagccaaggctatacagaaaaaccctatctaagttggggagggcagggagattacatctctgtagaacatgtagaaactttttggcttgtcatttttccccaaaacaatacaatataatttcaacttacctgtttttctacctacctatagaatatatatatacatatatatatatatatatatatatagtgtgtgtgtgtgtgtgtgtgtatatgtatatatatgtgtgtatatatattataaaatatatatgtatattctgtacatatagaacatatgtacatatacatacacatatgtgtggatatttatatattatactgtatattttatatgtgtgtgtatatatgtgtgtatacatatatatttatgtgtgtatatacatatatatacatatatatacacatatatacagagagagagagagagcaatctaagataattagttcatcctttcggcaccctgctcagtctcatagctcattaacttgtgcctcagctgttcagtatgttcccaattttcgttcaatggttgtgatgttcattgctgtgcattctcgactcctcctcacagctgcctgttctggcctcacccggtctttagtggtcttctctaaggatggaggtttgactcactcacagtcctgttaccggcattgactatctttttctcggccatcagttctttgtgttgttgctgatatttattgcacttatcccatggaatcagaacctgttttggctgcaggggccagagctcagaaatagattagttgcttagcatatgtgagaccctgcatcccattgtcaaacactatagaatgaaggagaagacatctgtgagtcaatctgtggaaatacgcgcaagagattattggcttctagagacttctgagccagccacagagcagcatccagtctctgtgaccacagcctgcatcttcacggttgcaacctacagtctcccatacaagaacaggaccaaggacagaggctagccaggctgactgttagtgtggtgtcttcctagttactccccagtcacgtgcttgtttctccccacacctccctcagcgccacacccaatgtctcttaccctttgtagatttctatgccctctgagaaactgtgaggagtcacctgaggatccaccccttctgcctgcttccctttgaactgggctgcaaatccacagcttttccttacatgtgctgcataaagacaattgtccattccatcttgaaaccagaagcccacactgtaggctatgatgggatgttcctcagaaagctgaaaaagcactgtgtggttttaagacatagcttttatgggctggaggacagctctgtggtagcacataggtcaggtgtgcacacacagactggatttcattcaagaagggaagatagagattctttgacagtatatttcctacagtttctgctaacacacagggctgaacagtaagccctgccacacaggctcagatgtggctcacatgtggctcagatgctaccacggatccttgggatttcagcagtgcatcggagacactggcacctgatgcaactgcatgcagtggggaggtgtcacggcgtttccttttctgacccttctctattcttgcttaagcgggtccagtgacaacttcatatccatcactcttctccctcaccctgtcagtgtagtactaggtgtcctggaactcactgtgtaaaccaggctggcctagctcacaatgcttgcttctgcttcccacgaacagggctgatgtaacacataaagagtgcgcttgcatgctttcacgaagatggcccacttttgcttgtttgaacattagcaaatcttgctgctgttaccatcattaaagtggtagagctacgagctagcacccagagctttgggttcctaagttgagtctccagatgctaagactgtggctgctctccttgctgtcaggcctcggtccttatggctcctgtggcagtttctcaggccaggcactgctcttcctgaggggcaaggggcaggcagtactcagagcccagctgcctgccctcccccactcaccctcctcagaaccctctgcccagccctctgctctcctgaggttctactctgcatctgtagaataggatggctgtccctggatcacagggaggttgtgagcattagctttcctgtgtacagaacctgcctgggaattgtaggtgttagtttctaggactgccatattccataatacccagatgggctggattaaacacagtgatttaccttcttattgctgctgaagctgaggtcaaggggactggtgggtatttcctgtggcttcttttcttggcctacaaatagctatcctcttgttatgccctcacacacataattcctgctctctatttacaaatctcaggcctgctttcatgacccatttacacccagttacctctttaaagaccctatctagatgcaaggacatctggagtactgaaggtgaacacttcaggtagggacttgagtgcacacttcagcctgtcttgcacagtttatgtaacttttcatctccaataattcacttgggtgatattggacccaaaggacataggagacatcgtatcttaaatagcatcatcgatttcagttcaagagcaccaccattcagttcagtggatacaggcaccaggaagagatgcagataagagatgaaactcatcttattccaccaggctcagttgccctgaatgtaagcatggcatgtcattgacctaaaggttttcctgtgtttaaagattcctatttttcatatggcacagctgctataaacaccagacactaagcactttttctgtcccccttctaggtgattgagaagagcctaagtggttggtggtacattcagatggaagataaggaggggtgggccccagcgaccttcattgacaagtataagaagaccagcagtgcctcgaggcccaactttctggcccccttgcctcatgagatgacccagctccggcttggggatgcagctgcaacagagaacaatacgggtccagaagccgtggggccctccagacccctgcctgaggcaccacacggtgctgtggactctgggatgctctggtccaaagactggaaaggaggaaaagaggccccaagaaaggcatcttcagacctgtctgcgtcaacaggatatgaggagatctcggaccccacacaggaggagaagcccagcctccctccacgcaaagagtccatcatcaagtctgaagaggagttgctggagagggaaagacagaagatggagccgctccggggctcctcccccaagccccctggcatgatattgccaatgattccagcaaagcatgccccgctggcccgggacagcaggaaaccagagcccaaacttgacaagagcaagttcccgctgagaaatgacatggggttagagtgtggccacaaggtgctggccaaggaagtgaaaaagcccaacctccggcccatctccaggtctaaagctgagctgtccgaggagaaggtggaccccacctcccagaatctgttcatgaagtctagacctcaggttaggcccaaaccaactccttcccccaagacagagccagctcagagtgaagaccacgtggatatctacaacctcaggagcaagctcagacctgccaagtctcaagagaaagccttattggatggagaaagccaccatgctgctgggagccatgacacagccctcagcagaagcttccttcccggggagggacctggccatggccaggacaggtctggcagacaggatgggctgagtccaaaggagacaccctgcagagcccctcccaggccagccaagaccacagaccctgggcccaagaatgtgcctgtgcctgtccaagaagcaaccctgcagcaaagacctgtggtcccacctcgaagacccccaccccccaagaaaacctcctcgtcaccactgtcgtgcaggccccttccagaggtcagaggggcacagcgtgaagaaagcagagtcgctcctgctgcaggccgggccctccttgtccctccaaaagccaaacccttcctctctaactcctcagtgggccaagatgacatgcgaggcaaaggtgggctggggccacgcgtcactggcaaggtgggagaaaccagagagaaggcggcttccttcctcaatgccgatggcccaaaggactcactttacgtggccgtggccaactttgaaggagatgaagacaccagcagcttccaggaagggacagtgtttgaagtccgggagaagaacagcagtggctggtggttctgccaggtcctcagtggggctccttcctgggaaggctggattccttccaactacctccggaagaaaccctagcttccccgccctgccgggaggcccagcagtccctgctagccttccccacgtatttaatacgcatcttaatttatcagtctccacatcatttcgaggaaggtggccattgggatgctgtgatatcctgtagcctggggtctgattctcctgttgtggcttctccagaagtctcaaaagccacagcctttgccaggtagaaaccacgttaccatccttgtctgtggtagaacccatcctcataggcaacatcttgttatccagaagcaggatagtgacacagacccccagaactgacaccagccacctggaagacttccagaccaccctcaatgctcaatttggcatagagggacagcctcacagcctgtgacaactcgctctaacttctccatgttaccagaagcccagtcatggctttgttcaccgttctcagaatacctggtgccaggaagaaccgagtcccgaaagaatcagcctccggggtttctgcttctaagtcctgagcagctgcagctgccctcaagtggtcctagagattcactcggttatcctgccttggaccgtgatcagtcctaaaggagcacgcttcacttcactgctaaagccactggtccattcagggcttttaaattccaattcccacccacctccctcagtccctggaacaagagtctccacgtttgtttaagtaaggggccagtccttcacaaggcacatggtccatgagtgcttctttgcctagtaggtgccaaactgcccttggccttctgccttcaggttctgtcaaccaggctccctcccctgtctattgcacccattttctagttgaggaaagtgaggctctacaggccccaggatatgctaggtaggaagtggctgaaggaggcttgagtccaggtctgcctgaccccagtatccatgctcttctccctgcaagaacaaccagagagggaagagatggaggttgactgggtatcagggtaggtggcctgggggcttccttatgttatgagcaaagggatggtagtgactgccctggactcacagctgtctctgcaggacagggtgtaccctggatccttagtagcagttacaaagcttatagcctgataccctgtgtgtggaagagaaataaaggaagccgaggcactgtccctctggtggctaaggaccagcagcttggtctgtgccaaactaagaacagtacccaagggcctgtagtgtcctgccccagcagcagctgctgctccgtgtagaacagttggctttttagcgtgctctttccctgggagaagcccagggtagcccttccctattttgaccaatagacggctaaggcctggagaggtccacttagttattgcagagctaaaaatcaggacccagatttctagctcccagcccagaccaacttgtacctatgaatgggcttcctgtgaaagcggggtagggttgggagggccaagctccatcccatcccacagtccctacagaagaggggacagccctgtctggttctacacttccccagtgttcatttttaatgtggtttggaaaccacgaagccccctttcccaagatgcttgcatcttacttgcagtgccaaagattttgtgcaaggggatcctttctgcaccccacccctgcccaactctctctgctttcctctgacccacctggcgctgtcactctcttcctctgttcagcctgcagtcccctacgccccacccccaccccccagcactgggcctgggtaggaggcacctgaaggatgaccctgcttagtctgtgccctgggcctcgggggaaagcggcagttagggagaggggaagctgagagagtcttcagctctggagcagcacttgagagcctcatgcccacacccacgctgtgcaggaatcctcatagctttctatttgttggtggtttttgagtttcgacacctctgcttgaccagctttctgaagccgttttacaggcctttggttgttgctgttttgtttttcctgcttgcacttggctctctgtgaccttctcaagtattttacaagtcccttctatgccgcagatgctgggtagaccagggagcggggaggggggcatcaccctgcactgaagaactgagctttgcccactagctccagtgaagaagtcatctgccttctaccctcctctctggtcagctgaggcagagcagacaggccttcctgtgggcaatgagagaatttaccttttgtcctatccttgtgctgctgtgaactgtatgtgtgccgggttccctttctgttcactgtctttttcttgggtcacacacacagtctgaaggtttctgtggcaagctccatcggccatagtgcttcatcactagcctgggcaaccggaagcgagtgggtctgcagagccaagtcactcacccaatttcccttgcctgggacttagcttttcaacatccaggactgtggtcactcctgtcgggatggagcatatatgccagactccccctcaccccccatccctgcctacttccaaggccagggtagcaatgtctgggccaatcacagatcagatcaccgacacaaacttgtgcccctcccctgcaactaacattcacatcaactctgttgatgtgatggcagggaccacctcaatacataatgggaaagttaaggtatggagagtgaagtcacatcctgccttgttcaggttcgggccaccagcaaagaaatgttacagttctgattttaggtgtctctccctcaatcccctgaccaaacattggtcattgaccagatggcccctcttggatgaaccctgctctctggctccatggttgcattgtttctgcctgagagtaagtatagtaccctgcctctggaaacctgggcttgaaaacagccattgctagatggaaactttgcttatattttctggccagagtcactcttggccatttatgttaataccatggctcccggctgaggccaggggtggtctgtgctccagctacttctagtcctgccaggaaatggcaagagccatgctaggcgctcacaggcggggtgttttgttttgttttgttttgttttgtttttgagcctctgccaccagaccgccccatagagttgatttctatggcacagttcttgaccttaaactgtctctgaacccactggggacttggggagtggatggaaagtggggatacatgtgcttcactaaagaacaggtgccaaatctccccacaagaacttaggacagacagtctagtgtttatcgccaaattctggcccttagtgagaggaagaaactgaccatctaaggagagtggtgtggagttgtggtgcagccagaaagcaatggcccgaatgtgtgggccccaggctccatccccagcatcacagataaacaagaaccttaatggcttagctcctgtccttccattgagcccagggctcttcagtgtcgacatagtccataccctgggaagccttgccatttctttgaacagtgtggccatctcggccccttcggtggctgtctaaactttccttcagggtttttcctgtatactatggacagccatatcctaccacagaccaaagattccctgaagtcagaggggtgtggactgaatgggtagaaaattaatttgtatcaaggcccaagggtttgcctttgcctggaagaattgctcctaacttgctaaggttctagcagcaggactgacctgaccccaagcagagctgtacagttaagacaatggttcgtactcctcacctcctggacaaccgtcccacagaccagaccttcctgctctagggagtgatgcttggtccccggtgctatctagttgaggtaccaagcccctcaaatgtgagggttccatcttcttccctgtctctgtactccttccccaaggaagccctcttagctcccatcagaatgagggcttagcttctgtccttcaaaagaccagacccggtgccatcgccagtggccttccctctcacctctgcttttaagagcaaaggtgccctgccaggcttattacagcaataaacaattctaatgcaatggaggtgtccggattatgcctgcaatgcctttgtgccctgtaattactagtagcacctctcgtacataccagagagtgtgataaactgtggtcaccttagccatacatggttcctgtttcggggccactgaggttgcttctaacatccctccagaaacagtgggctctagacagcgtggcccactgtattcatgggcccacagctggtgctgggaacccctgggttctcagcccttctcacaccccctaggccaactgacaggtcctggtggtggcttttatctcccgtgagtgtttaatgtgagggggcaggggatgaacacctagctgtagcatgtagagactgtataccattagtcttttcttttttaaaataataaaatgcttgactggtttcaagcttcgttgtaaagatgtagtgtttgtggatttcatctggctgaaagagatacatgccccggtgtctggacttcatgcgttggtgtctgcacttgagctctttgtgtctgaagaagagaaataaacagaatctgttcaagcattgcctagaaacaggagggactctttcctgggcctcggcaaaagactgaaggtcttttatatatgctggatggggcaggcaaacccacaaaggaaagccacattatatttggggaggggggtgtctcgattctaccgaaagagtagaaatgtcacatgtccaggatgtcttgctctcactgacactgtcttctggtgaacaagagtgcaggaaagtaggggggaaaggcagccatagttgggctacaggactgcccaggttctctgttcacaagagatatttattagtttctcaaaggtagaaccaaggcagtcttgggaggaaacccactgttgtttgccaccctccagctttaatatttatggacctcccattttatcatttttcataacactgtaccaaagtgtgtgtcaccaacgcaacatgagaaggggttctgtggtccaatctatttggttattcttgcatgcggagccttccatgtcccctgggcacaggaaagcactagcaatggaagataaaggtgcatcaaatgcttgatgacatttaacccattatttccaaaatgtatttgatgagagccctgatattcatcgagacattttagaatgccaaacagcacatactctgcctcagagcctaagcactggtcattagcaatgtcactgtaccccgttgcccctgtgcccctgtctgaagcctctggccttcaccttcatgtcctaccctgcagagaaacctggatgggtgggagggcttctatttagagagaacataagattcactgattttttccgaaccctcaaaatgctcacctggagagctcggtagaagtccctcagcgaagattctagaagcctgaaagcacttaccttggaatagtgacctaatgatcctggagcactgaagggtggactgcccacaggctgctgtatgcacggacttcctaccttcctatcccctgcatttactatggcacattacacttaagatttaccatcttggctgtttctggtgcagcttcgtggcattatgcacattgtaacccagccatcaccaaaactgtccacgaagcttttccatgcaactgatgtcccatgcacgctaaacacgattctccattcttcccaccacattccccaggcccccactctactttctctctgtgtacactgactcgctaggtactgcacataactgaagtcatctagttgtccttttgtgactggcttatttcacttaacagtgccctcgtggtcgatctacataccagaatcccatcccttttaaggctaaataataaccctctatgcattagcttatactttctttagccaaatgagtgcgcgggtgtgttctatcttttggccactgtgaataacgctgctatggacacaagtgtgaagccaggtgcatgactcagacctgtcattccagcatgtgggaggctgaggcaggcagactgccgagagttctgggctagtctgcagtacatagtgagttccaggctagcctgggctacagaataaaactcaaacacaggggagctggagagatggctcagcagtcaagactatatagtgctcttacagaggataaaacctcagttcctgggctggtgagatggctcagcaggtaagagcattgactgctcttctgaaggtcctgagttcaaatcccagtaaccacatggtggctcacaaccacctttaatgagatctgatgccctcttctggtgtgtctgaagtcagctacagtgtacttctgtataataataaataagtcattaggccagggctagcagggactgagtgagcagagttgaccagagcaagtggggctgaattcccaacaaccacatgaaggctcacaacaatctgtacagctacagtgtactcacatacataaaataagtaataaatcttatttaaaaaaaaaaccctcagtccctacacttgatcttagccaaaaggccgagaagcaataacccctcagttcctaatgtccatgttggacagctcataatccccggtaactccagagggtctcactcccctggcatccatgtactgacctgcacacacacacacacacacacacacacacacacacacacacaataatcttatgctgggtagtgggggtgcacatctttaatcccagcactcaggaggcagatacaggtgggtctttgagtttgaggccagcctggtccagaacgctacacagagaaattctgtctcaaaaataaataaataaatagataaataaataaataaagtttatttatttaggcagaggcaggtggatttatgagcttgaacccagcttggtctgtagagcgagtttcagaacagccagggctacacacagaaaccctgtgtagaaaaaccaaaacagttaataataacaattaacaacaacaattataataaatctatgaaacaaaggctggtaaggcagctcaacagggaaacaagcttgatgcataagcttgatggggcaacctcataaattcaatccctggaacccacagggagtggacagagagaaccagttccacgaagttgtattctggcattcaaatgggcaccgtggcacacatgcctgaaggcacacacaatgataacaatagtgtttaagtggcttttagcccagaaacttaaaatacccaagattctacttgcaaaacacatgaaactcaagaagaaggaagagcaaagtgtggacaatttgccccttcttagaattgggaacaaaacacccatggaaggagttacagagacaaagtttggagctgagacgaaagggtggaccatccagacactgccccacccaggggttcatcccataatcagccaccaaacccagacactattgcatataccagcaagattttgctgaagggaccctgatatagctgtctcttgtgaggctaaaccagtgcctggcaaacacagaagtgaatgctcacagtcagctattggatggaacacagggcccccaatgaaggagctagaaaaagtacccaaggagctgaaggggtctgcaaccctataggtggaaccacaatatgaactaaccagtacccccagagctcgtgtctctaactgcatttttagcagaagatggcctaatcggccatcattgggaagagaagccccttggtattgcaaactttatatgccccagtacaggggaaacaccagggccaagaagtgggagtgggtgggtaggggagcggggggtgtgggnnnnnnnnnnnnnnnnnnnnacaagacttttggggatagcatttgaaatgtaaatgaagtaaatacctaataaaaattggaggaaaaaaagatgcctgtttacaaaaatttaagtatattgttatatatttcttatgaaaagagattacatagaaatttacagaaataaataagtaattctgagggtaaaaaaaaagtatataaacacctgtagaagtcttcgatttgatttaaaaccattgggtcacatggtgcttgcatgtgtgtatgtgatttatacttctgggtacagttgttcacaggccggaagacgacatcaggtgtcttcctctaccctcttcatcgtctgtgatcagacagtgcctcttgttgatgctggaactcacccattttggctaagtcggagtcagtgagcctctgggatctgtctcttcccatcccatggtgccaggattactggcactaaaggccatgcatgatttctgttcagagcctggaggtttgaactcagatcttctcactttcacagagggcatttcttcacacacagctataaccccaacccctatgttgaagcatttgagggaccaccataatgtttctatagctccccgttattagtttctggtcacattcttgaataaaaatggttgttcaaatttaggtgagtttgtacccacctagagatagcaaacttcttatacacccctagtatttacacttacactattttaattatggtaccaatatataatatgtatataaggaaaacaggtgcaagcgtcctccttgctgctataatagaaatcaaagacaagcgccttggagctggagcgatgacccagcagttaagagcactggctgctcctccagaggatttgaatttgattcccagcatccagatggccactaagaatctctgtaagtccagttcaaggggctccaatgccatcttctgacctctcagggcactagacacacatatggtgcacagacatatatgtagacaaaatacccatatacacacatgaatacatattttttaaactatgaccacctttagaaaccactcacagctaccaagattgtacctaagcaacactaacagcctcaatgttgctactcatctccaacatttgtgtattataaacatgttcatatatttacacatataagtgtgcatacattatgccccccagctttgctgcagttgtctctctgcacacggacatatggagtcttagtgggggcaggtgcttggagtctttctagatatgctgtactgtgaggctcaccttactctaatggcaatactggagaagctttggccaggcagaatccattttaccctcattgggcacaaatatatcacattggtatgaagtcacacttgcatcttttctcctcagcctgggaaattagaagtaccagtctgaggcccccattcccttgttcagagcacttggttactggagccaacatgcgtgtcctttagcatttccacgtccatttttatcttaatggaatcaaaatgaaaaccagaaagtcaatacttcgatgtatagctcactgctaagttgcttgcctggcacaagcgtgggcctgagtaccatccctgatgctgtaaaatgagaaaggaaaggatgccaacattctcattgggaagttttgcttttgtttttgttttgttttttataggcatgtattactactactctgggctccacattagctttttaaaatttatttatttttatttcatgtgcattggtgttttgcctgcgtgtgtgtctgtgtgagggtgtcagataccctgaaaatggagtcacagacagcttttgagctgccatgtggtgctgggaattgaactcaggtcctctggaagaatagccagtgctcttaacctctgagcatctctccagcccctgggaagttttgtggggtttttttgtttatgtttttttgttttgttttgtttttttctgactctgctttaccatccaagcctggaatgaacagacttcccagctggagactttctgaggaacttccctcctttttggggtgccctctctacagggcagaggaaagcacaaaagcttgtgcaagctctgggtgatgcagaagtgccacacaagattcactt

SEQ ID NO: 2710 - DNA, 2561 bp, Mus musculus
gtctacatcatccgagtcacgtggtccagtggcgccacggaggccatctaccggcgctacagcaagttctttgacctccagatgcagatgttggacaagttccccatggaaggaggacagaaagaccccaagcagaggatcattccatttctgccaggcaaaatcctcttccgccgcagccacatccgggacgtagccgtcaaacgcctgataccaattgatgaatattgtaaggccctgatccagctgcccccctacatctctcagtgtgatgaggttctgcagtttttcgagacaagacctgaggacctgaatcctcccaaagaggagcatattgggaagaagaaatcagggaatgacccgacctcagtggaccctatggtcctggagcagtatgtggtagtggcagactatcagaagcaggagagctcagagatcagcctcagtgtgggccaagtagtggacatcattgagaagaatgagtcaggttggtggttcgtcagcactgctgaagagcagggctgggtccctgcaacctgcctggaaggccaggatggcgtgcaagatgagttctccctccagcctgaggaagaggagaaatatacggtcatctacccgtacacagctcgtgaccaggatgaaatgaacctagagcgaggggctgtggtggaggtcgtccagaagaacctggagggctggtggaagatcaggtaccagggcaaagagggctgggcccctgcttcctacctaaagaagaacagtggggagcccttgcccccaaagcttggccccagctcacctgctcactcgggtgccctcgacctggatggatcaccaaagatgaggcaaagaccccctcctcgccgagacatgaccattcctcgaggcctcaacctgccgaagccccccatcccaccccaggtggaggaagagtactacaccatcgctgagttccagaccaccatcccagatggcatcagcttccaggcgggcctgaaggtggaggtgattgagaagagcctaagtggttggtggtacattcagatggaagataaggaggggtgggccccagcgaccttcattgacaagtataagaagaccagcagtgcctcgaggcccaactttctggcccccttgcctcatgagatgacccagctccggcttggggatgcagctgcaacagagaacaatacgggtccagaagccgtggggccctccagacccctgcctgaggcaccacacggtgctgtggactctgggatgctctggtccaaagactggaaaggaggaaaagaggccccaagaaaggcatcttcagacctgtctgcgtcaacaggatatgaggagatctcggaccccacacaggaggagaagcccagcctccctccacgcaaagagtccatcatcaagtctgaagaggagttgctggagagggaaagacagaagatggagccgctccggggctcctcccccaagccccctggcatgatattgccaatgattccagcaaagcatgccccgctggcccgggacagcaggaaaccagagcccaaacttgacaagagcaagttcccgctgagaaatgacatggggttagagtgtggccacaaggtgctggccaaggaagtgaaaaagcccaacctccggcccatctccaggtctaaagctgagctgtccgaggagaaggtggaccccacctcccagaatctgttcatgaagtctagacctcaggttaggcccaaaccaactccttcccccaagacagagccagctcagagtgaagaccacgtggatatctacaacctcaggagcaagctcagacctgccaagtctcaagagaaagccttattggatggagaaagccaccatgctgctgggagccatgacacagccctcagcagaagcttccttcccggggagggacctggccatggccaggacaggtctggcagacaggatgggctgagtccaaaggagacaccctgcagagcccctcccaggccagccaagaccacagaccctgggcccaagaatgtgcctgtgcctgtccaagaagcaaccctgcagcaaagacctgtggtcccacctcgaagacccccaccccccaagaaaacctcctcgtcaccactgtcgtgcaggccccttccagaggtcagaggggcacagcgtgaagaaagcagagtcgctcctgctgcaggccgggccctccttgtccctccaaaagccaaacccttcctctctaactcctcagtgggccaagatgacatgcgaggcaaaggtgggctggggccacgcgtcactggcaaggtgggagaaaccagagagaaggcggcttccttcctcaatgccgatggcccaaaggactcactttacgtggccgtggccaactttgaaggagatgaagacaccagcagcttccaggaagggacagtgtttgaagtccgggagaagaacagcagtggctggtggttctgccaggtcctcagtggggctccttcctgggaaggctggattccttccaactacctccggaagaaaccctagcttccccgccctgccgg

SEQ ID NO: 2711 - protein, 814 aa, Mus musculus
MQMLDKFPMEGGQKDPKQRIIPFLPGKILFRRSHIRDVAVKRLIPIDEYCKALIQLPPYISQCDEVLQFFEWEDLNPPKEEHIGKKKSGNDPTSVDPMVLEQYVVVADYQKQESSEISLSVGQVVDIIEKNESGWWFVSTAEEQGWVPATCLEGQDGVQDEFSLQPEEEEKYTVIYPYTARDQDEMNLERGAVVEVVQKNLEGWWKIRYQGKEGWAPASYLKKNSGEPLPPKLGPSSPAHSGALDLDGSPKMRQRPPPRRDMTIPRQLPKPPIPPQVEEEYYTIAEFQTTIPDGISFQAGLKVEVIEKSLSGWWYIQMEDKEGWAPATFIDKYKKTSSASRPNFLAPLFMTQLRLGDAAATENNTGPEAVGPSRPLPEAPHGAVDSGMLWSKDWKGGKEAPRKASSDLSASTGYEEISDPTQEEKPSLPPRKESIIKSEEELLERERQKMEPLRGSSPKPPGMILPMIPAKHAPLARDSRKPEPKLDKSKFPLRNDMGLECGHKVLAKEVKKPNLRPISRSKAELSEEKVDPTSQNLFMKSRPQVRPKPTPSPKTEPAQSEDHVDIYNLRSKLRPAKSQEKALLDGESHHAAGSHDTALSRSFLPGEGPGHGQDRSGRQDGLSPKETPCRAPPRPAKTTDPGPKNVPVPVQEATLQQRPVVPPRRPPPPKKTSSSPLSCRPLPEVRGAQREESRVAPAAGRALLVPPKAKPFLSNSSVGQDDMRGKGGLGPRVTGKVGETREKAASFLNADGPKDSLYVAVANFEGDEDTSSFQEGTVFEVREKNSSGWWFCQVLSGAPSWEGWIPSNYLRKKP

SEQ ID NO: 2712 - DNA, 29440 bp, Homo sapiens
aggatctgggactctctcaccacctctctgcttgttggcaccattctctcatgatgacagcagtttcaagtacctttaagggacatcaccaaagaaagagcttctcctttaacacaagtcctaggattgtttccagctgacccagtagggtcacttgccatccataaaaccagtcacggtgggcgggagttgcaacactttggccaggccagggtccgacacctactccttccctccaggaggtggtgagcttggcctcacctaagccatggggacaaaggctggtagcaccaccagaggaagggcaaatgcacgctcgggaggaagcccccgcaggcctgcagtctacagggtcttccaccctctgctgtgtgtgcaatcactgagcaatccatggatgccagagagggactcgggtgatagaaaatccatccatggctgggcgcgctggctcacacctatagtcccagcacgttgggaggccgaggcgggcggatcacgaggtcaggagatcgagaccatcccggctaacacggtgaaaccccgtctctactaaaaatacaaaaaattagccgggcgtggtggcgggcacctgtagtcccagctactcgggaggctgaggcaggagaatggcgtgaacccgggaggcggagtttgcagtgagtggagatcgcgccactgcactccagcctgggcgacagagcgagaatccgtctaaaaaaaaaaaaaaagaaaaaaatccatccatgcaactcagctgaaggatgcaggaccccaggagtccaggctcagagaactgactgcactctttctgggacccgggtggcaccctttcccacctggaccaaacagaacttctgtgcatctggggttggattcttccctccacccctcccagcccagcagcctagcctgcagcttccgtgaaggaggggaacggcggactgtgctgagcacaggatatgtgcagcttgagtcagctcggcccccgccgagcaggtcagcaggctagatcaataaataaataaacgccctgtgtgttttccgcctccctctgcaccagctgggcaggccgcggacggcatgtggtattttcccaaagagatagcgactgcagcagcatattaaccatgacaccaggccacagctggctcaggcactcaaccaggggcggaaatgtaaccaaaacaggagagccctctcctctccttgctgggctcccttgagacacacatccatttttctccatttcagctgccagagcagataacactgggggtgggagctgttctagctctgtgggacaccctgccagagtgcagcgatgagcaacccgccctgccgagcccaggccctccagggctactgtgggagggacgcagctgggggcagctctcagggaggagggtgaggccataaggatggtcccacagtttcaggggtcgggggaccgcagagagtgtggtagaagacatcccagtcacacgaatgaaagttgaagcttcgagcatggttggattcaaagacttgaacatgattaataaaaagtgaagatcagctgccggcaaggtaatgaaaattgtgcaccgtgtccgcagtagtgatttcagcctgaaaccctccactgccaaagttcagcttctccctgaactctccacctgcaagagctagtaaggagccacagacagcttaacctcctctgtgtgagcaaggtggctcccacccagccttcaggtcttgctcatttactgcatattgactgatttgctaaacattccaagcaccatgcccagtgctgaagacacaggaatgaacaagacagacaaagccctgccttcctggagctcatattccagcagaggaaacagacacacactgaacgaaacacaataaataagccaaatacatgtcgtgttacaaggtaattcctagtatgggtggggggcaataaaccgggataaggggcatgagaatgccatgcatggaagtactgtataaggtggtcaaggaaggtgaactcgaagcacagattgaagcaggtgaggctgagtgtgtggcgctgaggagtttcagagggatcgagatctaccctttgtcctgtgttctgttgctgcttgcacagggctgtccagggctaggtcagggccagggggggtgcccagaaatctctgaaggaaatcctccctccgacgggcaagggcatcacggggattacggcatcccaagcctcttggtgtcctcttctgaccccagcttccttttgtccccacagaggagaagtacacagtcatctacccgtacacagctcgggaccaggatgaaatgaacctggagagaggggctgtggtggaggtcatccagaaaaacctggaaggctggtggaagatcaggtaccagccgctgccccccacggttgctgggtgggtttggggtcacgctgggtgggtttggggtcacagggactctggcctcacagaggtcggtaagtgattgcatctgggcgaagtttccgcctgaaccataaaaggatacttctcctctgtgttgtgtggcctccctccctacccatatccttccctaaaagtccatgataagcaaaactttctccaaacacactgaaccacagatagcagcaaccccattaagcaaggctagtttccacctccagatgtttctcataatgaggagttggaggccaaagctgccccatgtgagtgacagccccctcccgccccattctgagaacaagatggtgcataaacactcatggactgtaattcatcctaggctgataatctgccctcgtctctcaaagtccaatggtaaaagcagggcgtctgcattccaaacacctttcacagccctttcacctatgtgatgatatcagagcctcccaggcaggcagggtggccagctcgtcctgccttgcctggttttagtaatgaaagtcctgggaacccctccttgatcacccccaataggcaggatgtgaccatgggaaattagggcaagagaggaagccgaggtccctgcaatctagtgtctgcgctgtgatgtgtggcgggacattcgggccatttccaggaggctgagcatgtagcactgcattcattcattcattcaacaaacgcacaccaagaatctctgttgggcccagccctgttctgggagctgaggagtcaacagtgagcaagatacaatagctcacaccacctggtacagaagacaaactcataaacggtgatagagcagagggttggccatgttggagggatgcatggggactttggtacacagaagaggggctcctcagcctgggggtcaggaaggcttcctgagggagatctcagaacctaaatttgaagacggataatgatagtaatagtgtattagtctattttcatgctgccgataaagatataccccagactgggaagaaaaagaggtttaactggatttacagttccacatggctggggaggcctcagaatcatggcgggaggtgaaaagcatttcttacatagcatcggcaagagaaaatgaggaagaagcaaaagtggaaacccctgataaatccatcagatcttgtgagacttattcactatcacgagaatagcatgggaaagactggcccccatgattcagttacctccgcctgagtccctcccacaacatgtgggaattctgggagatacaattcaagtcaagatgtcgatggggacacagccaaaccatatcaaatagcaggcatgggcctggcacggtggctcatgcctgtaatcccagtacttgaggaggtaaggcaggaggatcacttgaggccaggaattcaagaccagcccgggcaacatagcatgatcccatctctacataaaaatcttttaaattagccaggcatggtgatgcacgcctgtagtcccagctacccaggaggctgaggcaggaggatcactcgagcccaagagtttgaggctgcgatgagctatgatggtgccactccagcctaggcagcacaacaagaccctgtctctaaaatttaaagacattagtttttttaaactttttaaaaaaggataacaaacatatattgaatagtatgttatcttgctgcataataaattgtcccaaaagttagtggctctggaattcagcagtggcttaattagactcaaggtctctcccgaggttatagttaggatgtcagtaagggctgcagtcatctcaagatctgactgatgctagaaagtgacagtcaggatttcagcccattcccttctcaccccagagcccagtcagcactgcacatcgcctcccatcttatggctctgtgtccccaaacaatgaactatgtcaaactgagcgtgtgggttatatacagcctggcactttctaattaggatattccctctcagagcatattttaagattgatagacactaaactgcagatttctacctccttttaaatttgcttccagtcaagagagaccttttttttttgcattaaaacccaatgctatttagttcttaaattaattcttgacaagagattcagccctgccattgggtctgttcaactttccccaaaggtctggccacctgtttttttgggttctggtaaatgtttaacaaccagctctccaaggaaaaatactctgagttacagtgtttgccagttgccatggtgcaaatactgccaccatggtcaatttcaagctatcagtgtgatgtcactaaatgtagagattgggagagatgtgcccaactggctgtcacagctggtgtgactgactgcagcacacccctggtctagattggcccctctggtcattgctgttaaactgaattctggccaagcgtggtggctcacacctgtaatcccaacactttgggaggccgagacaggaagatcacttgagtctaggagctcaagaccagcctgagcaacatagcaacaccccatctctacaagaaataataaatagctgggcatggtggtgtgtacctgtaattccagctacgtaggagactgagttgggagaatcgcttgagcccaggagttcaaggctgcagtgagctatgatcgaaccactgcactctggcctgggtgacagggagaccctatctcaaaaactgaatgtctcctgcagaggattaagagatgatgacactcattgaagtcccttttgggaggacactgagctgctctgtcagggtctcgatcactctgcggtttagtgatggccagctgccacttggcgagccctggacccagccctcaacctgctaatcccatatgaaagcatgtttaatctccacgttcatcagcgtgaacagatctccatctgtctatgccaggctttggccccagagctggggctgctgggaagaggcagcaaagcacagagattcagagcccaggctggtgccctgctggctgggtgggacatggtgggtgctgtaagaggggcaagtagaggccgggttggaaaggccttgaaaataccaagctcagggcttaggcatcatcaagaggaaatgcacagtgtgtgccaacctcttgccctgggcagtcacaacccgtcgttcctgctccctgggacctgtcatgtgattcccagtaggagcaaggcttcttcccttgggcctggcggagcagtttgacagcatccttcctcctcttcacaggtaccagggcaaagaaggctgggcccccgcctcctacctaaagaagaacagtggggagcccttgcccccgaagccaggccctggctcaccctcccacccgggtgcccttgacttggatggtgtttcccggcagcagaacgcggtgggcagggagaaggagctgctcagcagccagagggacgggcggtttgaaggccgcccggtgcccgacggtgacgccaagcagagtgagtgacacccgcccaagctcctgataatcagggcccctgtgtgccagctctgtgctcaaggcgtctcacatcgtccctcatcctcacagcagcccagctgctcccccatcctccagataagaaaacagaggcccagaaaccccgggtaacttattccagatcattcagcccgtgaattgcagaatctgagtcaagaggcattgctggccgggcacagtggctcacacctgtaatcccagcactttgggaggccgaggcgggccgatcacctgaggtcaggagttcaagaccagcctggccaacatggtgaaaccccgtctctactaaaaatacaaaaattagccaggcgtggtggcagctgcctgaaatcccagctacttgggaggctgagataggagaatcgcttgaacccgggaggcagaggttgcagtgagccaagatgcaccattgcactcgcgctccagcctgggcgacaagagtgaaactccatttaaaaaaagaaaaaaaaaggggaggcgttgctttcccatcccaggttgcattctttctgctatctcacagtggtcacactggctactctttttcaagcacctgctacatgccagaaaccttctaattagtctaatcgactcctcataactacctttgagggaattactactttttctgttttacagattgggagtctgaagggtgagagggtgtgcccaaggcccccagctagtagacggcaggggcggggacttgaacctggggagtgctgtgctctctattgctccatgtggcctcgtttctaagccagaggaagaagatggccttgtgggctctactccaacacagtgcctctcccatcttgcttttcaaagcctcctcgtgtatattttaccatttaatgttcccaacacacctgagagtagagttcattactgttgtcggcctggtcacactggctaccataccatgtctgcatgggcacgctggtgcccaggacttacgcacagtgcccatgatcctgtcttggccgtgcagggcaggtgaactctgttgagaaaggacttccagctacccacagagatgaggccactgcccctggcggggcttctccagctgtttttaagtggcagtgaacttcttgagtccgtcaaccaagtttcgtactttgctcagctgccctgagaagtcactgatcatgttttctcacatgctgtggcaggggttctggccatccccgagtttgtgtgattctaatctgtcaatcatggccaagaggttagatgtattcccattaactctagaggagcaaatgaaaatctgcagcctcaatgtctttgttagtatataggttcaggctgggcacagtggctcacgactgtaatcccagtgctttgggaggctgaggctggaggatcacttgaggccaggagtttgagaccagcctgggcaacatagtgagacccccctatctacaaaaaaaaattttttttaattagctgggcgtggtggcacacacctgtagtcccagctactagggtggctgaggcgggaggatcacttgaacccaggagattgaggctacagtgagctgtgattgctccactgcattccagcctgggcaatagagcgagaccctgtccctcaaaaataaatagatagatagatagataggatagatagatagatagatacatagatagatacatagatagattcagatgctaaaacaaagacacccccctaccaccactgaatatacacatatacacacatccaataaacgatctagatatgtatttctttctcacaaaacagtctgtgtatatgttcagggttaatatggcagctccaggcaatcaagagtcttattactccacatctatcttgttgccctcatccctcggtccagaacggctcactactagtccagccaatgaaaagcagtgcattgcactccagcctgggtgacaagagcgaaactccatttaaaaaaaaaaaggcgttgctttcccatcccaggttgcattccttctgctatctcacagtggtcacactggctactgtgtacacagctcagaagccacacactttctactttgtcttacatcccactgccagaactgagtcacgtggcaatacctggctgcaagggtgactggaaaatgaagtctatatagacagctaagtgtcttggccaatactctgttgctatttattctaacagaagacaggtaaatgggaatttaagggattagcagtctcctccgcaccccaacgccaaactacccttctgtatggacccgtgctgaacctggccaacattctgcctttagccaggagccttggaccactgcaaagtcctcatcctcctggccctgagacccagagccagggcagctgcctcgagagtataaacccctgagtcatcggcccaagtgtgtttggttcagtgtgtttgtgtattgttgcgtttgggttgttctagagcacaaaaccaggtgcagataacattcactgcatgcctgccacatgccaagagcttcacagatgtttcctttcatcctcaccgctgccctgggtgacacacattatgccagttctacagatgagggccttgtggctcagagaatccaatcatctgtccaatgccagcagctgtgagcctcagagctggattgggacccatctctgtgttattctgaagactttgctttttgccctttctggagaatttccatgacttgaggatccagcaccatcccctttcattcctgtgtagaaaagatgcaagaaaagctacgtcgagagagtcctgagccaactatgagccacgcgtgagcagctccttcctgcccaggctgttctcacagggagggttgcagcagcatgcagacgcctgtgttcaatcttctgcaggagaaaatagacccgacctggcacccagctcaggaatctcatctgtagcacaagatgtaataagctctcatttctccataggatcaccaaagatgaggcagagaccccctcctcgccgggacatgaccattgtaagtggatcctcgctactggggagtggccactgacttgagggctgtgaggggtgtccactagcccctcacacacccctcgcccttccagaaatgctctctttcctgtccacacaacagccttgtgaagcaggctgtagaaatgctagtcccactcgcaggtggaaagacggaggtgcaggcaggtgaaacagtttgcccgcggggccagagtgctcctgtgacagttgggcctcaggacctgccttctgctccctgggcccttctcttggtcttagatcagtcttctcaggcgacttgaggcccaagctgagatgagacacaaatatcatctgtggtcccattctgatattctgcgctcataatccattatgtaaaattctctaggtacctttttagccaatactttgaacccaatgggttgttgttgggttttggggttttttttatttgtttgcattggtttttgagacggggtcttgctcttttggggttgtatttttttaatgtctgctatttatcaagcacctgttgcgtgccatgcagcgtgccgattgcctcacaacattaactaatttaatacttgaagcaaccccaccaggtagacactgttatgcccactctgcaggagagaaaactgaggctccagaagggggtgatttgcccaaggacactcccaccatcagtgtttccaacccagatagatctactaataaacttaagctccctccacaaccctcactgcctcttatttcagagaatattgtcttgctccaaattctcatgattgtacccaaatgtcccgtgtttcttcccatcaccctaaagctgatgggccagtgaggtctcaccgaggagtgacaaactgcgtggtcctatttgtgttgtcccttagaatccaactaggtccccagcacccccttaagggtgattgcatgccccaggcccttagactccccctgacacagggtcgcaggagtgcacttagccttggagataaccctgtgtgtgatcgtaccagcctcgaggcctcaacctgccgaagccgcccatcccgccccaagtggaggaagagtattacaccatcgccgaattccagacaaccatcccagacggcatcagcttccaggcaggcctgaaggtcgaggtgagtggccctggtgttcctttgcctacttgtgattcctgattccaggcatcacctcctacttctcccctgtcacctcctacttcactgggtgggtggaggtggggcggagattaacagctttatggttcacataccatacagtttacaattttaagtgtaaaattcagcggcttatgatattcacagggttgcacaaccctcaccactgtctaattccagaacaaaaagaaactccttacccatcaacagccaccctccatttcccctcaacttgccagcccctaggcagccaccaatccactttctgtccccatagatgtgcctgttttagacatttcatatagatgaaatcccacagtatgtggtcttgtgtgactggctgtatgcctttctttaccacctcccacctccgttcttgcttctcctctctccttttcttcccactctctctgtttgtctactttgttccccagattctcttcctgcatttctctttcctttcctcatggggttagagcttcaagatatttctttctcatatttgcaagaaaacctgtaagtaaggggatggcagctagggccagggtttggaaacctttggcaaagatggttcttgagacactttcaaaagcaggtgagccaatcacaggtatcaccaaattcactctgtcatgtgtaagagttggtcagaccctccccacctcaccttgggaggccaaggttcaatttattcatctctgcaacaaataaaatgctcctggatctcctactatggttgtgtgtggcggctgcttttctaggccctgaagagttgtcgtcaccatcctctttcctttaaagaacacagctctggtccctggcacagagcactgtctgatggcacagggcagtagacaccattgatcagttcactccagcatacctctttagggcccctcccttccttcctggctatattccaggaaggactatagcctgcctgcctgcacgccttcattccttccttccctccttccttcccttcttccttccctccttctttccttccctccctccttccttcctccttcctccttcctttgttttccttcccttcttcctttcctccctcctttccctccttctctctttcctccctccttcctccttctttctttctctccctccttccttcctttcctccatcctccttcctgcctttcttccatcctcctccttccttttcccttactccagcttgccagcagctccaccaggcacaacatctggcccaggccttgctgtgtactacagtcgagaggctagttctgcatcctctggcccctgcttccagaggcattgaagtatcttcatgtttcactagaaggaaatccttttgtgttttcactttgctattatctgagtgaagggctaaagggatgagatttgggaaaattctgaattgtgttttaatccattatagaaaaatctgccccttcatactctttcattgtatacacatgtattgagtgcctccttttttttttttttttttttttttttttgacagagcctcgctcctctgttgcccaggctggagtgcaatggctcaatctcagctcactgcaacctccgcctcccaggttcaagtgattctcctgcctcagcctctctagtaactgggattacaggcgcccaacatgacgcccggctgatttttgtatttttagtagaaacagggttttgccatgttggccaggctggtctcgaactcctgacctcaggtgatctgcccacctcggcctcccaaagttctggcattacaggcgtgagccactgcacctggctagatgttgttttcttatgatagatccatatgctctgtttttctcttctccagttttgcttcctggctcattgcaacattatcttagccttcaaaattcattaatggaaccacagcattctagcagtagggctaccagtaacaccttagttacttgtctaggctgtttatcttcaggatgtgttatgataatgatgatgatgatgatgatgatgatataggcacctcttctgtgtcaggtaccttacctccttgataactgatcttcacagaagtcccaagaggtcaaaataccagcatcatagggttggttggttagtttgtttttcttttttttttttctatcagcatgttttatagatgagactcaggggggttaggtaaattatttgcctctagtaacacagctagtaagcaatggagttgtgaaaccaggtctttctggttttaaagcccacactcttttctttcccctcattcttgtgatctttttttttttctttgagacggaatcttgctctgtcacccaggctagagtgtaatggcatgatcttggctcgctgcaacctccacgtcctaggttcagacaattctcttgcctcagcctcccaagtagctgggattacaggcgcctgccatcacacctggctaatttttttttgtatttttagtagagacggggtttcaccgtgttggccaggctagtctcgaactcctgacctcaggtgatccgcccgcctaagcctcccaaagcggtggaattgcaggcgtgagccaccgcacccggcttctgatcttgcatttgcttttattcctagtagttcttggcttccctctagtaaatgaaaacgcccattcctcatggttcagaacacacatgttcagagcttctaccacaatactttgcaaagagtgtaagcttgacaaatcttactgatacatctaatattgattaccctattttcagttcctcacatacagacttaagtattagtgttgttgaattcatggatgtgctgacgatgactcgtatgcccagtgtggcctgtaatttttaccagagctatcaagcgttgataagatgccagtcatcctcacataaacagcttacatttatcagtggcctttcctggagattccagtgggactcattaagtgctgcctgtcaagtgcatcccgctggctcagtgacctccactctaatttaatcgcagcagcattatttaccaagtgctgttgtatgcattagctcttgcggctgcaaaaattctacaagtgggtgttaaattgttcttaccattttccttctgtgatgtggaatctgaggcacgtggcttgccccaggccactcaggcagtaagtggcagagccaagactagaacccaggactgcaggcccaggagcccagcatttgcgtcctggcgctgagtctgtggctgccatccctctcccagaagggccacaaagtgcccgcagccatctttgctccttctgcaatttcttaccccggacacagcccttctccaagcagggtctttttttttttcgagacagagtcttgctctgtcgcccaggctggagtgcaatggcacgatctcggctcactgcaacctctgcctcccaggttcaagcgtttctcctgcctcagcctcccgcgtagctgggattacaggcgcatgccaccacacccagctaattttttgtatttttcgtagacgcagggtttcaccatgttggccaggctggtctcaaactcctgacccaggtgatccgcccgccttggcctcccaaagtgctgggattacaggtgtgagccaccgcgcccggccaggggtttcttttctgagaggcaagattaggtgactctgaagcccaccccgctgcctttgactctcctccgatcgacggcccttctacaggacccgctgtgtgttcctcagctctcctgaggctccgttctgcatgcgtaaaatgaggtgacagttccccactcacagggtgtcatgagcgttcatcagatcttccgagtccagagagagcctaccagggaattgcagtgtacatctgtgatggctgccataacaaaataccagactgggtggcttaaacaactgcagtttattgtctcacagtttgggaagccagaagttcaagatcaaggtgtcagcaggtttggtttctcctgtgtcctctctccctggcttccatatggacaccttcttgctgtttctcacgtggtcatccctcagtccctgtgtgttttctaatctcctcttcttatttggacatcagtcatattgaactagggcccatgtattaggccattcctgcattgctataaagaaatacctggctgggcacggtgactcatgcctataatcccagcactttgggaggccgagatgggcagatcacgaggtcaggagatcaagcccatcctggctaacacggtgaaaccccatctctactaaaaatacaaaaaaaaaaaaattagccgggcacggtggcaggcgcctgtagtcccagctacttgggaggctgaggcaggagaatggcgtgaacccaggcggcggagcctgcagtgagccgagatagtgccactgcactccagcctgggcaacagagcgagactctgtctcaaaaaaataaataaataaatacctgagactgggtaatttataaagaaaagaggtttacttgactcatagttgggcatgctgtacagaaagcatggtgccagcatctgcttgccttctggggaggctcagggagcttttactcagggcggaaggcaaagcaggagtaggcacatcacatagcaagagcaggagcaagagagagtggcaaggagacaccacacacttttaaacaaccagatcccatgggaactcattaccaagggaaggacaccaagccattcatgagggatctgcccccgtgacccaaacacctcccaccaggccccacctccatcattggggatcacatttcaacatgagacttgggtggggacatacatccaaactcagcccaccttaatgatccattttaaccttaaccacctctttaaaggccccatttccaagtacagtcacagttggaggtattgggggttagggcttcaacatacgaatttgggtagggggacacaattcagcccataatagcgagcacacctttcacctgtgtgaattcagccacgcagtgctggacaaaaaagagacagagaacaagatcttagacaacatgagtgattccacccaccattccagccaacaggcgtgtatcccacagggaagtagggacacgatgaaaatctactctactccaccagctccaggtcccctgtatataaacacgagcatctctttgagctgactgtgattcctgtgttcaaagatagatatttttcaggccaggcacagtggctcacacctgtaatcccagaactttgggaggccgaggcaggcagatcgctagagaccaggagttcgagatcagcctggccaacatggtaaaaccccatctctactaaaaatacaaaaattagccaggtgtggtggtacatgcctgtaatcccagctacttgggagactaaggcatgagaatcgcttgaacctgggaggcggaggttgcagtgagctgagatcatgccactgcacttcagcctgggtgacagagcaagactctgtctcaaaaaaaaggtaggtctctttcatgtgttgtggactctataaatgccagctaacttcttcatccgatgctcagccaaagaagccaggatcaagggtagctctgacttctgccttgtctttagaattgtagcagacgctgccggtgcctctgatccacctgaattcacctgcgcctacacacaggtccctgcaagccgacagcttcccagaaggggagaggagttaataccctgggtagggaggagctgagagtcaatagataaatgcacgcatccccagagggacccgttctgaggcactgtctttgtggtctctcagagggtccctggcagatcaagccccatggccccgagcaataacttgctcataattggcctctccctttcccttctttctctgtctacttccttacttgtatttcctaggaccaactctcaaattaagtacctatacccaaggccacatctcatggactgctttagggggagtcccatacgacaagactctccccccatgtaagatattcccggaacatggtaacatctccattggtggtccctgtagaccttgtcagaggagctgctgagtacacagtgacagcttctagagctccagttgcacatgggttctgccaaaccattccatctgctggccctggcatcgtagccaagtgcctttctctatcctcccttgcaggtgatcgagaaaaacttgagtggctggtggtacattcagattgaagataaggaagggtgggccccggccaccttcattgacaagtacaagaagacgagcaacgcgtcgagacccaactttctggctcccctgccccacgaggtgacccagctccggctgggggaagcagcagcgctggagaacaacacgggcagcgaagccacgggcccctcccggcccctgcctgacgcaccgcatggtgtcatggactcggggttgccatggtctaaagactggaagggcagtaaggatgtcctgaggaaggcatcttcagacatgtctgcgtcagcaggctacgaggagatctcagaccccgacatggaggagaagcccagcctccctccgcggaaagaatccatcatcaagtcggagggggagctgctggagcgggagcgggagcggcagaggacggagcagctccggggccccactcccaagcctccgggcgtgattttgccgatgatgccagccaaacacatccctccagcccgggacagcaggaggccagagcccaaacctgacaaaagcagactgttccagctgaaaaatgacatggggctggagtgtggccacaaggtcttggccaaggaagtgaagaagcccaacctccggcccatctccaaatccaaaactgacctgccagaggagaagccagatgccactccccagaatcccttcttgaagtccagacctcaggttaggccaaaaccagctccttcccccaaaacggagccacctcagggcgaagaccaagtcgacatctgcaacctcaggagtaagctcaggcctgccaagtcccaagacaagtccttgttggatggggagggcccccaggcagtagggggccaagacgtggccttcagccgaagcttcctcccaggagaggggcctggccgcgcccaggacaggacgggcaaacaggatggtctcagcccaaaagagatttcctgcagagcccctccgaggccagccaagaccacagatcctgtgtctaagagcgtgcctgttcctctccaagaggctccccagcagagacctgtggtcccaccccgcagaccacctcccccaaagaaaacctcttcgtcatccaggccgctcccagaggtcagaggtccacagtgtgaaggccacgaaagcagggcagctcccaccccaggccgtgctctcctcgtccctccaaaagccaaaccttttctctccaactctttggggggccaggatgacacgcgaggcaaaggcagcctggggccatgggggaccggcaagattggagaaaacagggagaaagcagctgcagcctctgtccccaatgccgacggcctgaaggactctttgtatgtggccgtggccgactttgaaggagacaaagacaccagcagcttccaggaagggacagtgtttgaagtccgggagaagaacagcagtggctggtggttctgccaggtcctgagcggagccccttcctgggaagggtggattccttccaactatctcagaaagaagccgtagccgactccctttctgcctagagggcccgctggtccttgctggctttacccacgtatttaatacgcctcttaatttatcattctccacgcagcttccaaggcagacagactctggggtactgtgacttcttgcctcccatgggtggagagtgagtttcggacacctcgggcgcccctgggcctgatccctcctatcacagcatcactggaggctcagaacccacagcctttgctttctgtccatgtcagcatccctgccttaagagaactcctcctggccaatggcattgccacccagcagtgggaccaagactctccaagacctccaggactggatcccattgcctggagaaactccagcaagggtctctcatggcttggacatggcacagtaaggggcagccaacccagtccatgatgacttttgctccaacttcttcatgtttctaaaagcccagtggctttattcactcctcctaaattgcctgctaccagaaggaacttcatcctgaagaaatgcattccattaccagttccagggaaagtgtccccttccccaaagcctcaggcccgtgggcctctgaggttccactggatgcggctcccccaggagtgggcctggagatccgctcagccgccctgcctcccaccttctatcttgggaccgtggtcagccctgaagggtggttccagccccgcgtatgctgcgctttgctgctgcaggctccggtccctccagggcttttcaatgagagttcccaccccaacttggagcatttcatttttgcctacctaaagcaagaatctcaaagtttgtttgaataagaggcccattcacaagtcgtgcccttgtgagcacccctttgctgagtgcctcgtgggtgccaaacactgtacttggcgctttgcattcatgctttgaccctcacaacctccctttatagatgaggaaattcacgctccatgtgcccaaggacacaccagccaggaggaagagggaagaggatttgagtccaggcctgcctgacttcagtgcctgtgccctcccctctgtaaaagacaaaccaggcagggaagagatagaagctggctaagtggtggccaagtggcttcattgtgaggggggtgagggggcattcgtggctgctcccacacccaccatccctccagcccacagcagcctataccaaaggctgccccggactcaacagctgcgtctccatgacaggagaatgccagggtcctggtggttggcacagagccctgttccctcttctaagctgttgccccctggggaatagagcttatggagcaacgggagctgaggtggcctcgagggccagcctggagggctctgagcatagcatgcagcggtcccatagggaggcaggtaaccaagggccaggcagagctgcttcctgtgcctctccggcatttgtaatgtttttttcttttttcacgcactgccaaatctgttttctcccttgaagaaacccagggcagatgtggtcatctgtcaaactgaggtctggagaggcatgactaaatcactgcagaagcaaaatcaggacccagcatttctagctcccagcccagagtaagagagcagagcagaaccccttcccattctacccgaccgaggcagccctgccctgccctgccccgcccctccccaccctgccctgccccagagatctccagttcacagtgttcatcaggcgagatacttttggacccacaaagccagttttttggggggatgctcagtgtctacctgcagtgccaaagttttgcttgaacagccctcttctgccgcgcctcccagctccaccccctatcacgtgggtgctggctgcttctgcgtgaggagcttcctctgatcacctgtagcatctttagtgccttcgtccagtcggcctgcaaatcccatttcccagagaggcttgggcagggcccacttgccacttggccctgtgcccagagcgttgggggcagatggcagccaggggaagaagggaggtggggaagggccgccaccgcttgagggtcccctcccttgagaggaggccccatggcagttttcctgagttcttgatccactttggtttaaacaacttttgtgaagctatgtgagatttgactgcatttcaaaagacaaaacacatgtttttttctgatttgctctttgcctttcagcgacgctttcagatactttgtgagtgtctactctgtgctaggtgctgagtagactgggatgtgtgtggctccatccctggctggaagagctttgagtcctgtctgctgacttcactgaaggagtttctctcttgcttcattccttcctcccgggggtcagctgggtaggagcagacttgccctgccttcctctaggcagaaagttttcctgcaaatgaaagaatctgccattctcttttgctatgatgatgatgattattctgacatgacccgcgggtactgaagccacagtcctctctgttcactgttctctccttgagtcatatctatggcctgaggacgtctgtatccagctccttttcctacaatggtagacacttccccaggcagtgggtgggtcggggtggccagtcactctcctagctgtccttgcctggggacttagatttaccccatccaggactgtggtcgctattctgtgagcgattgatggcgcatatgcagaactcccctggagtcatggctctagaaagtgtccaggcccatcgtgacaatggtgccaagcaccgggctggtgaccagtgcctaaacacacacgctcccttaatccttacggcaagcctgtgaggcggataggaccagccctgatctatagtgagaaaattaaggttcagagggagaaggtccaaatagtggccaagctgggactgagatctcgagtttgggtttgtttgggttttgttgttgttgttctttccctcgtgtccatgacttttctctgccattagcagggaagtgtgcggagggcttccagggaatcaagtgaccctccctctgaatttcggtgcctcttccccccgccccttgctcacacatttcagtaggtcacaggccaaatggcagcccaaaaggtgggcagagatttttttttcttcccctcacccctgcttattaacacaattgtgacaactactttaccttacatcccagggcaaacggacagcttgcggtacctccaaaaatttggaaaaccctgagtctaagaccacctcttgataaaagaggcctttgctcacattttctgctcggaatctttctttgccattggtgggtgtatgtcgtcccagctgagactgcgggagagctgagctccagcttaaaccgcttttaatggcccttccctactgggggatcgctggagcccatgccaggttacggtagtcattttaaacctctgccacaaggccacgccatagaatcaatttccaagtcaatgttcttggccctaaaatgtttgcgcccactgaggatttcattaccaggtggaagatgggggaacatatgccacgttaaagagcaagtgctgagtgtgccaggacttgagaaggaccttaggctgaggagtggacagtctggtatttatttcgcctctcccaagtacccagcacagagtgggaaaaagaagaaactgctcctgccttccagtagctggcaacttgacatcaagaacaaaaacattcgtagctggacccccgtcctttcatcgtgcccaagtcttacatgttggcttaagctgcccccttggaggccgtacctttctctttggactgtgacagtggacacctaacagcctgagccatgtgtggctgtcttatcccccaagggttgtccaggcccgttctgcagggctgttgtgtagactgcagacatccatacctcaccacagaccaaagatgacctcgtgtcagactgtgggctgatgagaggtagagcagcatgcatcgaggcctgagggtgcagggcgccctctcttggcctggaggaattgctcctaactagagtaagtttccacgagggtcccaggcagagctgcagagctggaaccggaggctccacagtccttgcctgctcatggacctccttcagagcacctttctacagactggactgcccagctccgtggggtggcatctggtttctggtgctattctgccaagttatcgagctcctcctcatgtttcaacattccatcttcccgtttctatcctcgactccaaagtaagccttcttagctccaatcagggatgaggggctcaacctcttctgtcctcaaagaggccaaacgcagtgccacagtcggtagccttcacttttagatgtcctattcatgtaaaaaagaaggtgcccccaccaggcttacatcagcaataagcaattctaatgcaacgatggtgtccacattttaccccagtgtgtgcccatgtatgcctttgtgcccgtgtaattattgttagcgcccctttcacttagaggggtgatgataaactgtggccaccttgattacaacccacatttcctgctttggggagcttccaagtaacaggccatttcttacctccctccaggaacagtgggcactgcccaccacctcgtgtctgctcataggatgacgctggagatccccacacttactctaccctcttggcaaattggcattccggtggtggtttttgtttcctttaacacattaaataaatgagtatataggatgtgaggggaggggtgagaacaactagctgtagcatgtgtaggctatatactttaccattcgacttctttcctttttttttttaaaataaaaaaagtgcttgactggtttcaagcttcatcatgaagatgcagtgtctatggattttatttggcaggagaaagggtacatagctttgtggcctgggatcttcgggatcaaggaacagaaacctatgccagctatgtttgggaactgtggagaaataggggcgacccctctctgggccatagtgcaccttcattctcttaactacaatgtccacaaaccaagggaaagcttcctttatgtccaaaggatggtgaacctcttgccggcattgcctcctgatggtcaagagtgtgctatggaggtccaggcccagtggctcacacctgtaatcccagcactttgggaggccgaggcgggccgatcacctgaggtcaggagttcgagaccagcctggccaatatggcgaaaccccatctctactaaaaatacaaaaattcgccgggcgtggtgtcgggcgcctgtaaccccagctacttgggaggctgaggcaggagaattgtttgaacccgggaggcggaggttgcagtgagtcgacatcacgtcactgcgctccagcctgggtgacagagtgagactcggtctcaaaaaaaaaaaaaaaaacattgtgcggtgggggtttggggtgggaaatgcagccacatttgggccgcagagactgcccaagccatctgctcctgggaggtggagcacactgcctaacgttttactactttcccaaaggcagtgcccaagcaaaatcaaccccagtgtggagcctccttgttcccaggtgactaacaggacaccaccaccccaccttcctaaggagagaagaaaaccagcagagtccccgaacaaaagaacttggagggaagggatatacatgcaatattcatgcttctttagaggaaacaatataacaaccttcttgcagaccttgcttaggaataatggtcattaatatattaatctgtgtccccattagaaggagaaaaacagaaggtgtggtggctcacccgtaatcccagcactttgggaggccaaggcaggaggatctgttgaacccaagagtttgagaccaggctgggcaacatagcaagacctttcctctactcaaagtttaaaaaaaaaaaaaaagtagccaggtgtggtggtgcacacctacaggcccagctacttgggaggctgaagtgggaggattgcttgagcccaggagttcaaggctgcagtgagctgtgatcgcaccactatgctccagcctggatgacagagcaagactgtgtcgcaaaaaaaaaaaaaaaggaaggaaaaagtcatgcggtgttctgggcccccataggagcaggttcacccaagttcttgcaaaccaagagtgcttaatcataacaggactggcaatggtatgggctttgcggctggggctggaggggcatccgcctcatgggatgggacggcaatgggaccatgatcagggaccaaacctggctttctctttgcagtctacttgccctctcactacatttctgtcccgtgaccttccttcaggtctcacctggaagtgtcacactcgccattccctatcatattgttttttgttttgttttgttttttgagacagagtttcactcttgtcacccaggctggagtgcaatggcgcaatcttggctcactgcaacctccacctcccaggctcgagcgattcttgtacctcagcctcctgagtagctgggattacaggtgtgtactgccagctaacttttgtattttttatggagacagggtttcaccatgttggccaggctggtctcgaactcctgacctcaggtgatccgcccgccttggcctcccaaagtgctgggattacaggcatgagccaccgtgcccagccccgtcatactgttttaaccacgccaaacatgatccagctgcctcaccttctcatacctgcaaacactccctcatctaaggtgagtttctgagtccaagattaccatcacgggggcacgcttctccaagtccttggtcttcaatgtccattccttctctcattcagtattatttgggccacatgagattcttcggcgtcttgcaactcacgcttcctaatcaatggctctcaaattttaatgaccttaatgattcaccagggagcttgtcgaaagacagattcctcagcttcactccctaaaagtcaaactcagcaggaatcagcatcctgagaaatccattctgaggaaataatccgcatgctccaccctgagaaatggccgggctttgcaccttacctggtatagtctacatgttcaaaaattatattctgtgctattattattattaccatttatttttatttttatttttttggacaagagtctcgctctgtcgcccaagctggagcgcagcgatgcagtcatggctcactgcagcctctgcctcctgggttcaagcgattctcctgcctcagcctcctgagtagctgggattacaggcgtgggccaccatgccaagctaatttttgtatttttagtagagacagggtttcaccatgttggccaggctggtcatgaactctggtcctcaagtgatccacccaccttggcctcccaaagtgctgggattgcaggcgtgagccaccgcgcccagccaggatctaacttttactgagtacatgctaatagttgagaagtttatagatgttatctcttttaatcttcactacagttcttacagataggaaatattacatccattttatgggtgaggaaattaacagtctgagagattaatttacccatggccacagctagtaagaggatgaacttgggcatctgagccccttaccataagttcccgaatctataatcttcccacttagcatttcccaaaatgtttttcagaacaaatgtcgataggaatttggaaataagtgttctgaaggtacattagtttgagaactgctgtttaaagtctattgcaggacttcttatgtaagcataatcagcctcttacatactagtgtgcaatgtgaatgtctgagagggggtttacttacactgggtttctcaaatgtatttgactgtgataccattcacagagcatctatcaggggcaacgtttcatgtaataaactctggaaaatgtccaattttaaatttcagctctgccttgcattctacctgaaccataatgcctgtctaaccttagccacatccttcacccaaattctgtttgtaactcactgcaacagagagctgctcactgacttcaagctttcctacttgctattgctctaccttggagttgtctgtaaggattttcccatacaaattgagcatcccaaaatataaagacccaaaattgaaatactccaaaatctgaagcaatggcatgacattcaaaggaaatcctcaatgaagcactcagattacagattttttgattaggagagctcaaccggtgtgtattctgcaagtattccaaaatatgaaaaaaaattgatacccacaacacttctggtcctaagcattttggataagggaaacacaacccgcagtgagattgccacatataggaaacttcagaaaacagccaccaggcagggaatttttctatctcctaaacacgttttcctttagagacttgtaaattaatggcagtgtacagaacatacatattttattaataaggcccaggttcatcccctcttaagatccaggaggctggccgggcacagtggcttacgcctgtaatcccagcactttgggaggccgaggcgggcggatcacgaggtcaggagatccagaccatcctggctaacacagtgaaaccctgtctctactaaaaatacaaaaaattagccgggcgtggtggcgggtgcctgtagtcccatctacttgagaggctgaggcaggagaattgcttgaacccggaaggcggagcttgcagtgagccgagatcgcgccactgcactccagcctgggtgacagagcaagactccatctcaaaaaaaaaaaaaaaaaaaaaagaataacaaagatccaggaggcccagatcctacaataaactatgtcctcattcccttccagctgcgtgaaacttggcctccaatacttctacagtatagtacagaatagtgaacttcagttttcattgcatacccctcaataaaaatgttaatatgtgaccaggtgcagtggctcatgcctgtaatcccagtactttgggaggctgaggtgatcggatcacttgaggtgagaagttcgtgactagcctgaccaacatggtgaaacctcatctctactaaaaatacaaaaaaacttagctgggcatggtggcacgtgcctgtagtcccagctactcaggaggctgagtcaggagaatcatttgaaccgggaaggtggaggttgcagtgagctgagatagcaccactgcactccagcctggacaacagagcaagactccatctcaaaaaaaaaaaaaaatatatatatatatatatatatatacacacacacacacatacatatatatacgtatatgtatatatgtatatatatgtgtgtatctatacatgttaacatgtacaaaatacatggattaataaataaatgtcatgtacaatattgttacgtgggaaactcttacatacacccatgcttggtttgttcccttccatgtgaatggagctgcaatcacagtaaggctccagctctctctctccctgggaaagagtgactgatatttaggggagcaggaagcaggtatgcacagctcagcctctctcctactagggatcagatggcccagggacgcatattccactgggcccctagctgtgggaggaggcctgtgcctgggtcagtgagcgtgtcttaattcttggattcgagcttgagacaccatgactgccaggcaccacacctaagccagattctcccacggccctctcaagaataaagctaacattttgttctctatctctcggatcccactctctcagttaattctgaactcaggggaggagaacagggagctatttattaggattcttaaaaactgtctactgaggatggaagtggtggctaacacctgtaatcccaacacttcgggaggccaaggcaggagaatcatttgaggccagtagtttaaaatcagcctaggcggctgggtgcggtggctcacacctgtaatcccagcactttgggaggccgaggcagacggatcatgaggtcaggagttcgagaccagcctggccaatatagtgaaaccccgtctctactaaaaatgcaaaaattagccaggcatggtggcacacgcctgtagtcccagctactcgggaggctgaggtgaggcagaggttgcagtgagctgagaccacgccattgtactccagcctgagtgacagagtgagagagtgagactccatctcaaaaaaaaaaaaatcagcctactaggcaacgtagcgagatcccatgtctataaaaattacaaaaattagccagttacagctgggcgtggtggctcacgcctataatcccagcactttgggaaaccgaagtgggtggatcacttgaagtcaggagttcgagaccagcctggccaacatggtgaaaccccatctttactaaaagtacaaaaagtagctgggcatggtgccacatgcttgtaatcccagctactcgggcggctgaggcagcagaattgcttgaacctgggaggcagaggttgcactgagccaagattatgccactgcactccagcctgggtgacagagtaagactccatctcaaaaaaaaaaaaaacccagttacagtggtatgcacctgtagttccagatactcaggaagctgagacaggagggtcccttgagcccaggagactgacactacagtgagttataatcataccactgtactccagtctggttgacagtgagaccctgcctctaaaataaataaactgtctattggctactggttaggccaattttagttgatttgttatgtattgtaataaaatacatatgcaaaattgagcgtgcctgaaggatatgctaaaaaatacacaatgaaaagagcaatggttcagtgtgccccagtggcttgtcttatatacccgctgggattcatggaatccactttgtagaccactgacaaaggaacaattctgggctttagggttagacctgggtttgagttctggctctgacatgcattttacctttcgaaaacgatgtcctcatttataaaatagggacaatagtgcctttctcacagaatcgttgtgaagattaatggaaataatgtatacttagcacatagtaggcccttctaatagcgcataataatttttattgtttctatgaagagtagaatcttcagattaacaatcttcaggccaggcgcggtggttcatgcctgtaatcccaacactttgggaggccgtggcgggcggatcacctgaggtcaggagttcgagaccagcgtggccaacatggtgaaaccttgtctctactaaaaatacaaaaatcagccaggcttggtggtggcaggcgcctgtaatcccagctactcaggaggctgaggcaggagaatcgcttgaacccaggacgcagaggttgcagtgagccaagatcgtgccacttcacaccagcttgggcgacagagtgagactctgtcgcaaaaaaaaaaaaaaaaatcttgagacattttcattgcctagtacaggagttggcaaactttttcttaaagggtcaga

SEQ ID NO: 2713 - DNA, 3221 bp, Homo sapiens
aagccgcccatcccgccccaagtggaggaagagtattacaccatcgccgaattccagacaaccatcccagacggcatcagcttccaggcaggcctgaaggtcgaggtgatcgagaaaaacttgagtggctggtggtacattcagattgaagataaggaagggtgggccccggccaccttcattgacaagtacaagaagacgagcaacgcgtcgagacccaactttctggctcccctgccccacgaggtgacccagctccggctgggggaagcagcagcgctggagaacaacacgggcagcgaagccacgggcccctcccggcccctgcctgacgcaccgcatggtgtcatggactcggggttgccatggtctaaagactggaagggcagtaaggatgtcctgaggaaggcatcttcagacatgtctgcgtcagcaggctacgaggagatctcagaccccgacatggaggagaagcccagcctccctccgcggaaagaatccatcatcaagtcggagggggagctgctggagcgggagcgggagcggcagaggacggagcagctccggggccccactcccaagcctccgggcgtgattttgccgatgatgccagccaaacacatccctccagcccgggacagcaggaggccagagcccaaacctgacaaaagcagactgttccagctgaaaaatgacatggggctggagtgtggccacaaggtcttggccaaggaagtgaagaagcccaacctccggcccatctccaaatccaaaactgacctgccagaggagaagccagatgccactccccagaatcccttcttgaagtccagacctcaggttaggccaaaaccagctccttcccccaaaacggagccacctcagggcgaagaccaagtcgacatctgcaacctcaggagtaagctcaggcctgccaagtcccaagacaagtccttgttggatggggagggcccccaggcagtagggggccaagacgtggccttcagccgaagcttcctcccaggagaggggcctggccgcgcccaggacaggacgggcaaacaggatggtctcagcccaaaagagatttcctgcagagcccctccgaggccagccaagaccacagatcctgtgtctaagagcgtgcctgttcctctccaagaggctccccagcagagacctgtggtcccaccccgcagaccacctcccccaaagaaaacctcttcgtcatccaggccgctcccagaggtcagaggtccacagtgtgaaggccacgaaagcagggcagctcccaccccaggccgtgctctcctcgtccctccaaaagccaaaccttttctctccaactctttggggggccaggatgacacgcgaggcaaaggcagcctggggccatgggggaccggcaagattggagaaaacagggagaaagcagctgcagcctctgtccccaatgccgacggcctgaaggactctttgtatgtggccgtggccgactttgaaggagacaaagacaccagcagcttccaggaagggacagtgtttgaagtccgggagaagaacagcagtggctggtggttctgccaggtcctgagcggagccccttcctgggaagggtggattccttccaactatctcagaaagaagccgtagccgactccctttctgcctagagggcccgctggtccttgctggctttacccacgtatttaatacgcctcttaatttatcattctccacgcagcttccaaggcagacagactctggggtactgtgacttcttgcctcccatgggtggagagtgagtttcggacacctcgggcgcccctgggcctgatccctcctatcacagcatcactggaggctcagaacccacagcctttgctttctgtccatgtcagcatccctgccttaagagaactcctcctggccaatggcattgccacccagcagtgggaccaagactctccaagacctccaggactggatcccattgcctggagaaactccagcaagggtctctcatggcttggacatggcacagtaaggggcagccaacccagtccatgatgacttttgctccaacttcttcatgtttctaaaagcccagtggctttattcactcctcctaaattgcctgctaccagaaggaacttcatcctgaagaaatgcattccattaccagttccagggaaagtgtccccttccccaaagcctcaggcccgtgggcctctgaggttccactggatgcggctcccccaggagtgggcctggagatccgctcagccgccctgcctcccaccttctatcttgggaccgtggtcagccctgaagggtggttccagccccgcgtatgctgcgctttgctgctgcaggctccggtccctccagggcttttcaatgagagttcccaccccaacttggagcatttcatttttgcctacctaaagcaagaatctcaaagtttgtttgaataagaggcccattcacaagtcgtgcccttgtgagcacccctttgctgagtgcctcgtgggtgccaaacactgtacttggcgctttgcattcatgctttgaccctcacaacctccctttatagatgaggaaattcacgctccatgtgcccaaggacacaccagccaggaggaagagggaagaggatttgagtccaggcctgcctgacttcagtgcctgtgccctcccctctgtaaaagacaaaccaggcagggaagagatagaagctggctaagtggtggccaagtggcttcattgtgaggggggtgagggggcattcgtggctgctcccacacccaccatccctccagcccacagcagcctataccaaaggctgccccggactcaacagctgcgtctccatgacaggagaatgccagggtcctggtggttggcacagagccctgttccctcttctaagctgttgccccctggggaatagagcttatggagcaacgggagctgaggtggcctcgagggccagcctggagggctctgagcatagcatgcagcggtcccatagggaggcaggtaaccaagggccaggcagagctgcttcctgtgcctctccggcatttgtaatgtttttttcttttttcacgcactgccaaatctgttttctcccttgaagaaacccagggcagatgtggtcatctgtcaaactgaggtctggagaggcatgactaaatcactgcagaagcaaaatcagg

SEQ ID NO: 2714 - protein, 434 aa, Homo sapiens
MDSGLPWSKDWKGSKDVLRKASSDMSASAGYEEISDPDMEEKPSLPPRKESIIKSEGELLERERERQRTEQLRGPTPKPPGVILPMMPAKHIPPARDSRRPEPKPDKSRLFQLKNDMGLECGHKVLAKEVKKPNLRPISKSKTDLPEEKPDATPQNPFLKSRPQVRPKPAPSPKTEPPQGEDQVDICNLRSKLRPAKSQDKSLLDGEGPQAVGGQDVAFSRSFLPGEGPGRAQDRTGKQDGLSPKEISCRAPPRPAKTTDPVSKSVPVPLQEAPQQRPVVPPRRPPPPKKTSSSSRPLPEVRGPQCEGHESRAAPTPGRALLVPPKAKPFLSNSLGGQDDTRGKGSLGPWGTGKIGENREKAAAASVPNADGLKDSLYVAVADFEGDKDTSSFQEGTVFEVREKNSSGWWFCQVLSGAPSWEGWIPSNYLRKKP

SEQ ID NO: 2715 - DNA, 122602 bp, Mus musculus
  misc_feature (1)...(122602): n = A, C, G or T/U
gccagtttgatggaggcagttcttctactgaggttcccttattccagatgagcatcgtttatgtgtgcatgtgtttgtgtatgtgtgtgcatatgtatggatgtgtaggcgtgtttatgtgatggctgcatgtgcatgtgtgtggggtgtgtgggtgtttgtatgtgtatgtttgtgtgtgtgtgtgtgcgcgcgcgtgcatgtgtgagtgagtgtgcacacaagtcagtgcagttgtagaggtcagaggacaacttgcaggaggtggttctctcctcccaccatgttgtttccagcgattgacctcaggtcaccaatcttggcagcaagtgcttttacacattgaatcatctcaacagccctgttgataatcattattcctttgtgagagccactgataattttacagatagggttgtgaatctttgatgggagtttgatgatttcaggattcttggagtgggtgactgagcagttatcatctcttggaggcattgccttggctctttggtgtttctatgttgtgctttgtgctctgttgctttgggactctccctcagtctttctggttgcctcagtaaacagccttcttttaggggcccaatctccagtagcattcagagagagaagaacaaattaacagcaataacacccaaactaactaggtaacagaaatgcatgcaattgtagtcaattgaagccaatagatggtcataggtcagaaaatggcaaaaagagtggagtgtatgctatagacacactcattcacactcacatacacatttatccaagagtaaaatatagaaaaataccataaaataatacaaataaggaaagaaagaaaattgaaagggggtgaaaaaatctaattaaagatttaaaaagcagctgggcggtggtggcacacgcctttaatcccagcacttgggaggcagagacgggcagatttctgagttcgaggccagcctggtctacaaaatgagttccaggacagccagggctacacagagaaaccttgtcttgaacccccccccccaaaaaaaaaagatttaaaaagcagatgagaaagaagaggggctggagagtcagcttggctgctcttacggaagacttgggtttgtttccagcacccaccatgcttacaagcatctgtagctccatttcctgaggttatggcgccctcttctggcctttgggggcactccacacactataggcacattcagggaaacactcatacacataaaatacataaatctttaaaaaatatatatcataaaaaagaaatggagaaaatgattcagtcaaagattttaaaaagtgataggaggattaaaaattaaacattaaggggctgaagagatggctcagcggttaagagcactgactgctcttcctaagatcctgggttcaaatcccagcaacaacatggtggctcacaaccatctgtaaccaatctgatgccctcttctggtgcgtctgaaggcagctacagtgtacttagatataataataatatgtaaatcttaaaaaatattaaacattaaaaggtgaggaaatgaagtgagctgttaaaaaaaaaaagtgtaattattcaaccgaacaggtatggcattttaaaagtttacttaagtggacaaaaatcgtaccagtttcattaaagatatcagttgtgtcagtagaggtgaaagttaacagccaactgagcatcattatctctgtgacctggcagtttcctttggagaggccacagggcacccactgtttaccttttcctccctgtgtccctaggctagcaaccagagggagtggtttgtgggcacagccagtttcactcttggctgccttgctccaggatgggctggggtggtacacaggttctattgcactcatttaccaggagattagtttgtctgcacactaccaaggcagcattagtattggaggttctgacttagatctaagtctccagtgccttccaagagggctgctgtggggccagtgggaccctgtggggctaagctcaagggggagtaaggcaaggggaagtaagggtaccctgagtcctcccacctcagcaccagctcacacccttgcacctgctggctctcctcttacacttttgctaatcccctttgtatctcaaaagcagtttccaactacatggagctctgagtattttgactcggtctactcacccttttataaccaacatttggagggccagctatgactctggctacagttccaagagacaggggaatgctgtgactttgaacttaaagatggctcctggacactgcatttgggctacatactggcaggaacgaacttccctagggtcacgtgctgtgcagattccagggcccttgtcttttcataagacttttgctgttttctgtttctcctttcttttgcctccacccatggcagtgtgcctgttgcagggccattctcttatcaaagtttcttgaatttttctcaggtctgttttttgcaactaaacaatacttacttatcttctcatctatccaaatctgtctgtctgtctgtctgtctgtctgtgatagctctggctgtcctggaacttgtttgatagacagggttggcctgtacttgcatgtctctgcctcctatgtgctgtgactaacactgtgcactaccacacctactggttaaatcattcttgctttccctccaactctgtatttttctggaaagaatttcatcctatttttttcttacatcaagtacattaagacaaacctattacatatttttgtttgaaagtatttttattactatgatgttctacttccttcctaagtgttgctataattctaccttatatgattatagacttttaaaatttatttattattattatttttttattttttttatttttatttttttttttggtttttcaagacagggtttctctgtgtagctctggctgtcctggaactcactccatagaccaggctggcctcgaacacagaaatccacccgcctctgcctcccaagtgctgggattaaaggcgtgtgccaccactgccaggctacaatcataggctttaagagaacctcctnnnnnnnnnnnnnnnnnnnnnnnnnnnnnnnnnnnnnnnnnnnnnnnnnnnnnnnnnnnnnnnnnnnnnnnnnnnnnnnnnnnnnnnnnnnnnnnnnnnnnnnnnnnnnnnnnnnnnnnnnnnnnnnnnnnnnnnnnnnnnnnnnnnnnnnnnnnnnnnnnnnnnnnnnnnnnnnnnnnnnnnnnnnnnnnnnnnnnnnnnnnnnnnnnnnnnnnnnnnnnnnnnnnnnnnnnnnnnnnnnnnnnnnnnnnnnnnnnnnnnnnnnnaaaaaaaaaaaaaaaaatcatttgaataccatttctgcacatgaatatcacttgctgctgctgctaggatttgcgttatttttatttttctgtcagttctgagaaaacctgttcatacaagagtgtaacttgtctcacagccatattatgacaccttttggaattccaaatcatgtcaaaaattacacagtgggaccggtcctgcatttgccatgtgggtgtcctggtcgtgtggctcctggaggaggacttgagctctcctcctcccaaggggctgtggctcctgaactcctggttatcagggagctgtggtccaactactgtgacttcctgggcatttccccctcaactctttcttccttggcttcgtcttctgtgcgggcagctttatcttagccaattgtttgagaatgcagatcaacacagagcaaggcggacttctggcctgggctgatttttttttttttttttttttttttttttttgccagcattatcctgaaccttttagtgaactgtattggctgaactggtccgatttacttagttgtggagtggtgccaggtagatgtgctcactctttgacatgctctagataagagttcttgagagggcagcttgtttgacatgtagattcttcagctctgtgcttaattataactctcactgggtcctcaggtgccagtccagagaactaagaccagctttgaagagcgcatttgttaatacaaaatctgctttccttttttttttctttttttaaaattttttatttctaatctgctttcctttaggagtaaccttttcctttccaaactaaaagcttctaccacatcttagaacaagaaacaaacatagcaacctaccagcaaaattactatttttgccttttttcatttaatttttaaatttcatgtgtataggtgatgtggctgcatgtatgtctgtgcacctgaagaatttgaattgcaattataattggtcatgtgggtgctggggattgagcccgggtcatctggaaaaacagccagagctcttaactgctgagcagtctcagcagccctgcggtcagtcctccgggatgggattgtgctgtggtgccttggctggtgtcaggctccggggctcatgcagtcttcctgcctgttttctacacagctggaactcttggaacgtgggcctgccatatccaggtactcttagtaagtctctttcagtctcagttctgtcctcctctgatgtggctgacaacaaaaactagaaaccatttgactggtggaaggatgggtattttcttttcttcttgtgttcttttttgttttgttttgattttgatttttcgagacagggttttttttttttttttttttatgtagccctggctgtcctgaaactcactctgtagaccagctggcctcaaactcagaaatctgcctctgcctcccaagtgctgggatcaaaggcgtgcgccaccactgcctggcttcttttcgatcctttttgagatagggatctcactatgttgcttaggctggcatggaacttctgcctcagcctccaaggtaactaagtgtaggtatgtgctaccacactgacctaaaaggctttaaaaactgtaggtattagggaaacccatttattttatttacccattttattttatttaagcatgtatatataacacatacagaacggataaataaaaatatacaaaaaagagaaagacataaattgtatcaagactttgtgttagattgtaagtgatctcatggagttgactgtttagatgagctggctcccatgacccccagctatctgcactatgtgacatctacttcataacagtctggaaagaacaaacatgacctcataaagtctctgagggtcaggaatccaagagtagcaagctctgttctctgttgaaaaaatacaaagcgtagctgggaagctggtgacatactgaggtgcactgaacagatcacttcagctgggggtggtggtgctgatattgaccctcactcacaaaggccacagagacccacatcactgcaaaccgtaagacatctttttttttattgatccaacacgttgaggacccccttcagcacacaggcaagaggagagaccccaaacaaacaaagaacacactttttataccttgtaaggggcagatttaggcaacagggatagctggcttattctaattggtgtagcaagtaaccctttcagacattggttggtttgcatagggtttgcatacctttggcttagtcccttactctgcctgcccttatgttttttgtttttttgttttgttttttttttcagcattgtttagttggccagcttccttatctggctctgcacttggcctgctagtatagtttggaaagtcccttcagagggggaaggggctgagtggtctttaatttattttgtatactacatcacacacagaggaagagaatgaacacacatcattcagacaggcaggcaggcagacagacaccccagcccttcatacacacacagagtggggtggaatgaacgctgtgaggcagtctgtagtacatttgctgcttgggtcaccaaagcaataggaaagaaggtacaacagaggcaggaccaggagccccttcattttgccacacctgtgatctctgctcatgaagttaagcacagtctgcatgctccagcatctcaaaggacggcaaggtgtgtgggcttggagccaactgctaacaggcacacatataggttactgcagataaatgaatacatctgactatgtgtggtatgcacctcctggcatggtcatctgaggtccacactccgatgtctagcgagacctcatcatcatgttgagggtcattggtccacacctcttcactgtcagcacgccttgtaaaccttggcccagagctgtctgaagctctggacagaaactgccttatgactttcttcggcctttgtctatgatcagatctgatcaccagctagcaccaagcctgaagcaataagaatccctgcacacccgggttctttctaagaggtcagagcaaggaggtcagccttggctcagcttatgtaagtcttctgtcataaacatgctttttaaaaatctctttgagcgtttggaatccaagccaataattttagttttctttttcttttcatgaggcatatgattttaattaaaggacggaaactgtgagcttttttgatgccaggggttgcaaactcagatatccccagggatttagcattcaaatgagaagcatgcagattgctatggtgtgaatgtggcaccaaagctttggttgaaacgagtccccattgtgagggttaggtcattttactctcatcagtcatttaaccccttcatagattaatgggctaataagggagttgcatggctatggagtgagctttctctggttagcttgctatagcatcttgccatgtgatgaccactgcctgcaatgacctagggaaggcactgacaagcagatgctggcaccttgctcttaccatgaactaaaccagtttcctttttctttctttccccccttagacagagtttctctgtgtagcctcggctatcttgaaactcacttgaattcatagagcttggcctacttctgtctaggaacgtgctaggattaaagggtgcactgacactgcccagctttagtttctttacacgtcatctattctcacatattcaatacagcagcaaaaaaaaaatggactgagttcaaggagtaatgggaatggtggaagcttacttatatagagacactttctgaaaggaaggtagaggatgctgagccactgagtactgtcatcatatagatctaaaagtcagagaaattaaaacatgggttttaaatgtaaagttaagattttttgtttgtttgtttgttttttcgagacagggtttctctgtgcagtcctggctgtcctggaactccctctgtagaccaggctggcctcaaactcagaaatctgcctgcctctgcctcaaaagtgctgggagtaaaggcgtgcgataccactacccggccttaaggtttattttttaactctgtgtgtgttgaggtatgtgcacaggtatgcctgcggagactaccagagagcatcagttcttccagaactggagttccaggcagctgtgagcttcctagtgtgggtactgggaattgaactcaggtctccaggagcactcttagccattgagtccatctctttagtcctccaaaagtgtgaaacttctaactgattaattttggcagtgctatgggttgaacccaggaccttcaggttatggatatgccagagggttttttttttgtgtgtgtgtgtgttgtttgttttgttttgttttttggtgacacggtttctctctggttaactgccctggctgtcctagaactccttttgcagatcaggttggccttcaattcacagagctccacttgcctctgcctcctgagtgcaaggattaaaggcgtgtactaccacactcaacatgtgaagatttttaaaacaaggaatgtggtagtctaggctagacaaacacatgggaggttcatactcatcctgtggcccctacatgctatagtgtatgaaaggtcctggcattttcaaggtcttggctgcattggtgaagcctaatagactagtctttcagtatccatagaacttcccacactcgatatgggcttggacttgctttgactgatgcggcagtcagaccttgataagcatctgctgatggctcttgcccttttttgagccaccctccagaagcttgggaggccccatgtgtaacctcagctgatatatatatcacattggtccagatgagcttgcttaatttacgtaattgtataagataataagccattgttattctaagccaccacgccttggaatggatggttatgtcacaataggtaactgaaacaaaggtcatttaacctaacctcctcattacacttctgactgtcccaagtccagaaagggaagagagtttggggaaaaccagacagcaaggtattggcagtaactccaattctgggcttttcccagttgcttttctttcaatctcttggtgaaagccactagataaagattcaaagtctatctgcaggggatttacactgtgatgtggatgtatacagattactgtaatgccttgctccctgggaatcgttagagtactaagtcatcctctttacaggggcaaagaattgaaacaaacttgagaagcaggcaagcaggcactgctactgtgaagtgggctgggtacaatgagccaggcccttgagacactttataacagctctgactgccaggtctcctgtaaacataaacaacttaacagtccgtcaacattagacaaggccattctgtggccttagcttatggatcaagacaaaaacaagaccaccccataatcatttgtgaacacagataaaacatggacattgtccaagtccctgaaacacagctacaagactaaacacttgaatctggctaacaggagaggctgtcaacaattactggattagttttaatctaatataacttcccatagataaggctgaggtgcccagtcttatacccccacttcccggcagtatctgctccaaagccccttcaaatccttttctacattacctaaggtctcttactgagacgtccctgcttcatcatggtgtatgttcatttctacttcagctaggaaaaaacccaccttgttcaactatcagcgtgttcctgggggcttttggttcgagggtattgacagacttggaagtcacaaggagttagaggttctctgaagtctctagatgcgtttcttcatatcatttctaactcttagtcaatgtctgctgtcttcccactagaattaagctgaataagaacagaggtctctccggtcattcccagtgcttagggcagtactagtagaaactgaatgcttaaaaataagtgtcttcggccgggcggtggtggcgcacgcctttgaggaggtggaggcaggcagatttctgagttcgaggacagcctggtctacaaagtgagttccaggacagccaggtatacagagaaaccctgtctcggaaaaaaaaaaaagtgtcttcaaaatgtatagcttctttctcatggctcagctcctcccagtcagtgtggcagatctccacacaccgctttcccagctcagtctccaaactcttagatgcccatcttcctttaattgtgtcttcgacctcgcgggccccctcccacacttcctagtgcaacctgggacccacctgtctccaccatctgtccctaccaaatgcaacacacacggaacggcagcgctgcagcctagacgactagtgggcaccgcagacacccactgcgcatgtgcggagatcgctcgctcgcactgcaaagatctccgacaagtgaggagttgcctcggagtttccgtccaggtccgtgcggctacgggctgccaggaagtcaggaacgaccaaccggaagaagacctcgcgcgcgaggatttctgggacaagtagtcgcggcgctcgcgaggccctatcgcgagcaagccctagatactccagctctgcacgtccggcactcacagccctgcgctcccctaggtgctctctccggtggcagaagccggcagattggaccaagcggcttcttgctcccacaaagctgcgcgagccgccgcggctgccgggagttgtagtcttcgctgtgcgtcctgcgtcggccgagggtgagggcnnnnnnnnnnnnnnnnnnnnnnnnnnnnnnnnnnnnnnnnnnnnnnnnnnnnnnnnnnnnnnnnnnnnnnnnnnnnnnnnnnnnnnnnnnnnnnnnnnnnnnnnnnnnnnnnnnnnnnnnnnnnnnnnnnnnnnnnnnnnnnnnnnnnnnnnnnnnnnnnnnnnnnnnnnnnnnnnnnnnnnnnnnnnnnnnnnnnnnnnnnnnnnnnnnnnnnnnnnnnnnnnnnnnnnnnnnnnnnnnnnnnnnnnnnnnnnnnnnnnnnnnnnnnnnnnnnnnnnnnnnnnnnnnnnnnnnnnnnnnnnnnnnnnnnnnnnnnnnnnnnnnnnnnnnnnnnnnnnnnnnnnnnnnnnnnnnnnnnnnnnnnnnnnnnnnnnnnnnnnnnnnnnnnnnnnnnnnnnnnnnnnnnnnnnnnnnncctgccggagccactgctcactcttgccttgccatcacactctgtttttagaaggggatttctttttcccttccctggattcctctggccgggcctgcatcgcgcctcccagcctcgctcaagctgagggtgatggtggtggaagggagtccgagaccagttggagccgcttcggcctccataacctaggcgcggggggtggggtggggtggggtggggtgggtggtagggggtgggtctcagcaccctcgccccaagctaccgctgtatggatgccaggatagccccattggactgggatgttgggggtgcctacgagtctgaggctgttccggataaggggcctattttccgggcccctgcggtgtcaggcttcttggacaaagggtttcctaccctgccgtgaaggatgtttgtatagcaaggccctaggtactcttgaattccatcccccaggaaagggaaaccataacttttatcatttgggaaatgagaggggagggagaagaggtcgcgctcatcactgccaccctctcttattttaataataaaaaatgggaggggggtttcttggcccacggataagcagcgatccctgtactgttaggaaccattggtagccagcctggtcaggtctccccggacacccctaacccgtttctgacctcagacttggtgctagaaaggtttttggaaacaggactctgagtctgggaaagtgaaggatttgctcattggcggaagaaataaagtatggctgactggtattacctgccagtttgaacgtgagggaaatcaaactgggcccaggagagttggggaggaaatcagcctctgcaaatgaacatacaaagggcttcttcctgtgaaaaccttgatagttttctttgtatctctactgatatagtaacaactagtatctgctccacagtattaagaaaaggtgaaagatctgctgaacttagcaagatgttttcctcgtcagagtttctccagtgtgaatcgcttattgagtcagtgattccactgggtagggttggtgacatcagagccacttcccccatttaatgctataaataataaatggtgatactgaaagtctgttggatagcctcatggtttctgtggatgatgttatccagggagctgaggtacacgttttaaaatggaagtatagtagcataaaatacagagtctcatgtctgctggactctgcacaatgtgcagaactggattgttgaaaattaaacctggaagtttctggttggttgtatgtgttgaaaggaattctgtcactttatcttcaggttctgaggacttttttccattttcagaatcgaattgttggttataacagtttgggaaactttgatagttattttaacaaaatacctttttttttttttggtttttggtttttggagacaggatttctctgtgtagccctggctgtcctggaactcactctgtagaccaggctggccaccaactcagaaatccgcctgcctctgcctcccaagtgctgggattaaaggcgtgtgccaccactgcctggcgacaaaatatctttaaaaagttgttgtttaatagggaacaaaatagccatgaaaggagttacagagacaaagtttggagctaagacaaaaggatggactatccagagaccacccctcctggggatccatcccataatcagccaccaaacccagacactattgcatatgccagcaagattttgctgaagggatcctgttatagctgtctcgtatgaggctatgccagtgcctgacaaatacagaagtggatgctcacagtcatctataggatggaacacagggcccccagtggaggagctagagaaagtacccaaggagttgaaggggtctgcaaccctataggtagaacaacaatatgaactaagcagtacccccagagctcgtgtctctgctgcatatgtatcagaagatggcctagtcagccatcactgggaagagaggcccctaggtcttgcaaactttatgtgccccagtacaggggaatgccagggccaagaagtggtagtgggtgggtaggggagcagggcaggaggagggtatagggaactttccggatagcatttgaaatgtaaataaagaaaatatctaattaaaaaaaaagttgtttatgtattattgagaattcacacatgcaccacagtgggcatgtggaggaggtcagaggacaactttgtaaagtttctctcctgcttttacttaggttctgagacttgaactcattttgttaggcatgtatgttcaagtgcgtttggctgagccatcttaatgacctctattttggcaaagtgtcttcatacatgttccatcttcttaaagataaacagtgtatctgctttcatagtgaccagttcttcatactgaaacacaatgtcttctttttcaagagttagaagaaatacagtgtaactaaccccaggcgtggtcttctagcatatgactaaagaaatactctggtccacatttactggttttctaagcttataactaagaaagttttgttttgagtgccggggtgcacctcagtggcagagcacatgcttagttagcgtccgtaaaatcctgatgggtgtttagattttgtgtgatgatatttgccattaaattgaagtgatgtcacctagtgaagacataaaagggatttaatgtaggattcttagaaatgtaataataaaaaaaatgtgccaggcatggtggtacatgcttttaatcccagtactcaggaagcaaagacaggtgaatctctgtgaatttgaggtcagcctggtctacaaagtgagttccaggacagccagggctacacagcttgtcctaaaatacccaaacaaacaaacaacccccccccaaacaaccaaacaaaaaaccctgtctcaaaaaacctaaactaacaaaagttgtagtgcctagacctgcattgttagatctgatttactgtgtctatgcatatgcagtgttacttgagtcatttataaggtatgtagctacagtttttccaaattgttgatacctgcttttcattatgacaggtttcaattataatcaacataccctattgtgttatattttaaaatattcttttgaaaatgacttcatattggttgtggaatgttaatagtagagactacatctatttagtatagtatacactttgcttctgtccctagctatcctaggggatagtcggaggagaaagatggtgacagaacagtgaagtttcaaaacccagttgttacctttgtgactacttgaggcctggtctaccaaaggtgcttctgtcctggcattctgtttctaggactgaccttaacaggaaccttacatagattctctgtctccccactttgtcctttctctctgtcctttatgcctctctcttcttatcagtctcccatctccctctttttaatatattctctcttttctccagctccctgtcctcttgcagggtcttgtgtagcccaggatggcctggaactttgtagctgaggctggccttgaactcccaactctttttcctctaccttccaggtgctgggattatggatctgtactaccatcctcagcaaggtagtaaatgaactcttgaaacagacaatgaattatagttgctgatagtgaataatttaattgtcctctggctttcatggctttactggcctagtgctgaggcaactttatggacctgttttctaaacttccctgtaacaatcaacattattatgagtgagatagaagagcagtgatccattttggaaatattcagagcttaccaggctgtgtgtctggtttggtggatttcagtggaaagaatgcaaactgcgttatgcatcacattgagttgggagcaggagttgatgtacaggcattccttaggaagctgcagattgacagacaggtggctagttcttcccatgaaaagacagcaaaaagctgcaacagtttaaggacacagtccaaaaggcaaaggtgcctaaatactgagtttcattccctaggactcacatagaggaagaagagaagaaacctctggaaagtcacccccatccccgaaaataagcaaatacaattttacagaagtttaaggatgataattctgcctcatgaatatgaacaaaacttgcctagttacacttctactgagttattggctgttgaagcattccccactgtaagagaccttaagtgagtcacttcctttttgctttcagctcctaagtggatgaagtaataaagactaaatataagaaggtgcaatctaaatgctatttttagagctattgaagtatataggcaggctgcaaaactagggagaggaaagaaattgttcaggtaaattattgtttgtctttctcttttctttgtggttcagtttttttcccgctcccttcctgtctttggctttgtgaggcaggtaggattgtgtagtgagtctccagccgttgggtgtctgcactcacccctcactgctcaccacatgtgcagaaatggatgcgggtttcagatgaaataaaccacacgtgtttatagactctgacctagagagactgtggcccaaatagttaatctgcctgagaatttgccataggttgacgtccttcagacttgacaaggatggccctgactgctgcagtctgtcctttaagtagagagctagctcaggatattccctagtccacggacacagaatcctggacccatacacatgagtgtttgggtagtgctattggagcatctataaggactctgggatcctcggggggcggggggcacgacacgcatctccaggcctgctgactctgctttccatccctcttcagttctccctcctgctactttcttgccttctttgaacctgcctcgctgatctttcttcccactttcttttttgtgctccatcgagagttgggggaccatgttcctgcatactcttgtcagtactggtataaactgccttgagtacatttattgaaggctgctgtttactaaaggtttccatccatctattctacatatgctgataaacctctataagcccaagaaatataatggaagccaccctttgatgtcagtttgtgtggtaatggtggtggtggtggtagataacatcttgtttagtttcgtagcactacctctgtggaataatccttaaatgaatcctgacatttgaattatctggttgtacttagcatagtctgtgattatactgtagttacctgtttgtgttccccattagatgataagatcttcataggaggagatgagaccttcttcccttcctctggccacagctccttcacatacacagtgtgctcttgtaatatatgttcatttagtaatggactactttctgtatcttggctatctttatgtctgtgaaacttcatctgtttctttctttttaaattaactttatgtatgtatgtatgtatgtatgtatgtatgtatgtatgtatgtatttatttaatatatgagtactcagacacaccagaaaagggcatcggatcccattacagacggttgtgagccaccatgtggatactgggaattgaactcaggacctctagaagagcagtcagtgctcttaattgctgagccatctctcctgtgcacttcacctgtttctaatgctcataataatcttaacttttatggaaccttaacctcattgactgaattacccagaattgcatttgggtccaacaccagtgtcagaagctgcagccagtgatctttcaccgtgtgccaagtgtgtgctgctcaatggcttggctatctattaatttaatgttagggtgttttctccccccccctcttgtttttgtttttgtttttgtttttgagacacggtttctctgtgtagcccttgcctttctgggatttgctctgtagctggctaggctggccttgaactcacagaaatccatctgcctttgccttccactgatcactgggattaaagaccattgctgaggctttgtctttttaaaataccatcctttaaagattttctttcagtgagtttagcacaaaggtgtacgtagaagaaaaagactgatgagggaaatggaaggtggtgtgtagcacatgtgacgtgtataaacattctgtcatcatggatgcatatattgacatatgcatcctagaccttctagcaagtaagaactgaggaagctattctccttttatatatgttggtgagaatagttggtaagctacaagggtttcctgaccttagaaatcatgcttaactagcagaaagggcatggcagtggggcaagacacctgattttctgtcaaagctctacactcgttatgtgaccttaaaggaagcctaatcaggctgcttagctgtacatatggaaacctggagagccttctaaattatggggaaggcttcaagagacatgtatatgaaaggacttcacagtggggggcaaccttactaactctacctccaagtgcagagaccctttttaattttagtattggagaccattgctaagttgtccaggctgtatcagtctcccgagtactagggttacaggcatgtaccaccacacctggctgatgcttcttttaaaaaacattttattattgtgtatgcataagcatgaggtgtatatgtgtgagtatgtgtattcgtgtgcgtgcgcatgcatgtgcttatgtgagtgaactcactatgtaactcaggctggcctcaaacttgatgttctccctcacccacccacccaggttgcttggattataggtatgtgccaccatagcaagccttcagggacctgcattttataaagcaaaatcagcacagatggtgtgggaaaagttaacttttttcctcatgagttttgcatatgtttatttgtaaagctatttgcatgtatatacatttatttttagaggcctaacattcagttgcttttagcccatagatatgtgagtcattctttgagggacatggtacaatgtatttggaaaatatgggcagtattatgatgtttagtctgatcagacctttgtagctatagagagaacctctgcttccaccccagccctgggttgggtgtcccagtagaatgagactggcagttaatgtgtgtgatcattgaatattctgattaatgtttcattgttttagggtgttctgtgagaagaagatttttgattcttggcaaagctggtggttttaaccattaattgaataaaccatgtttccttctaggttggattgttgtttattgaattagttgacagtgggggaaaacctgttggtcaagaatgagttcccctctgttaagtttctgcttcatcacaattgcttaacaggaagtttgtctttgtaggcaaatgagagacagactaggaagacctgacaatccagttgctgtgtctaaccttggccttactgttttaacaaatgttaacttttgtgtagggttttgtgatgtcagcaggaagattgcttaggaaattccctctaatggctaggcaacataaaggcttcacaggccagagtgtagtgaggtagaagttgggacattatcaagaaaaatggaaggaaaaaagaaaaatgcttgcttgtgggtagagacgtgtgcaaatgcaatgagtgggcgttggtctccaggagaaagacttttctgcaggagggaaagccaaggctctacacaccttaacttcttaaggacttaagcgagaacctttagtcactttaggaaccgataatcgagtatacttcggctgtctgagtagagacagggaaaactccgtcttcactctccacctttgtctgttaatcttctggaaagcctgccaccagttaggcattggagagagacttcttagaaggaagggtgaaaaattaactcaccagtacagggaaaggccagaggattcaatagggtgagaaacaagttagccgatgaagtggtttgctgttggatgtaagttgaactttgaaaaagagtatattgttttagcaactagccaccagcatagttcattggatacatttgtcacacctggatttctagtttaattaattaattaagacaggtttcatgtatcttaggctggccttgagtttgctatgtagccacagatgcccttgaactgatcttcctgcttccacctccagagtcctgggcctagaaagatgtgcacctagttaatgcagtgccagggacagaccctgggactttgaatgctaggcaagccctctgccaacctaagcctccagccattcttggctcagtaacaacagtgaggaacggcttgagctagcttgcttgcttccttcctctctctctctctctctctctctctctctctctctctttctttctttctttctttctttctttcggtgtggtgctttacctagtgctttctttaagttgtgaggactgtagtatttacatctgggcactgtggtgctgtgtactcacagacaggcctggccattcagtgcccagggtgtggaagtcagcacactgtcagcatcgcctgtagatggttctacatctgagaagttaagtctcttgagttgagaaggaatcttagatggctgctaacacagaagaggactcaggcacctgtaagatgtgttttgctgtggcatcaatgcttgggaccttggaattgtatggctctttgataatgtggagtaatatgtggagtttgctctttctgtaccagactgcagttcttacccttctgtacttttgtagttctctggaacttagggccttttgaaagtatttattgcttttgtcccaagaatcaaagggttttctgacccttgtacttaggaggcagctgtattttgtgaaaatgatatggttaataggatttggatttactgtaatgtgtataggtgtcatcttgtaaattattgattagtgtactttattgtttctttggtttagttgataattagctgttgtggggtattggcctttattgaactgtaagttcacacttattatcacgagttttaagaatatttagtatcccagttgaacaccaaggatttaagtaatatatgtaggtttgatgtctttttaatggcaaatcaaatgattcctttactaggtatgtcagtaaatattgggagatatttgaacccttgcttattttcattttggctggcaaactgcttttgtaatggtggaagagctgtcctagaaaacagacaggaagttcattgtattgactagttcattctagtttatgtggacggttgagtgagtttttagttcctctcatttgtggattgtgtggtgtttgtcatgcgtaaatattaatattagccatgtctctattcgttacatagattccttctctcaatgccaaagtgaaggatactgccccaggtccttcatggccaaggtctttgcctcagttccaccattccatcaggcccttctctccattcttggtggctgtcatttgccgctggtgccatggtgggtgtatggattgctttctgtctttcaacagttaccgaagtgcatgtttgggattttgttgaagaaagctggatacagtaaacggaaagaatcttggaagatgcttgactgctgtcttttctcagactagtctgaagggaatcccccattcattcagtggtggatctgaagtgcaaaatactttccaggtaagccattgccctgtgttgtgttgttttgtggactcacctcactgaaagaaactttacaaaatcttttcaaagttgcatattgaggctcacccctgtaattccagtacttgggagggtaaggcaggagaattgctgtaggttggaggccatcctgggctacagagtgaggctgtatttcaaacaacaacaaacaaatcttttctttcttcccccttgctaggggatgaaagacatactgaatatttatgcctagtgtttgtgagtcagtgaagggcctgtggcagaattaccagtaaaaactgtctacatgtaaggattacagttacaggcttagatttcttctcatcagattttagcagagaatattgtaaacagggatttttcagaggtctgagggatagtttataaaacaagtggccattttgagatattttcttgcatggattaaatattgttgataatggccagattatttttttaaaataccatgtaaagtagtagtctgtcatgaggactcctagaggctcttctcaggaagattcactctgtgtagcaactgttgagagcattgctcacttctaggcactgtaggtaggtacttggcatgtttttaattggcatatgtgtcacttgaattttagacagtgggatggagctcaggagtactgaggaagttgaggttacccaggccatgcagttagtaagtagcagagtcagattcaggctggactcttatggccaatgaagtttgtgtttaagccttttggattttcactttttttttttaaacagtgaagtgtgtgtgtgtgcgcatgcatgtgtgtagatgtaggtgtgtatatgtgctcactgtatctgtttcagggataagggttgtatatggaggccagatagatggcaagtgtctttctcaataggtcttataccttattttggagacaaagtctcctgatgaacctaaacactggttttgctacactggctaggagaccagtgctcagataataggtatatacgccacctcaggctttgatgtgatttgtgtttgtttgtttgtttgtttgtttatgttattgttttaatttatgtgggtgaagatcaggtcagatcctcatgcttgtgcaccaagcactttattaaccaagccatctccctggccacagtggagttttacttgaagaacacggctagctcattgtttggcatggtatttttcctagtcaaggttactattgttataatgagacatcatgatcaaaagcaagttagggaggaaagggtttatttgacttatactttcatatcactgtgtatcactgaaggaagataagataggaactcaaacagggcaggaacctggaggcaggaactgatgcagaagccatggtggagtgctacttactggcttgctcctcatggctccctcagcttgctttatttatcattaccagcccaggatgatcccactcaaaatgggccaggtcctaccccatcaataactaagtaagaaaatgccctacagacttgcctacagccctattttatggaagcattttctcaatggaagtttttctctgtccagtgactctaacttgtgtcaagttgacataaaactagcaacacagtattttcgaaatttctgatattctgtctgctttgtgaaaattcagcagatctttagtcagttgttcgggtgaatatgaaagtaatttaggagcataagagaggcacagcacattaaaacacaatgtgctgtatacagggatccccattggattcactctcacattttccccattccttcatagtattttagctttactcaaatagctcatagctcaaatacatacacttcttttgacctatcatcagtcagcctgacaggatagatgttctcaagtaacacttgaaaatataatttttttcattatttaacattccctttattccccacaccctgtattgtttgaaaactttgtgttacagactgacattctgacttgcttcagttggatttctttgcatttgctaatattctagcacaccaccttaagagcattgggtcatggctgttggagtagaaaaaacaggccacagttactgagcgcttcttctctatgaagattcgtgtagttaatgtgtagataggcactcacatttctttacagtaacctggtagggtaagagccctcagtgctccattgccgaggaaaccaatggctagagtggtttaatagtgtgttcaacagcagagatgagagtgagtctaggcagcaaggttttagagactgtgcctttatcctctgtgctcctgtttagaacaacatccagtcatgggtacacaggctgaaatcctgtctaacactgtatacagttttcttaccttagaagttaatgaagctgggtgtggcagttcattagcctgtaatcataatattgggaggctggctgttgagttcccagaaatctaattcagtcattgtgctcaaagtgtgtctttagcctggggatggggtaacatcaatagctttacaataaatactattagtaagaccagaaactaattgatcagtttacagtgaatatatatatatatatatgttggcgtgattagtatatttttttctttcttcctttgagacagggtcttacgtagctctcagggttgccttgaacccgttatatagctgaggatggtcttgaacttgtgatgttcctacatccacctgggagcgctgagaattactagcatgtacaattatactattttatttgatggtgagcatcaaactcagggcttttgtgtatgctaggcaagtactctaccaactgagctgcattcccagcccaagtattctcttacacaaggatttgctagatgctaatttatatgctagtttagatgctaatttatatgctagtttaattcagaggcctgcagactccacccaaaatgactacaacattctcttctgtaggtaaactttgcctagctcaacctatgagtgccaatcctttgtggggttggggggcatcaagtaacctttcacagggcttacatagcagatatcctgcatatcagatatttactttacagtttaaaacagtagcaaaattacagttgtgaagtagcaccaaaaataattgtatgctttgtgtgggtcatcctaacatgagaaactgtgttaaagggtcacagcattaggaaggttgagcaccatcggcctagcaggtcatatcatgcatgggctcaaatctgttaagtaagattatctgctggttggctggagagaaccttttctgcttgcttgtttgttttgtttcctgtggagtggatagatctcttgaaggcaaaacctccattcaaaaccttttctatttaaggcatttagggttttgggtttcctccctttttccctttccgttgttttttgttttgaggtagtgttttgtatgtagcccaggttaggcatgaacctgtggtcctctttcaccctcctcagtgctggaattatagctacatgccgcctctgtacctgcttctagagaaccaggtcacttagcatattcagcttgcgtgcacttttaacttagaagtccgagaagtccttgtttcttcctcttctcttttttctttttgcacttgtatgtgttatttatttgttcttgtgtgtgtgtgtgtattcatgtagaggctagaagttgatgtctttcttcattgttctccattttatttacttgagttctcattacaatgcgcttcactgaatccagaactcatggactggctagtatagttagttgctgggattgagatttggactcctcctccaatttgtgggacaagagcttttccaatgaggcacccctnnnnnnnnnnnnnnnnnnnnnnnnnnnnnnnnnnnnnnnnnnnnnnnnnnnnnnnnnnnnnnnnnnnnnnnnnnnnnnnnnnnnnnnnnnnnnnnnnnnnnnnnnnnnnnnnnnnnnnnnnnnnnnnnnnnnnnnnnnnnnnnnnnnnnnnnnnnnnnnnnnnnnnnnnnnnnnnnnnnnnnnnnnnnnnnnnnnnnnnnnnnnnnnnnnnnnnnnnnnnnnnnnnnnnnnnnnnnnnnnnnnnnnnnnnnnnnnnnnnnnnnnnnnnnnnnnnnnnnnnnnnnnnnnnnncatgctgttcaggtggagcttgttttcaaccaatgttctcgaggtagaaagggtaacatagtaaattggtatttcaggaagttagcttggcaggtggatgcaggataaagagactgaaggcagagatgtgttaggcttagtgacagtgataaaagggagccagaggagccgagcgtggtggcgcacacctctaatcccagcactcgggggggggggggggggcagaggcaggcggatttctgagttcgaggccagcctgttctacaaagtgagttccaggacagccagggctatacagagaaaccctgcctcgaaaaaccaaaaaaaaaaaaggagccagagtgcttgcaggagggtcgactggggtgctgtggtttgtgaaagttgtaggtggccgatctatagagtttaaggggttggttttagtagcagaattgaggagtaatatcataagttttaaattttcttcttctgccttgagccctttaggaggtgtttgctttcctccttaggatggtaatactataatagaacgtgataattaggggagaagaaagaatgagttcatgttaggtgagactaataatgaatttgattcacctatagatgaagaaaacctaagggtagaggtatctgtatgtaatattggtctgagctcaccacacggggacatttgggagcctttgtcttcatgtagctgtatgagattactcaaacacagatttgtctgggaatggcagcacacaggaatgagttgtgatgttgaccaggtggtgtggttacatttctctctcaccctgatttctcagcaccctgccagtaactgttcccaatttacagatgagatcattatacatagttgcatcttttctcttactcttaactggctaatcaatgaggcacagttgttaatgtgtgttttcagaacgtcattgtgcttattgtatatatatatcctttattcttgtttttttttttttttttccgagaccaggggtttctctgtatagccctggctgtcctggaactcactttgtagaacaggctggcctcgaactcagaaatccgcctgcctctgcctcctgagtgctgggattaaaggcatgcgccaccactcctggctcatcctttattcttaacacacgatttcaattctacatctggttactaaaacaggagagaaataacctgagcaaagatggcaaagagatacctaccctctcagccagcctcagttttgaacgtttctcacctagcactggtgagtgcaaccatggtattttaagaagacattttaaacatcataacatgaagcctaaatacaagtcagctattttacctacttgtcagttaaagcaatagctgttctagtgcaggagtcaaaattggccatgttggaataattgagatgtgttggtctctagtgtagcacttcgtttggtgagttaattttgagacagagtctgtgtagttcatgagttctctgagcattgtttgtttgtttatgtctgtatgcatgtctgcataccacagatatgtgcctggtaatagaggaggccagaatggggcattggattatctgggactgtagctatagacagttgtgagccactatatgggtgctgggaattgaatccaagtacctgtgttcttaactgtagagccaagtgtacagcccctgaatcttacccactttaatgtaaaatatgatgtgattatcttagctatcaattcctaaaggacactcaatttttaggggatgctttttaaaatgcaagctgatttacagtatagataggctgtaaattgtgtaactagtctggactgatgaatgatatgtggatcattttcagtattttgctataacatatagtaatataagaataactttgtagccggacagtggtggtgcacgcctttaatcccagcacttgggaggcagaggcaggcagatttctgagtttgaggccagcctggtctaaagagtgagttccaggatagccagggctacacagaaaaaccctgtcacgaaagattaaaaaaaaaaaaaaaaaaccaaaaaaacaaaggggctggcgagatggctcagtgggtaagagcactgactgctcttccagaggtcctgagttcaaatcccagcaaccacatggtgtctcacaaccacctgtaatgagatctgatgccctcttctggtgtgtctgaagacagctacagtgtacttatgtataataaataaacctaaaaaaaaaaaaaaaaaaaaactttgtatctgtgccatttcacatatgaagtagaatatctttagggcagattctgaggaggagttgggccaggtaggtacttcgaaagatctggccctgggctggggtttgtcttagtggtttgcttaacatgtgcgggggcttgcgtttgatccttagcattgtaccttgtacaggctttgtgcactcatttcctagtgatgttaagtggactttaaactggaagctttaaaaattgttgatcttgtccctgtccagcccccaagcgcaggtcttctgcttgatgggtagttgcggtagcactgaggttaagctctttgaccttgcgtgagaaatagcatatgtacatggagttgagtgtcagacagattgaagcgttcttttttgttcttttgtgctcagcaatcatcatgggccaccttggcatcttctctctgttctctcccttcttattttccttcctaccatcccccctccctttctttcttactctggtactttgttgcagaaacttttgagagtagttacaaacattttgatgttgttgccctgaaattggcacttagttgtctctgctgtcttaagttagaacaagctatttatctttccttttctccaatgacttcccagaagaacccattttagttagttgccttataggtgtgcagtgatgcgaatcattccacattcatttattttcttatagtgtcatttaacttgcttctttagcttctagttcctgtaaactggaactttggtgagctgtctccaagctaagctttttggtagcaatgcttcatcataggagaaatgtccctcccatcaaatcacatcaccaggcaataagagctgtgcataactaaggaacaccttggttaaggtggcagcagccagatctgggtaataattgcagttttcccctctgctcttggcaaggttgtctgcagagcactgtttgacaccttgtaacagccttttttactcacagctactcacctggagactccagcttcccaacccttaagtcttttattgcagtagggttacaaaattgtggtctagttgccattcttcttctgtttattagctagtgttcagagagctagcctgatgctccacctttctatctgtgccatcagtactctcctgggtttttgtttattcagtgagttaacagtcaattactatccttactgattctcagagtcccagatttggttaatgagagccccttctagtcgctcccattttcttttgatgtggccctgccagtctttgtgtgtctcccagctttttgggaccagattgtcccaggtctatgtcatgtgacactgtggctttttatggggctatttctagacactatttgttgtcactgtagatccttgtggtaggcagggctgagaaatacagttaaaaggaactatgagtccgtcttatttctgattcagatttaatagtacagtttttcctcctctgagtgtgatagtttcaatattgaaaaatctaagggatcttgttagcataatggccatcaaagcaaggtacagcacatgttacataagtaggtcagtagtggattcattcattcattcattcattctttcttttttttttttttttgtttttttgttttttggttttttcgagacaggggtttctctgtatagtcttggctgtcctggaactcactttgtagaccaggctggcctcaaactcagaaatccgcctgcctctgcctcccgagtgctgggatcaaaggcgtgcaccaccacgcccggcttattcattcattcttgagcatgtcctttttagtattatgggcaatacagagtagaatcagatgtctatgttaccttcagtagatttcagtcttatatggagaaatggaatttgtttagtgtttcaagagttagaaaaagacagttttttgttttattctgttttggtttttttttgtttgttttttgttnnnnnnnnnnnnnnnnnnnnnnnnnnnnnnnnnnnnnnnnnnnnnnnnnnnnnnnnnnnnnnnnnnnnnnnnnnnnnnnnnnnnnnnnnnnnnnnnnnnnnnnnnnnnnnnnnnnnnnnnnnnnnnnnnnnnnnnnnnnnnnnnnnnnnnnnnnnnnnnnnnnnnnnnnnnnnnnnnnnnnnnnnnnnnnnnnnnnnnnnnnnnnnnnnnnnnnnnnnnnnnnnnnnnnnnnnnnnnnnnnnnnnnnnnnnnnnnnnnnnnnnnnnnnnnnnnnnnnnnnnnnnnnnnnnnnnnnnnnnnnnnnnnnnnnnnnnnnnnnnnnnnnnnnnnnnnnnnnnnnnnnnnnnnnnnnnnnnnnnnnnnnnnnnnnnnnnnnnnnnnnnnnnnnnnnnnnnnnnnnnnnnnnnnnnnnnnnnnnnnnnnnnnntcccagcactcgggaggcagaggcaggcagaatttctgaattcaaggaccagcctggtctacaaagtgagtttcaggcacagccagggctacacagaagaaaaccctgtctcgaaaaaccaaaaccaaccaaacaaaaaagtacatgtagaacacacccagcttctacatggctgctaaagtctgaactcccaaccttatgcttgcacaactagattgagccatttctccagctacataagacacattttaaaagctattctttgaggcttggcagaaattagaaatggacagagatgtattgtagcaggggactatcatagcaaagataatcaggggacaatggtagaaggttgtctatcttgttttctctttaattttgtgtgtgtgtgtgtatatacacacatagtaccttttgtgtctgagtgttttatctgtatgtatgtatgtatgtgcaccacatatgtgtctggtgcccacgaagatcagaaaaagacttcagattccttataactggagttccagatggttgggagccactgtgtgggtgctgggaaccaagccctagtcctttgcaagagcaccaagtggtcttaatcattgagctgtttctccacacccctttaatttttaattatgtgcatgtgagaacaggtacctgcactctgtcatgttttttttatgagggaaagtctagctatggtagtctgggctggccttaagtgtatgacagtcttaccttggcctcccaatggagtaggattactggtatgtgttactatgcctggcaaagggtgtgtggtttctctgagaagggtgagtaagtagtcgtgtggattgcttagtatagcttgggcgaagcaactgagggatatgaacttgcaaaggtccattataactaaacttagacttcttttaggtcacaagttacagacgagtttacatatggacaggaatcccacagacaattttatttgatctgcatagcttttaaggatttgtcaattcctgggcccaatgtgctcacatctttcagtacactccatccattccatagcttaaatatgaccctgcatatcagcacacccatttctggttttgtatgaaaagctggagcgttactggccttgaagccaagcttgtgctctcctgtctgccctgcagtcttgctctcctgtgttacctgctgctgatgcatctgggcttgtgattcttgcttggaccagaagatgagtgcagtggacatggattatggaagttgagcagcatctgtgctttataaagattattctggcagtcagtttagaggctgcattgaaacaagaaaagttggagcagctaatagactgttgcattattctagggacagatggtggaagaggaggaaatgagtcatttcagctatggagtggatagagtgtactgatagatgtgagcacattgtgcccaggaattgacaaaagaatgtaattcttatgttaaaaaagaaaaaagactttgttgtgagggtgggaagtgcacactacagtgtgcttagaggtcagaggacaacttttggggatccgttctgtctggtgaggcggaggcaggagaatcacctcacccttaggagtgatggaatcacaattggaaaatgtccagcatttttattgatttatttttttaaggattgaattcaagtccccagggtcacacaacaaatgcaaactcaatcttgccagacttgtaagttcttacaaaactctaatttaaaacacaaagtcctgggattgaagatttagctcagtagtagtgtcttgcctgaatgggcatggctttgagttcagtttttagcactgcaaacaagataaaaacacatagtactactaaggatatgatagagattatttccaaagcccttgaagagttactaatgcctgccagctctcacaaaggtatatataggttagctgtgtctctttagccatatgttcatatactctgcccataattatatctgcgaagttttcctattgcatctggttctcctgtgcatctggaatcttttttttgtttttgtttttgtttttgtttttgtttttgtttctttctttttttttttttttttaaaagatttatttatttattatatgtaaatacactgtagctgtcttcagacactccagaagagggagtcagatcatgttacagatggttgtgagccaccatgtggttgctgggatttgaacttcggaccttcggaagagcagtcgggtgctcttacccactgagccatctcaccagccccctgtttttgtttttttcgagacagggtttctctgtatagccctggctgtcttggaactcactttgtagaccaggctgtcctcgaactcagaaatccacctgcctctgcctcccaagtgctgggattaaaggcgtgtgccaccaccgttggcttggataacacttttaagtagtcagaatcccaagtttctggtgagtatacagctctgagatagaaacgttggcttgtgggtgggcattgatgggcatagggaacttagataagacaactgacatagaagagttgagctgtggatagcattttgggaacttagagaagacggctcaggtgtgttctgagccagttgcaggtgctagtccagtttaaacttctattgctaaggtagagttccactagaatccatcacctaatgttttactagtccttgccggtctgcctaatgagtgtgtgctgttatctttattgtagcctttctttgctttttatttaattaggttagtagagttggtgtttagttaaatgtactacttattttaagtgtagtgtttgagttttcagaaatacatatgctcatatataaccaccaccataatcaacatatggttcgtttttatgcttttaaaacctttcccactttcctttgcagtcattacccttctcccagcgtccccagtgttctgctttctgtaactgttggttagttcaatctgttctggagtttcacatggaaagagtcatttaacattgtatacactgtgtactccggtatgtttgctttgttctgctcagcgtggttttaagatacattcattcatcaaaaaatctcgaggggggtggcaggctgtacgttgtgttgtatggatgtatgcatgtggataggagtgtgccttgggggccaaaagaagagtctcctcccttcacgttggagttgcagacacctgtgggttgctggtttatcatgtgggtgctagaatggaagtatggtccttaggatcaatcatgcagcaagcacaccctttctttcccactgacaaccatctctccagctccaagaattgttctttttattgctagagggtttgttagtattgtttgatttttgggaatagtgtaagggagcattatgtagacttttgaggatgtttgtttctagatagatgtacttaagagtgtaattgttggtacagcttgaattcaaagagaaaaaagcctcctttttgtgctcttaagagttgtgaggttgtgtgtttgggtttatcttagatcctcagttctccagttctttgcatagtcctactagggatcctgttactcagttcagatccagtgctacctggcgtttgtgctacatcccagtttgccctacttcagacagcacttcccagtccctgcttaccttgggagtttccacagccctcttcctcatgctcagtaatgtgctacagtggcacagagagtccagggcacactttacttagggttactaactttatgaaaggatattataagatttgtttccctttattttacaagtagtgagtgttttgcttgcatgtgtgattagtgtctgaggaggccagaagaggttgttagattccttggcactggtgttatagacagtgctgccatgtgggtgctgggaattgaagtcaatgcccttcactactgagccatagcttcagcccataagaggatattataaaggatacagatgcaccatccgatcaagaggtgccagaggtggttgtctgacagctcccctgccaaaacaaacctttgggagctaccttacccacagatgctttagtttgggagttaaccttactcacagacgctcagttctgcttgaaaggattgattataggtaggaagtggtcttccccttgcacttagggagttccaagttttagaagccattgttcctggaaggaggcagaggatacagcagagaatctggggtgaactgtgtattcattataccactatatgtccacatgtggctagaaaaagaaactttgaaaattctccaaaacagtaagatatgcttttatttcctctagcaacatgcaaagatttaaattgctttatactcttgtgagcctttgctgtacttctctttaattttggtttaaccttgtggtttcacctacggagtgactaccgatgttcctccgcttttgtgtgcttgttggctacttgtatatcttgtaatagatgtgccattttatgcctttaacaccagcactcgggaggcagacgtaggcaaatctcctagggctatgttgtgagactgtcttaaaaaacaaaacaaaactcgaatttgtaaaaggacagaattccaccaaattaacgcagagatcttgattggtttaaaactgtatttccaggaccaggcaacacttcgttgcatacattgcatacccagtgcagtgatggtattgagtaagtgagggaggaggtttgtttcctattgagaaggctgaggcagttggtctggtcagagttgcttctttgtggtcagggagatgaataatagaaaaacaactggtgtgttaatgccaggttagtttagggtgtatgagggatagattaaagattggactggagggactttctttgtcatggcagtttggagagcttgtctgattcctaggaaggtaagataatttggtgatgtggagacattagcatgggctattccacattgatttttagtctgacctgatagggcccattgaaggagttcagttcctacagtgggctcctgtaatttttacttcaatttaatttatcttttattttttttaaagatttannnnnnnnnnnnnnnnnnnnatctgagttcacatacgtattagtatgtgagggcatcagattctattacatatggttgtgacccaccatctgggaattgaattcagggcctctggaagaacagtcagtcagtgctcccccccccccttttttttcttttggtttttcaagacagggtttctctgtgtagccctggctgtcctggaactcactttgtagaccaggctggcctcaaactaagaaacccacctgcctctgcctcccgagtgctgggattaaaggcgtgtgccaccacgcccggcacagtcagtgctcttaccctctgaatcatctcttcagccccagtttatattttcttttgcagaagtatccacttgcattttagaaagaaatagaaataatatgaagcaagaccaaaatcccccaaagctcccttgataactgctttttctttcagtgtgctgtagtgctttctaagtatgtggtcattgacataaagtggagcttcctagttttagtgtggatggaatgttttagacagtttcaaacactgtcagcaaaactaatgagtccatgggaaggtaaactggggtttaagaatgtttcagcctggattttataaaatttattttaaacttagttttattgagacagagattcatgtaactgagtagtctatgattatcctgcttcccctcggggattgcaggtgtgcacacctcacctagtctcttatttgtttggacaaaataataaaggtttgttgtgattttttttccagttgaaagtcatagaaaactcaaaactgtttaatgctaagaaagggaatttctagtttgagaggaaaggtctatgtggatccaggttgggcatggtgtcttcagcagctctggttgcatctcttgcccagctcagtggggaagagatttctcatttggctcccacacaagtcttctgattcaaccttggcatgtatgagcacactgaagcagtagctgactgtgtaatgtggtagaacactgtggctgttcagcaagcctgtagacttctttaaaattgctttttatatgtgcattgtgtgtgtgttgtctctattagagcctctggcatgggagttatggacagttgtgatctgctgtgtgggtgctgggaattgaagccatgttctctggaagagcagctagtgctcttaactgatgagccctctctctagttcatcctgtagacttttctagagttagcttgctgattatttgcttactcaacaggtatttattgcacttctgttgcatacagattctatgaggacctgagaacactattgtataaaatgtttatttcttgctgattgcttataatcttctatttcttgtaataaaacacctggttataacaaatagtttttgaggaaaaattaatggcttttttattttgttatatttaaacctatttttgactttttaatttttttttttccctcaagacaggatttctctgtgtatccctggctgtcctggaactcactccatagacaaggctggcttcaaactcaaagatcctttcaccctctgcctcctgcatgctataattaaaggcatgcaccacctccatccagctgattaattcccaagaggcagtaatctcattttcttagcctctcgccctcattcccaactgtagtagctgtttctttttctatagattgcacatgcaaatgatcatggaggtcagaggtcagtgttggttgtgctttcagatgctgtccacataggtttttgagcctgtatctctctctcatttggcctggagcttgattgattagctaggctgaaggtcaaggacccccaaggactgacctatctcttcctcctcagctttgggacgacagccgtacactttcaaactcaggtccctgtccttgaaggacaagcagttaactgactgagctaactccccagctgccttctaccacctttctgtgagagttgtatgtgcgtggctatgtgtgtgtgcatgtcagtgcatgttcgagtcagggccagaggtgtcattcccaggaagcgtgtctgtctcttctgagacaaggcctctcattggcttgggcgtaccgagtagactagacaggcttttgggtgatcctaggtgtcctaaaggaactgagattacaagtgtgtgccaccaggcctggcagttttgcatgtgttctgagaattgaatttagatcctgctgcttcccaggcctctccttgcagacttgaatgtgcagcctataagttgttctgcatggcacagatcaggctggaacttgcagtcttgcctctgcctcctggctcctgaggttacaggtgtgtagtcacacttttgcattctgtgtttgctctgttattaaaaagttcagtatgccggtgacatctgtgtagtaacaagttttgagaattctggaattttggtttctttataaaacaaagaaatactacaagaatgtgcctttgttttaatcccaggtgtggaacatgggctgcttcggattgtccacagctgctgaccatgttttctctcactctagcaggggcatagttttgctgaagatagtttctgtgattgtgtgacgtttggaatcctgggaatttttcagagggtatataaatgataggacccctgagaggggtggttgatgggtttattaatagtatttaaagaagaaacatgaaagaaattagattcagatctctctctccttctccttctacctctttctccctctcccttcctctctccctctctctccctcttctttcctccctctcctccctcccttcctctcctccctcccttcctctcccctatctttctttctctcctatgtgtgatagtgggtgaaactggggggataaagggtgggaaaaagaagaacccacaaagtagcaaagactagctacacatctgtgttactggtctgtggagtattttaattatttgcttatagctaagtcagtcacaaagttattgaaacagttgtgttaaaaggatttggggcaagttagtaggaatcctttatttctttacatgtggcctttacgtggcttcactggttcctccctgagcagtgcacccatactcaggtgtgtgcctgcagaagcacttattatcctttaccattgtctgccttgaagattaagtgctttgaatggctaagtgcttatagcccaaggctagagatacagaggacctcctggaaaagcagtgtaaagacacaaacacaatgttttgtttttcgagacagggtttctctgtgtagctctggctgtcctggaactcactttgtagaccaggctggcctcgaactcagaaatccccctgcctctgcctcccgagtgctgggattaaaggcgtgcgccgccaccacgcccggctaacacaatggtttaaaggctctttcagcaccagcatgcactgaaatccctggcttcaagtattgaggagtctccctacctacttacctggtaggaaacagtgtggaagagtagcaggaatctcttactgaggccaggctgaaagacaagtttggttgttctgggtgcctggtgggcagtaaagcacacagctttattacttaaaatcagttagactatgggaacagtagccatgtgggaaagaaaagtgtgaatttaattataaaattatggactggtgatatggcttagggagcaaaggcagctcttgactaattgaattccatgctgggacagcggaaagagagagcccatttctttaagttaggcttgtcacacactgcccacataatacacatgcacacaaaatcagtcaatacaaatgtaatacagaatttaagtcaagggctgataaaatgtgcctaccccacggcagccaggcttgtggttcttcacttccagagtgtcctcactcaaagaagcatgattttgatcacagctgctttctaagtctgctgtctgtaaaaatgagagcatcgaggacctgccattggggtgtgtttatttggggaagtagggcctgaataacttctgaagttgttagtgtttagagcttgcagaggcttgtttacatggtgttcccaaggatgctatcagcatccatcttccatcttgcttttagtttagtttagttagttttgatttgattttgattgttttcttggttttcccctgagacagtgtcactctaacccaggctgtctgggaacttacagtatcatccaggtggctctcagacatactgtagcccagtctgcaaagtattgagatcctgcctcctgagtgctgagattacaggtttgagctgcatccccaactcatttcccctttaagcactaattcatagtttacagagccaggaatcatgctagatggagaaagcttgggacagttttgcagtagatctacaaaagatttttcagataccaactgattttagtactgtggacgacagtgaggtgggctttgtggacagcatctgcactgtaggagttagccacatctctccctttagtaaacgaggaaccatacagcattgtttacacaaatcacctcccagaccagattatttgattttgtcatgccttacaatgtttgctgaagcatatagtatactggcctctataacaaatatttttgaataaataagtaaatagcttaaaatgaaaaggctaattgtccctgagccatcttcctgaagcagttctctcttcctcggaaaaacaagactatcatatgggaagaacgtttttctcatatgttcttttgttttatataaaacatgatcaattttgtaccgcttacatgaaaactttgtgtgctagaatgcagtagaatcttatgcaggcatttccaaaaagttgccttgtgaagtagaaggccctggaagggatgaggctgtacctgtacctgtgcctgtggcgctacattaatccattttctgttgttgggacaaaatatccattggtggtactttccaagaggagaggtttatggaagtgacagggttggaggctgatagtccaggatcttttggtttcttgtgacattacagatgtgcctataatggcaggagtgcgtgcattcagaagggatcacatggagactagggcaacatcctctcttggggactgagaccccatgaactacatcattcttaatgggacagtgttccatgacctaaccaccttcgaggtccctcttaaaggtctaccacctcataggctagcatgctggttagcaagtctttagcacacaggaactctgatggtacaaacctatggaaccatagccaatgggaaggaaggacgtagacagggctgaggacttgtctctctgctgcttgtcctgtcagatggaagtcctcctggtgctgggcatgggaaagcagaagctgccacagtcaaatatggttcagtgtggttcctcctcggtgggagatcactggctttctaactggagctcagctatctggttggtagccataggtgggaaagtgaaactacagtagcgtctttgtgtacgtttcttaggtgtcagagtctagccaaactgatggctgtttatccccatctgcttgtgaccttcactgaaggtcagggtcaagttgctgtgatcagatacctgagtaaggatggaaaggccagtgttttgtcctcaggacataggatcccgaagcttgaatgctctatttccaggtgtatgtggtcaactgaaaagattaaaataaaaagaattgcatcttattctgagtattttgtatgtaataaaatgggaccataacttttagtccccagttagtgcttttattcacttaaagcttttaaaattacttcagtgtattgggattttttttttttaaatgagtattctctgggtcatggataggctcctgttggatggtcctatgtggcaaacatcatgcttttcctatgggtacttcaaaactactatttggttcttgttgctggcgggtttatgtgctattatgtttagtatgatctgatctgatagatgcctttgtgttcctagataatgtctttgtttcttctccttattatagaatcttatttgtaaattgatgagtcatgagtgcacctcctaccatgtcgctcgcaccagtggtttgattgccgaattaacacttttttgtgtgtagtgtgtgtgtgcccatgtatgtgcactcaagttggaggcagtgctgtcctgcggccctctaccttagcttttaagaccctctgtcatcaaacctggagctagtggtgagctagacggatcggccgaggagaactccaaagatccttctgctgcctccccagtgctagggtttccaagtgtgcaccactacacacagctgcttttttttcttttttacgtactaggtatctgagcataaggctggagttagtggtggttaggaactacctcatatgggtgctggaaaccaaacgcaggccctcttcagtaagtgcacaggcgcttcccctattgagccctcgtccctgcttcggagttttgaattttgttttgtgatttcttgcttaacagaattaaatggtccaacattcatatttattgaactttaacaaagtttacagtaatctactaaaggaagctgtggttttgaactgtttacttctacctgttatcattctgttctttatgaatagactgtcatcttgtgtttactacatgttctagaaaacaggtttttcctttgaagctagctgtagattgatagtgtgctccatttcctacttgttgagctaagaatccatgacctattttttaaaaagatttattatttcctatagtgcgtgtgtgttgatgtgggggtatgtgcacaagagtgctggtgcccatggaggccagcttgtcagatctctcaggtctctcaggagctggagttagtggtggataggaactacctcatatgggtactggaaactaaactcaggccctctgaagagcagtaagtgctcgcggctgctgagctacctctggccctacatttcagtataagtatcagctgacttttgcccatgcagaggttgtgccattcttagctctgcatatgctcttttttttttttttttttagatttatttatttattatatgtaagtacactgtagctgtccagaagagggagtcagatcttgttacagatggttgtgagccaccatgtggttgctgggatttgaactccagaccttcggaagagcagtagggtgctcttacccactgagccatctcaccagccctgcatatgctctttattcttgaaatccatcttttcttttcccctaactgcctctactcaacatttcagggtttctctcctcctctggataggttgtctatgtgtggtatatatgtgtgtttatacattgtccagatatcttcctgtgtctaggggaaagtcttgtttttttgtttgtttgtttgtttgcttgcttgcttgtttgttttactttttttttacttttttctgtgcaaatagatttttattgaatgaggtgcggttgaggacatttagctgaggacatctcaggcatcctgatgtgagttggatgaaggtaatggttgatttggtgagaagggaattacaggaaatcaatgcagatttctaaatcaagaaacctaggagagttttgaattttgtgatttcttgcttagcagaattatgacaacatacctctgtgtattgctttaaaagaattgcctctctgagaaggaatcaggcaggagattcagaacaatcccatctagagataggccagtgagagcctttgtgaacactctgcaagctggccagtgagaacacaggatggtggcaactactttatttaatttgtggttccaatggtaattaccccctttaataaactttcagcttttgaaaaatgtcaaaaagttgttactcttgccttttaccaccttcaagtgcttgccggttggtgatgaatctggcagaatcagtaagcagcgagcaccttcggttcgggttccttggccagtgctttgtttgccattagagtgaagaggtatccatcctgatttatatttgccattaatactagagcctagtatgaataattccatgttttctatgaataatcttaaattagagttctggacattagaagtagctaaatatgaaattgtgacaagtgtatattggagattttatggcccctgggatggtccttgtgagagtctgtggggcttgaagatgaggttgtaagaagaaaggcttgcttggcattgctgacggttggtgactaagtgggtcagtacatatttgttcatattggtaaatacgctattcagggtcaattcctcagacctactataacagtaaataaagatatttaagatatttaaaaatacacaggaagggagggaggagcagtcagattgtgaacatagctgatgagaagatagtttctattattttaaaaaaataacaacttgagtttccaaccaagtcctgaaatttaaattagaagcagctcagatcaattactgttaaggttttagctgcattttatttgatgttcttagattagtgagtatagaacttttggtttttgcacctattcaagttgggcccgtgtctttctgtttttttaggcttagggcagcctttgtaataaggactttcttattacacagtgcatggatttcctgcagtagccttttttgttgagtaaagactgtttccagcagtgtgtctggctagttacccataagataactgagtatgggatggagcactcctaacattagacttttaacttgcactgtcttagtcctcatcttgccctggaaggttgcaggcctgctgagctgagagcggagatgtctgactaggaggctttggcagctgctttacagcgcaggtgggaggtgcctggagctgctgtctctgcagtccctctctgaggcagattgtcagctgtggagctgctgttctaatttaggattactaggatcagccccaactcagacctgacagtgtgaggtttttcgaccagaagttgcatctctttaaatctattttcctattctgaatattggaaaagtaatgtgcataatgatggaagtgctggtgagctgtggttggcgaggcgacctggtcacatctcagggaccactgccgtcattctacagcatctatggtgggtggtaggagataagctctgggaattaggcctttaaaggttgggttggttggttgggtggttgttgttttggttttttgctttctaaataagagttggacatgctggcagacatgggaaggctcaggttaggatcatgaggttgagactaacctaggcagcacagtgagaatttgtctcaaaaacaatcaatcaaaaaccccaaacaacaccaaaaaagcagtgcaagtaagatgttcagtaggtaaaggtgtttgctactcagcccagatgacccggagaaccctgtcaaccacatggaggacaaaaggagagttctgactgttgtaacctacccctggacctctaggcctgtaccatggcatgggggttttgttctcagtcccccaccccaaataaacaaaacttacaataataaaagaagccaaaacaagcaaacaaaactcttctggaacatgcaaatttatgtcagactttaaaaatggtgtgaatcaggttaggtgtatagttcagtagcaggatgctttcctggaactcatgagtaagttttataaaggaacatgaccatttactgaataagtgaaaattgattgcaagtgagcttcgttaatttggtattagtcagaaactgctgctgtgatcctcttgcttagggtctgagtgattttgtgattcagcaaactaaacagttcagaaagaacatcaatctgtgggtaggaattcgactcatgaatcacttgcctggcatgtgcaaaggtcctgggttcagtcccaggactgccaaaatgaaaaacaacaaaatcaccaagagagtcctaaattgaactattgaggatatttgggactttatttaacttgagtaatccatgtaattaacatgtgatgtgggtcttttctctgaccatacagtctgatagaactactatttcaactagtatgtgtaataatgtgtgtaacggggcctctgggtagagagctcattttaatagaatcactcacatgcctatggaccttagatagctggtgttcaaacagatcatctgtagaccgagatagtgtgctcttcaggacttactgtgagactttaccgtgacagttgtcatagtaggaacgggttagaggaggtcaagagatggcagctactttcattgtattttacaaagctgttctcatgtctctctgaggttgcttctctctgttgcaaaatggttggacaacagactctgtcctgtagcaacagacagttccccactgtatctcccaaggcaagcttttaataagtactcaggttggaatgtgtggtggctttcattgcttagagaggtctgctgctatttattccatttgctgtctttgatttttgtgtcctggattcacatgcctttcctaaataaactcaatattctctacattatgagttgagctgtagctagtaagtaggaattgggtacgaacccaaggtctgtctgatttcaggcaaagctttctttgtttataatacactgactgtagtagaggttactagtgtaagccagggagctggaggaacaagtgtggcttggcctaagatctgtagagtagtttagtagaactcaagcacctatcttcagggttggtttatttatttattattaaaaatatttattaaataccagtgtgatgattactatatattagctattgtatgtgctcagttttacattacattttattaattcctttgaaagcaacagtttgtttgtttttttttaatggtagaatggagtcaatgaatttttttttttcttctggtttttcgagacagggtttctctgtatagtcctggctgtcctggacctcactttgtagaccaggctggcctcgaactcagaaatccgcctgcctctgcctcctgagtgctgggatcaaaggcatgcgccaccacgcccagctgaattgatcttttaattgttttgttttgttttgtttttttgagacagggtttctttgtgtagcactggctgtcctggaattctctctatgtagagcaggctggccttgaactcatagaggtccacctgcctctgcctcctgagtgctgggattaaaagtgtttgtccccactggctggcaagctattaattcttagtcttgtcaccaagtttgtacataaagtccagaatgaaaagtcacaggtcacaaaactcttcaagttttttttctctgagaatgcagagatgttgatgaccatgaaaacgaggtgtgcttcaagcagttttaatcgcctgtgtctatcactggtctgtcttttcctttgcctcattctcttaagtctcctgcagtttgactgtggagaagtgtaaaactattcacacaatgaatgttaggtcaccaaagtttttcagtagaggagggctcccggccttaaaagaaggtgggatttggtagccaataaccgaagctggctcctccctgctatgctgtatgtccttgtgcagattattcaacagttgagtctcccttttttatagcgtggtgtgggggacaggggacccactcagaaggcctgcttttgtagtttcctaagcagttgagactgagatagagcagaactcctccataggccttgtggattgccactctccccggtggtcttgcctcatgctcagactcccagttccctctcgggttttcatttaagcattctctccctcttgattctgtttactgtattccgtgaaacgagtggttggcagtgcaaaaccctgtccataagacagaaaagggcctgctccccagggttcaggaaacttaggaccatccctggcctctaaactgcatgggtgcacccctgccctgactaacactcaagctgcctgtgtgaaggagtgacttgttgcggcctctaactgcttcttctcttccttcctttttgtcatcctgcagtgttctgtgccaaggtctttgtggctaggctgcgccaacctggtagagagcatgtgcgcactgagttgcctgcagagcatgcccagtgtcagatgtctccaggtgcctctcttctttcttgttgtaaatgtgtttttacgtatgccatgaacatttgttgaaacttgcagtagtgtgtttaatgcaatgttaagtctgctaaatgttctgtgtaaccctctgctttcctccggcctggaccccccatggaggaggagtactaggaaggccttctgagcaaacaggtcttgaagggccctttcttgctcccctttcttctcctgccctttaattctttcccctcactacaaagttgtgattctcatgtttgtttaattgttaaacctttgaaaaacaaaacaaaatactctatttcccatttggctgcctttaacagttttgagttaagagggtttcataattaaaacaattttctgttttgaaacatctttcggtttaccttttctcccccatttaaaaaaaaagaggggggtgggactcacaactaaaccctgtactgcaaacctcacaaatggaggtttatgaagaccacagctttatgctactgggaaccatcagcttgagccaactcaaaaaaaaaaaaaaaaaggccagatctgatacctgtcctcagggcccacccagttttccaggccaaggccagcagagaattccacagataaaagtaataatattgggtggggattttggatggatggggtgggggttgcttaggataaaactgtgttagcaggagtgcagttggtgtcagatcctgataaaaccaaggccgagctctcatgtttttcatgggaagttccatttagagagtgtatttaattcattgtgtcagtagcagtatcagcttttattactgcatagttcatacaggttggtataactttcttttaaaagcagtattaaattcctggagtcctgatgatactgcacagatattaggaaatgagtcagagggatattgatggcatggttgatttcactgttctttctcaaggcttgctactcgtgggtacagtttttaaatggtgctaggggtttagaaggaagaaatttcttttatattgatgttgagccatcatttgcttattggccagcctctgagtagcactggtgtggttattgattgaaattgctatctttagacagttgtgctggcacctcattaacagctagatggagtttagattctacttactgcgcagttcttaggtctgttgaagaagataggttacaagtctgggatatagaattgagtgtttctttcaggcttcttgccttcaaagggcagtgttgcagtgatctctctccttggtaccacagaatgaccatttgcattataaaagtgtctcttcaagggttgcccttggtttgtagtgggctgacccagttttagccagagctggcagtacaagcaggggaagaattgtagttataagtctaagttagttattaatctgaggttctctttgctacattcagttaaaattatagggcaacataaggcactaggcagagtgcaccaggcagtgtgtccctaccatactgtactgtgggttctctggaggtgcaagggagtgggaggaagtacagggtcctcctaaaaatggggagtgcctccacagttcttcagagtcacctttctctgagaaaaaaagatggaaccttgccttaatctgaccttgtttcaatgaataggagcaatattgcctttagatacatgtagggaactttgattattaagcttttactttgatagcctataattgaaggcatgtaccttagtgagatgaaccaaagggcttagctgcctgaagttcgaaaattgttattttgttctgtgtgaaaatgaaccgggaagatttcctttctttccacttacttgttttatataagcattgttgttggttgcttattttaaacaaaaatatgtatgtagagttttaattcttacctttaaaatataattattgttttttaaatataattattgttctgacttctggtgctggggattgaaccccggggccttgtgttttctgggtaactgccttgtcactgagctccagccttggccttcccttccccttctcttgtctatgtggtgagaacctcagggttgagctgcagtctccagacagtgccagacagagcacctgttgacatgctcaacgtttgttttattacaaagatgcctcaacagagttatttaaaaaggctagaagaggttgcctttgcttgggctgtagaggtctggggcggatacactgaccccgtcataacctctgctttcagtctactgtcctatgtgtttggctgtgtacattttgagaaagcagaagtggaggcagtgattgtatttaggcttaatttaggtcctgtagggtttgccagcagaaaagagggctagcagtcttttaccagctgtatttgatgattcacatttattaggtttatgacaacctgtgggatgcaggagtgactgtccccattttccttatgaggcaactgaggcagacgatgtagttcccaggctgagatgatatgtgctgactggcttaggtttataaaactggaaagtgctggagcaggtgtttgagatccatggctgccttggtgcagactctcttcccccatactggtttttaaatttctctcttcctgtttttttttttttttttttttttttttagtatagcttcatttgtggaaattgtactcgtgataaataatgtatggtttctttagtcattattaatttgagactaaaataagaaaaacatgctaagttcaagtattccctttgccaaaaggaatacttctgactcttagagctaggaagcctgagtggatttcccagaatgtactggcatgattgtgtccttggtgtgcagtgcagggacctttctcaagtgtgcagaggagaggtacagcttgtttcctgctgtcaaggaactttgtgtagtaagcagaaccacagattaaaatccagactgagggctgcagagatggctcagtggttaagagcattctctgctcttccagaggtcctgagttcagtttccagcaaccacatggtggctcacaaccatctgtaatgggatccgatgccctcttctggtgtgtctgaagacagctacagtgcactcacatacataaaataaataaatcttaaaaaaaaaaatccagactgaactgcaagtgaagtgtgtgtgtacgtacatacatacatacatacatgcatgtgtgtgcatgcatgcaataaagctctgaagttagctaaacctacgtatactcatgttagacagcttaaacttggtccactctccatgttgtagaacacttggcttgaaaagtctgcatgtctcagaatctagctgagctgagccagtatcatttacttcacaagcccagatttgaccagttggctcttaggtcagataatcccaggaccctgatttatcacgactttggcctgaggttaacacttacacggcataccttttattgtctaccttctatgtgttgtgacctatgattcttggtttggttttggtcctgagattgacccgcaggccttacgtgtacaggcaggcattctcccagtcatgcccctgtcctcattaggatcctctgcagaaattacctgggctgcttctttgtgtatgaagctatagaatcggattggcttgtctgaggctgtatattcatttagtagaaaactgggttatggacctagatctgcagagctgctgcccagactgcagtgacaatggccttctttaacttggcaacggtcattttagaaatgacaaatttaacagtgttccttatgggtagggagtttgctgggcacaccagggagggccaatggttgttttcattgacttcctcctagctgcttcttgtttcttgggctgtaaagaactcagccatgagcctgaggggtaggagtgttgcatgcctacagctgcagctcctgacaggttggctgagatatggcaggtgaggtggctgcgatgtggagttggtctccaagctggtaaatccagatccatcttcttctggttgcttgaggctggagtctgttcccgttttaagacaggcaggtagttttttttatccttcaggcttttgaccaactaaaggataataccaaatgcctcatgctgccggtctacttcttagggggtggaaatccatttctttctttgcttgcagtgagctctctatagaagaggcccttttatttgtagtactagggcaagttaaaaagaggctagaagatgaggcagatgatggggcctttgattagggcatgtgcttctggtctaacagtggactctcctgaccacctgtccttttttcttcgaaacactgagggtttgctacttctaatgatttttttcattgcacttcaggtctaaaaaatatgatgcttaggatgacctttgggatttctcagtgttagagcctttaatgttttatgaactttaaaaaacattcctctctgtctgtaggaaattttgcaaaatacagtgaccagagtggagatacagcttagtggtagaaaccagaccttgcaagcctagcacgcacagagccctaggttcagttcctaagtagatcagggcaaaacagatgcctcccttcgcagatctgccagcaacctcactaccaattacccgagggcttcatttcacctgtatctgggtagctctgatgatgacagtgttctaactgtcctgtgagccccagtttgatttggagtcagcagaggcataaaagaagctggactttgtgttccttgaactctcccttacccagaataccactgggttgatctttttcccagaggattttatttgcaaactatttgaaacctggggtggaactttgcatttgcagacatgagaagcactcatcttaatattgagcagtcttcagactttgctgtttttcaggacattttaaaatgaacttaagatgatgtaactgagaaaaatgtttaacaaatcactgatttctgtcagcatttaaagattttaaaatttagttaaaaatgaaaaggaacagttagtactgacgactataaaaatgcccatagtattatggtgtgtgtttataatcccagtactcgggaggctgagaagtatagaaatcttaggaaagtgtggaaatttttgttttcccgcactggtgcgaggattgaaacaagggccctgctagtacttagcttgagcttcatgtctgcccctgctcagggaagggtcccacagggagtctgagggtagcctagactacctagactttaactcagaaaaccagaaatagggctggcaagatgactctgagggtcaagatgcttgttgtcaagcttgatgacctgagttcaatccccaggacccactttgttttggaaggagagaacttactgctacaagttgtcctttgacctctatatgtctctctgctcaaaaacaaacaaacaaacaaacaaaagcccgcaagtgctaaaacatttcctatgactcccaagttttactcgaggatgtgtcatttgatacatgctggttcccaatttaacgttcaggtgaaatgtagacggccacactatgtacactcatcaactagctcagtgctgtcttcatgtcagtatgtgagatgacgagccaggaacacgctgcatcttttctctagagcaatatgcatggtagataaggctttacagtgtaattttagagcaaggaaataggtaaatggatcttagactacattaaaatgtttttttttctctttttgaataaaaattataacttacactacaactatttgttgtgttgcttgtaaaaactcccatttatttttcttcttgttttgtagttgtttattttgtttatgaagtaacattttttctctgaaatttagatagtaggagtagataagtataaagaaaaagtagcagtgtagttgtaacatcaatgtagctataacgtcaatgtatctgtaacatcagcttccttttattgttcattctgtaatatttttgtcgtgacattttgacattttgtgatatatatgtgtgtgtgtactatatatatatatatatataatacaaatttatgtattttcatacttcatattgcattctcaattataaactacttttaaatattgttaattgaacaatatggtacatattagtgagtgtaagtccctctgtataattttgtttgtttttttaagacagggtctcactgagtatatagcccaggttggctttgaactcttgatccttttagctcagcatcctttagtgctgggattacattttaaataactgctttattatctaggttataataagttgatcagtttttttttttccattttttattaggtatttagctcatttacatttccaatgnnnnnnnnnnnnnnnnnnnnnnnnnnnnnnnnnnnnnnnnnnnnnnnnnnnnnnnnnnnnnnnnnnnnnnnnnnnnnnnnnnnnnnnnnnnnnnnnnnnnnnnnnnnnnnnnnnnnnnnnnnnnnnnnnnnnnnnnnnnnnnnnnnnnnnnnnnnnnnnnnnnnnnnnnnnnnnnnnnnnnnnnnnnnnnnnnnnnnnnnnnnnnnnnnnnnnnnnnnnnnnnnnnnnnnnnnnnnnnnnnnnnnnnnnnnnnnnnnntcccccttacccacccacccccactcccctacccacccactccccccctttggccctggcgttcccctgtaccggggcacacaaagtctgcgtgtccaatgggcctctctttccagtgatggccgactaggccatcttttgatacatatgcagctagagtcaagagctcaggggtactggttagttcataatgttgttccacctatagggttgaagatccctttagctccttgggtactttctctagcttgatcagttttttatagtgagcactgctgtcattaaactttgatatgtattcatgactaattctaaggatataaattttcactaggaaaatttggactttcttaaagttcctatcagcaggtttaaagttcagtagaaaggttgtttgatataattgtacagaaatattgcccaatgtaaactactataaaaacctaggaacacatgaagaataaatttagaactaccctttgttggaggctggaaagaagactcagttactaaaagcatttgctgttcttccagagaacctgagtttagtttccagcacccagggttggtggctgtgtgtctccagctctagagggagctttatatatacacacacaaatagaaaaccctaaacttttaattaaaaatacatgcaccccttttccttttccctcaacagcaaatatttatgatattcccactatgtgcaactttttatcataggatctaagaaaaaagaaaagtgtgagacagacaaaaggctgttttaaaaccacattttatcatatttatctgctctgtagcaccaggaaaggtgctgaagcctcctgtctgctagcaagtgttctcccactgagctagacctggggtagggggtgctggtgttggagctagagattacgtgcagacagagacagtcgtgatagaatgaaaagagaaaaggagagtgtaatgttagtaggcatgctgtcaatctggccaacctggagacatttatagcgccgatacctgatgagaatttatagctgattgagtggagtctggctggcaggctgctcatagcacaggcatagcccttcaaaaagagttgttcagagacagtctagagcattaagggaagatccatgcagtatgtgttgaacagcaatgtagaagtgtaagctgaataaatcctttctccccaccttgctttttgtgcaggaatagaaaccctgactaagacaatttgggaactcaacagacaaatgaacgtgcacctgcttacacttgttcctgtgttgtcctcttacatcctctgtacagctttgtaaaccaggcatgttaggtctgttttacatgtgagaaaactgtgcctgagaggaggaacggggaggcagtactgaaggaaggctagtctctgatcttaggaacctctctggttcataaagtacagacaggcattgcagtgcttgtctgtatgttagggtgtaaacagttttcatagtcttatgttggtcatcaggagaaatcacattatgtcactggcagctcgcagggccaggtgtctgttgaggattttctgattgggcactgatgtcctgctggccacagcttgttcctttggggtttgattcttcttcctcttcctcctcttcttcttcctcctcctcctcccctccctcctcctcctnnnnnnnnnnnnnnnnnnnntcttgccacacccaccccaccccaatccatgttctgagaaaaaaacaggtcatgttttcctgtacagtgcctggtaaacacatttgtttctagactggaaggtagtggatactcagtaattattcactgactgaggagtgggcgcagtcagctgagtgagagggaaaggttctggctctgtggtctggttctcactggattgtgtaagcaggaccacattggacttggttttctgagttctgtaaatttgtttctgtgagttggcaagtaactgtggatgaaagttgattttgcttttaagccagctagctgtaattttgttttgctttaaaaagtaatcttttagctgggcagtggtggcgtgtgcctttaattccagcacttggaggcagaagcaggcagatctttcttgagttcaaagccagcctggcctacagagttagtcccaggaaagccagggctacacagagaaaccctgtcttgaaaacaaaaaaacaaaaagcatctcttctctgaatatataattaataacagaaaattggggtaaaagcggaaagtgagctaaaaccctcaccttaaaaggtagcgcacttcatcaccatttagttttgaatctattctcgttttacacgtagttgagactttttatgagtctaatttgagatgcttcttttttctttctttaaaaagccttgtacatttgtttagatacttgttggatttttattgttttttgttttgttttgttgagggatatactctatgtagcctagctttcttcactgtgaactcattatgcaaactaggcaggcttcaaactcagaggtccacatgcccctgcctctgagtgttgaggttaaaggttttactatcactcctggcctattcaggatgtttatattagctttttcctataactcctgataatgtggtttaaaagcatcctgcagtttggtactaatcaaggtactcagaatctcagtattaggtattacagcgtgcactgacacctctgtcctttgcctctatttgaactgcacagggctaggtgggcagagctcgtcatgtggtttttattgtgagcacatctcactaaactgtcactaagggggcatgttattattttgagacatttggaaagtctattgccctgtggcatcaaagttggcagacctcatgacacatggcagctcttcactctgagcaacttgagcatatgtttgagtcagctgaaatcatggcttatgaaagaacatctcatggatacacttggacatgagaaagagtcccagagacatttccaagcatgcaactgtgccagctcgaggcagcccaggccttctgattgaggtacctgggcactgtgtttagagttgtgtgttgatgattcagttattatggtatcattcacaaatagttgtacactctctcatacatctcataccagcccagggacccctgtagttcatcatgctatgcccagctgatgcaaagaacaagctggcagtcctagacagattacctgtaagcacaaattctcttatataaggaagcttcttatcccttgagagcatcaggcgtgcttttactaagatacttgttagttgcttaatttgaaataaagagcaaaacaaaattaaaatctctcatctttatttacttatgtattttgtttaatgtatgagtgtgttgtctgcatgtatacctgtgtggtagaagagaacatcagatcccattacagatggtcatgagtgagaattgaacttaggacctctggaagagcagccagtgttcttaaccactgagtcatctctccagtccaaaatctctcatttttaaaacaacaggaatggaaaagttaagagttacagtgatggatgtaattgactacctatccgtgttgacagaaggctcaggactacgctcctcactgtaatggatggcccaggagacacatgaacctagtgtcctccctcagtcagcactagctcgagctctgcctttttctttagtatgtgttcatgcatgtacatatgcacacatgcctgtgtgcttgtgaaattagttctcttcttttaccttacatggttctaaggattaaattctgtgtatcaggcttgcagagcaagtgccgttacctgctaagccatcttgctgcccctgaatgcttcttaggatcatctgacagtaattgtttaaaggggggaggtgtttaggggtaaccagctactctttggttatatttgaggctggcactacaagaattcaccatgaacccctgtaaacctgctgagaaacccatggtcatgaggctgctgtgaaccgggaatgatgtaccttcaaaatagctttgtttttgcctgtggattagctctgccatcaaagtcagtcacagaggtgtattttttcagtgggcgttggtaattgcagaggctcataactgatcacaatgccaaaaatgactgacttttgaaaagtttgcctccaaatgagacatctggatcacccactccttccagggcccagggagtgtcatagacaaggggctgaggaagaaactaagagatggcagaagcggtggattgtggaacactgtcttctggccagggcatgggcattgttgtcctgaagcctcacagctctgatggtcaggacgagacctacatagcactggacctttagcattctgtcagagggagccagaggagggttcgtgaggccccattcctcccggcagatacaagtagggagcaagagacattttcttcagttagccactggtaagtgtccatgtatatgtaggcagccctaatcaatcttagtgggtgccaaaaaccaaatgaaagaaaaagatgtgatggggccgggaactagttgagatgaggaggacagtggggcaaggaaggactcaggtgggttgaagtgtgagtgttcacatgtatggttattctgtggaaaccccaagtttaggttgggtgtttctcaactttattgagacagtgtctcttgtgaatctgatgtttcctggttctgactagtctcgttagctatcttgctcagggattttctgtctttgcttcccaaatgctgggattgcagtggtttttacatgggtcccaggaaagcacttcatgtcatgaactagctccctagtcccaggttttaattttttagaaacaaaaataattttttccattatcagtaataaaaagaaaaaagcttaaggctggggatgtagtgctagcttgcaaatcatgtgcaaggcctgacttcaaccccagcattgcaaaaataaacaagtaaataaattaaaatgaataagtaagtagataaacccgattctctttaaactgaaagggggaaggtgtttgtttcagatatttcatcatatccattcttagctgtatggtcacatagtctgaagtgctggatattaatgtgagcaagccattgcaaggtttctgtttctccatttgagctgtttctagcttatagaaaagttggtaccaaaaaaaaaaaaaaaagtttccaaaagcttgaaagaaaagctggctgtcttggtgcaggaagagtgtcccaggtgtctggtgggacttagcagtgagttaacacttacacattgctgacatcagtcctcaggccctacctaagtgtcactaaagtgcttcacaatgtcctctgtggcaggccatgcattaaggaatggtgtgctgacttcagttgtacctctttctgtctgggagtttttctgtctttgctggatcttggtaaccctgccagttgtgtgagttaggtggtgttgtttcactcagtgtaggtttccatgtgcatctgtgggagaatcagcacaagggtttgctctgtgttcatagcaccttctaggccaagtgtgattttgatttgtcttctgaacagttactgcttgtttaagtagagccagcaggcgtccttcataataaagttctttatccctttgtaactctgtggtctgtagagagatcctttgagccgatgcaagtgtgtgtctccctggtacttcattttcatctactgtgtcagtagttggctttcctgttttactctgtaggctgtagtctgttagtagctattttgatggtcaggttgctcagtttgcctagtgggtgctccaggtcagctcatgtatctgttggatgcgcctttgccattgttttttaagtgctttgtatattcatgttccaggctcttgggttttcctgttttcaggtacaagtgtgagtgcttagtgttgctgggatgtcattacttctggacccagccagtatgctctgagatgtcatttgcctctctctgaaacctctaccttctatggatggaagcccccgtgagttcaaacccttagttccaatggtgtcccattcctccacttagccttcagtgaggtcttcctgcctcagcctccaagtggggaactactgctatggttaccttattagctgtacagttgtttgagtagtattttccaaatgtaaggactgagttttagcatacagttttttttcctctatagaatatttgtggtaataacccagtaggaaaaaattgttgccttaatttacatcttttttagggaacggaatttttttgtctcatttttttaagagcctggaacatgaatatgcaaagcacttaaaacaaggaaggacaaaggcacatcaaacagatacatgagctgaccctggggtacccactaggcaaactgagcaataaatcccagtaatcaagatgcaaaggcaggcagatttcaggtctgtagaatgagtttcaggacacccaggtccatacagagaaacatgccttgaaaaaccaaaaatattttaaaaatacaaacatacgtatatatttattattgcatttatatatttatatctaatattaattaatttatcttaatattaatgtttatcaattaatattaagccaggcatagtggtatatgctttactctcagcacttgagaagcaaagacagtagggtctttttgagtttgaggccatcctggtttatgtagtgagttctagggcagccagggaaaacaacaaaacaacaaagtttttgagtggaagtactgaggattggtcccagggcttcttgcttgccaggcaggtgctatagtgctgatctgtgtctattgcctccagtttgtctacagtgttcttagaactcatggtagcccaggctgctctcagacccgtggcagtcttctatgttagcttcagtacaagataccacatccagctaggcaacccttagtatatcggtaacgtgtttgtttattgagatggggtttccctgtggtatcttagaactcactctgtagtctggggtggtcttggactcagagatccacctgcctctctttgcctccctctgctggtatcaaagagattcgtcacctcacagtttataattccctttctaatactgagaagtatgactcagagtcaaagcaataaatacaccacaaagcaataaatacaccacggctagagactaagaaacacagagagccctggaatgaaactatctggggatacagctcagctgcagaacgcttgcctagcgtgcatgcagtaagggactggattcagtcccagccactagggtggagaaaaagaatcctgagaatattctcctcacacatgctctgggcaaggcagctcaggggacaaaataaagcataactgagtggggtgggcgggcctgggatggaggcatcaaactttatacggcctactaaagagatttaaagtaacctgcttttcaaatgtgcatacgagtgacaaaagctaaccatatgctaaatcacaaatagagacgcagcatagacaagaagactagaaaatagtagtttgtgatttaaaacatcctaaagccaggaataattcctataaagttaattcttcaaaaacaatgctacagagccacacagcagcctggcattcaggaactgcgagtgtctgtggactggctctctggggactgatctggggtttgaggcctgcagaggctgaaagcatacacggctgccttagtgctcctcagagagcttcccttcccaagaaccaggacagatttcttttccacgtgagctagagaacctacttgtcttaccccataaaaaggcttttgtgtgtgttatttttggaggtgtctgacctatgcatgttttccaacagcaagacccagtataaagtttgatgcctccgtcccaggcccgcccaccccactcagttatgttttattttgtcccctgagctgccttgcccagagcatgtgtgaggagaatattctcaggattctttttctccaccctagtggctgggactgaatccagtcccttactgcatgcacgctaggcgatcgttctgcagctgagctgtatccccagatagtttcattccagggctctctgtgtttcttagtctctagccgtggtgtattgctttcacttggaggttttttcttggggcagggagatcttcttaaagttagaaaggtttatttctatttatttacaatattttttggtttattttattttatttttttttatttatttttttttttttgagacaaggtctctcagctgggtagttgtggtacacacctttaatcccagcactctggaggcagaggcagacaatctttgtgagttcaaggctagtctggtctccaaagtgtgttttaggatggtcagggctacacagagaaagactgtcttgggaaaaacaaaaaaccaaaaaaaaaaaaggggggggggaaggagggagaaagggacagagactttgtgtagtctcctactgcattagctagaacttgctgtgtagacagcttgccttagagtttgcagagatctgcctgcttcttccttctgagtgctgggatgaaaggtgtgtgtcaccacagccccggcctctgtaaaattcttggatgttaggtgattgattggttctgtgtctgtgatagctgtgggagctcctcagctctcttcttccatcacatggtcccaggcattgatctcaggccctcaggcttgtggggaagcacctttccctgtgctgtctgtctgtctctgtctctctgtctctctttctctctctctgatttctgacttttggggtaacaccttattaacaagtgtccttatttatttgaattaattttgggaaatttgagaggctcgtatctagagtcatttgtctgtctggttgttctagcaccatttgttgaaaaggcgttgttccttgccaagattaagatgcgctggccttaagaatgtggtccatatcctgctgtaagcatcgttacaggatggttttaactttttcagctttttaaaaaaatgtatttttatagtgaatggatgtttgcctgtgtgtatgtctgtgtgtgtgcctggtgcccttggaagccagaccagggccgcagaagccccagggtctgattgtctcaggaacccaactttgttcctgtttttcactttgttgtttgtttaatcccatttgtggtcttatgagggattcatagacgttttaggatggatttttctttattccaaaagcacttgagattctaacagacattgcctgactctttggtaatactgactgcttaagtcttgtgttctctggacacaggttatctagatgtttgtgtctttaatttcttttagcaacatcatctgttagttaaaattaatgatgattacagatatttgtgagccactatgtgtgtgctgggaactgaatgaactcagttctctggaagagcagacagtacttttaattacaagccatctcaccagcaacccctccccccttttcgggcttttttttgagtcatggcatctgtgaacagaagtttgactttcctcccatcctgttgaaaggattgatagttctgagtttagcagaaaagttgacttttcccagtaagtgtggtgttagccataggggttttgaagatgctctttattaagttgaggaatttctccttaacagtgcctttcatatttgttttgtccttaagaattgccttccaaaggttggcttttcccgtgcactcttttcctgtgttagttgtcctgcctctgacagcagacttggtgattccaatgtctgttctggctactgcttggagaggcacaaggcagtgccaggctttgtttacctttctgctgtgtctatgccttcaggtttgctgagcgcctgactgcccaagtgacccagtctgccctttgacctcatgccttgtgtcctgcagctttgctatacatgtattacttgtactttcttatgtgtgctttcttttcctttttacacaagtatgctaccatcaatatttttgacttttttttttttttttttttttttgctttactgtaactggctatgactagtaaaatttgttttggtacatgaatgaatattctggctttgttcttgacagtaggggggactattttatcctgaaacatacagtatggtgttaggtaggtttttatttttttacttttttttttttttttttttttaaattgggacagggtttgattacccctggctggcctggaacccactctgtagaccaggtaggacttgttcacagagacccgcctgcttctgtctccaaggtgctgggatcagctttccttcattattccttacagacatcagttgaagcacagcttcccaagcatcttctggggtctggggaatcaggtcggaggggctcctacctaagtgttacctgacagttgttaatagtgagtgagtgggcttcgactgttaactgtctgagtgtgtctgctcagggcttcgactgttaactgtctgagtgtgcctgctcagggcttcgactgttaactggctttcagttcaaaactctttgaacccagcttttttcctgtgtgtgtgtgtgtgttttttttttttttttcccagttttgttttgtttttaaatctcatttgtggtctttcgagggattcatgaaaattttaagatggatttttctttcttccaaaagcacttgagattctgatagacactgtcttatgtttttgactctgtggtaatactgactgcttaagtcttgtgatccctggacacagggtatctagatgtttgtgtcttaaatttcttttagcaaccttgtctgtctgtcagttaaaattaatgtgtatatagtctgattttttttttctttttaccattttctttcttattctttgcatctcttccttccttcattctttagattcaagtgttttcatttggtgtcatttccctttttgaggaattttagggcttcacggctgttcctgagagttaaagagctgtgtcagaggaagtgcccatctctgttcacagggcaggaagtgactgtcggataaagggacttgaatgtgaagtctgttcttagaaaaatatttgataactttagagacagtcaaagtcagtttggtcatccattatgaaactcaggttcgcaagcatcttctgcatttctgggaacccaaatcagaggcaattgtaggtgcaaaagtttattctcctgttaaacttagtagacctaaaaacaatgtctttacttcctgttgatcttacaatttatgggatgaaataaactgcagccactaaaacaaaaatgaatgtacatagagacacatggaataagcaatttctagagagcatgtcttaaacaattttcatgtgtttacaaaggtacttcgtggttattgcaccaagtcaatggcagtagttttatctccaggaggcagtattttgattggttccttaaaaaaatatttatgtatgtgtttataatgcctgtgtatatattttatctgtttgtaattgagttgtctttttgttaagtaagatctgctgtgtgtgcttgtcctgtgcagtgcagggtgaagcattagcacagacactcctagggggctttcatgctcaccaggagcaaatgatgctttctgcacacttaataatgctttcaggggccgaggaaggcggttggttcactcggttactgcacaagcgtgaggtctccagcgcccgtgtgaaagccaggtgcagaggtgcacttctgtagctgcagcacaggggggcagagacaggaggatcatgggagcacacgagccagccaacctcactgcaccccagggagggtcaaagaagacacctgccattgacctctggtctccacatacgcacacacatactcataatgcttttagtgaccagaatgacttaattgtagtacaatttatcacatatatcttaacagtaaacagtgtcttctatttaagaaaacttgcccatcccatgttcataagaatgtgttaaggataaatattagtaggtttattacttatcatttatatttagatctctagtgtacactagatggtgtggaagggctaggagaaggcttgagatatgttaaaaataacaagttatatggtgttttaactaaaaagaccattctcttcttcctgcactgaagggtcaccagtgtttaatcaggtgaccttacactggcagggtgtactcggacaatatgtaagtagtgattgtgatgtgtttgatgtttctagttttggcatatgtcactgatggaggtttttgttgtcttttccaatgccttttagtagaatcaaagcaagataaacagtttgcaagctttgaattattttaatccatgagcagtgttttattattggtgttttcatgttgcttctttgccagcaggaaggcaggatttcttcgtgttttataaaaagaagaaactttacccaagagagggtctagtaacttgccagagtcaagcttgtaacgtaagagcgttgggttgagccttctgtgctgccgttcctcatgagccgtttttgttgccatttctaaagaaacactcttctccctggcttcgttgaatgagttaaagttttatttttaaagggtagtcttgaagagtaattgtacattttagcttgtctctagaagatactgcaaatgtaaataaagaaaatatccaattaaaaaaaagaatatagataataaggaaatactttccagaaacaaacaaacaaacaaacaataaagtaaaataaagctggttaggtgagagttgatgacttttgcctttcttttcctggatgggttggttctgtcccaggaggatgggtgcctttgtgtttggttaaggttctggggaatttgggggacttgggattaactatagctaggctcaagctaggtggtggggcaacttctacagctactgattggatgcctgggaggttggttggctcaggctaggtggtgggacagcagaattctgtcccagtgcccatggttagacagtctcagtacaggtaagagccctaccactgaattacactccagccactatatgtcctcttggaacatttaacattcaagatgttgcctaggtaaccagggttgagggaaagggactcctcaggggtaactttgtagcaccttgagagtcagaaatggtgtgcacatttttctccctgtgtgttctgtaaaggacatgagaaacgtgggaaagagcaaggacactgagtcacacttctgtcggtgtgactgctaggaagaagggacagtagctatctagtatttactgtgatctgtagttgtagggtagcagaatgaacaacccagccacatccattctgtgctggttacagtgcttaaaaggagctttaccaagtgctgggactatctttgacaattttttcccagtgaggtccttatcttctgttttgtggcacagagatgccaggtggcatttagcaggactggatctgctagaaagttaggtagttggcttccatttcctcgagactcaagcaagtgtgtcagccagtgttctttgtgtggatcttgtgcttctcctggtggtctattttaaggcagacacagtttccattacttagcaagtggtagctaccatattgtaagtgtaaccattgtgatttactctgtagttgttgctatggcattgtggtttagtcttggatggatctgacagggtatacttggtcaatatgtaagtagtgattgtgatgtggttggtattcaactacattttatttatttacctttaaagttttttatttgcatgatgagatcctcattcagtgtggctcacacccttttccagggagtagagagatggttaagaacacttgctactcttgtgggggacccaggtggagtttccagcacccacatggcagagcacagcagtttacaacaacagttccggggctcctaggattctcttctaggtgttataggtaccagacatgcacatgatgcacacatacatataggcaaatactcatacaataaaaataattcataaaaaattaagagtcatatcaatcagcaatagttgagcttgtgctcacattttgtggtatacggatggctgtctacctgtagggagagattttaactaacgtctggttaaaaataccaaaacaaagggcctggagagatggctcataggttaagagcactgactgttcttccagaggtcctgagttcaatttccagcaactgcatggtggctcacaaccatctgtactgggatctgatgccctcttctagtgtgtgtctgaagacaactacagtgtactcatgtacataaaacaaataaataaatattttttaaaaaaccaaaacaaacaggtgaaaactgacttatgtgtgtaatagatgtatacacattttcctgtcattagccactgagcagtacagtacaatgggacagttcacaggactttacgtttcatggacaggattgtgaggagactacaggtggcttaaagagcacatatgcagcttaagtgcgaacactgcagttgttctggattttgatttctgaggcggttcctgagatctagtctgaactgataccgagagacaggcgtgtgtctgcatactgtaagttgttcctctacacatctcacagagttttaagttaggctctctgacgtcacagagggagccatatattaccttatgactggaaggtcaggggtgctgtatcaattggctaggggaaaacgggtagtctgaaagcaagatacctgggaactttgagctaggcacaggctttgggagaatgctgatttataccgcagtgatccagttgtacttgtaaataaacctgatagcatcacacatgtgcatgccagaagagtggcagagttatttttaatgctgaaagtgggctgggatgtggcccagtaagtagtgcttggcttgcttgcttgacgtccaggccagaccccaaacaccaaggaagaaaaggaagagctgggatggaagtgactgagtataacagaatccagggccgcatggaggcaagctctctgattttgagctatatcttcagtgataaggaaagcttggaatagtaaacagaaatgaaaaagaatgaactgttggtatacttaaaattttcaatgaaacaatggtaaggtagactgagaaaagttaatatagtgaaattctaggtagagatgataccactgatcactaggaagggctaggaaaagccacggtgagagttgggtgtcatggtgtgcagcacctatgcctcgaagctgagacctgtcttagaaacaaacagaatttagcagtaacttaaacccttttttcccttcagaggtagataagtgacctaaaacacaatcatgactttttactgtccattatgaaatgttattcagtatagttggaaaagtgtattttatcctgtttgtgacctttgtttttcagagacttagaaagcagggttagccgttctttgggtgtttgaatagtgagctgcttgccacaggacttgcccctccacctctgccaccattactatgcctacagcctttgctgtgaatctgcttactctgtgggttaggtgaatgccttacatttactttgtgtttttttaaaacttcaaatgcaggttgcaacccattaagtcgatttgtgggttacagccagtgttggagaaggacctgagagaagcaccaggatgtttagtgttggggtaaaatgcccaagcgactcttagcctctaacctgctgcagaagtcgcaggttttcaataagaattgttccctttagatgctcctccaagtggggaatttccaaagtgaaatatattctgtgttgctccgtggcacctaccagcaaagaaacttccctgcttatctgcaggctaaaagaaagtagagatgaggtgtttggaagcagactgtccgttccattgcttgtcacactgtgtgagaaggctgaaacccttcacattgcctgtggctgcagttcactcagattgattttctgcattccagtctgggaggagagttcaccaagccctgggggagaagacgcctgctgactcttttgtcacagactactacatgtaccttaggggagttttgtcacagactactacatgtaccttagggaagtttttaaagtgtactgtttaaaaaaactgaaatttaatttttaaaaaaaaaatctttggatacatttaatggacatctaactaattgatccagctaaccaattcttaaatgtttcttcctcagtatgaaaatttgtactgcttgatttatcctcggaatgctgggtgggtttgctttgtgggatgaagccaggacccgtgcatgccaggcaaacgttctgccacccagctgtaccagcctctttttccttgtagatctgagaaacatggtctggctaagttgtctctgaaagcttggaactcatcctgtagtgtactctggctttagacccaatatcttgtctcagcctcccaaccacctgggattccaggcccttccacaggcccagtgttgaatagtgtttttaaaggccacatccttggtgtctgtagtttccttgtgatggtagaaaagggctgtttaaaacaagattgggctccttgtaggactccagctagctacgtgtgccctgttactgaggccttcatgcatagaggaagaagctggctttgaagtctggtacttactgatgggaaacatcaggccagttgaataatagtatttctgagttgtggttctcatcattgttaaactcaaatttgtgtacttggcagatagatagggttgttgttgtaatgaatagagggaattcacatacagggtttaaaagtttcaaagcatgcttattgagggaacagtcattaaattgtaataactctttttgaccagagcaatgggttggtgggtaacggtaaagtctgatgagtttggtccctggaacccacatggtaggcaggagagaagactgcaggctgccctctgacttctgcatgtgggctatggtgctttcacacccaaaatcttttaaatggcaactcttgtcatttctattcttggtagaactgcaaggtaaggtatgtagtgatgtttctaatgcaattgaatattacttgcagaaggcatcagcagtgtgttagattctagtggcagttctggaatcttgtatagtctgttgtactgtgattaattaataagggttccttccttagcttccacaggccacatagacacaccatgttgccacagcaatgtggtttaaacagagacataaaattactcaaagaattataaaagttttgttaaagcctacgaatctctagtaagaactcttgttattaaagtttctcacacaactgatgtgatggtaagcagggcttagcccagaaggtagggaggtaaacatatacagtttgactgtgtagatgcaccacctaccctgtagtataagctggcatcagacccagccatcttgtctcagccttccaagaacctgcgattacaggcccttccattggggccaagtgcgcaatggcgctatgtggctgtgctacagccatgcatatgtgaagagcctccagtactgtgtgggccaagcaggcagcacagcactgcagtgttctctgaaggccagtttactgcctttcaagtgagcagggtaagtttgccctccccttccctgaagtggcaatccagattgccacgctacaggaacagatagaagcctggggtaccctttctttcctgtaatgttcacagcagccgccataacaaaacattttctgtccctgaatatcagtagtggccaggccaaccttccaagagtccccctgctgcttcctggatggttttatttgttggtgggttcagaaaaggagggtctaaatttttactcatttgcatattgtgctctggcagacaggagacaagaagtgattacaagcaggcaggaagtgaggaaggtgcgtggatattcaaagaatcctcctttcccaggagctctgggacttgggggtttcacctctcagatgggctgactccatggtttcacctgacaatttggatgagtataactgaccttggctccacccaaaccttgtacctgtgggtatttaagaagtaatataaaaatatgtgcacgcatgggatgggtgggtgggtgtgcatgcacgagtgtaatgttatgtagaggactgagaaagatgccggagaagtggcttctgcttgtgactgtcaaaactgccctttctctttagtcagagctgtttgtctgaagtctagagacatgctgagctattgttagcagagattactactgagggctgttcaccctagcttgagggaagcaagtctgactaactaggtctgactcaagagttctagttccttacagaatgtaaaggtgactgtgtgtgctcatgtacatagacagtgcttctcaaacttacttagaccccgagtcatctctcatgccatgtaggattaaataccatttagaagtgattcactgggaatgtggtccaatggtcaggtgctttctagcagaatgaggatccatgtttgatctgtagagatgagtagaagtcatgacacccagcctcatcaggatagcttgaatggtggtctctattgtagcttttctcaaatgtgtataagagaagctgggaaatgtataggggccaggtttagtctggccctcagggtttcactgaagtatatacacttttagcctctgtaatttagcatgaagagaatagttgatatttcttcacaagagctgccttcctctcagttgtataaataatgccgttgctattgtggaacaggtgaattaaaacctctcactgtgatgatgctattactagtgtagtctgcagaactcagacattcttgcttctttcttgagtgaaaaacatgacagtgcttaggtcactgccatactctggcagtaaggaaccaagatactgtccagattgcagagggtttagcgtagactataatactggccttatgagtgtcacaaggactctggctctctgcttgcacttgacttctcatcctctccgtgctctccttgtgtggccaggcctgcttctgtctccttgccattctttttatttaacttttttattgattctttatgcatgtcacatcatgtaccaccaatcccatttgtcgtccttcatatcttcccgttgcccttgcaacctccacccaaaagacaataaacaaaactcaaacccaaacaaaccaaacaaaaaaccccatcttgtcatggaagctgtagtgtgtcacagtgtcgcacagtgtagccttttatgcatacatctttgcttgcaaatgttcattgcagtgagtcattggtctggtttaaggcctctggcttcttctacaccatcaatactggaacctcaccaggacttctctcagatgtcctgttgttgccccgcgtcatggagatccaacagctttggagctacagtactggccctttcatgtgctccagcagatcatagatgcagtagatctgtgttcacttctcctgtcttctgcttcaggactgcccactgctgcccttggttttgagcactaggacatagtgcttgttccccacaccccctttctcctgtcctctgtcactggccttgacattctgggacttttaagattttattaaggaagaatttccctccacagccattctgctctgcccaggacagtgacgttgtaaacatgtgcaaaggaaaccttggaagtagtgtcctcaaagtagggaagaagggcttctttgatctcaccacaccctgtggcccaccatttgatgagtgatttcatttgcctaaggtcccacaatgagtgaccaagttaagattccagtgtctcggtttggttcgcctattgtgtgtcattgacatagacagcagtgactcatattcagtgctgactcgtgtcaactgttgcagattgtccattgctctgttgggaagtactctgggttgagtccaaacattttagaacttaaaggataaaggaaaagtgggcagtttgagaaaggttattcctgaagatgtaagcagagatccccttggaaatttttttttcctttagtttttcgagacagggtatctctgtgcagccctggctgtcctggaannnnnnnnnnnnnnnnnnnnnnnnnnnnnnnnnnnnnnnnnnnnnnnnnnnnnnnnnnnnnnnnnnnnnnnnnnnnnnnnnnnnnnnnnnnnnnnnnnnnnnnnnnnnnnnnnnnnnnnnnnnnnnnnnnnnnnnnnnnnnnnnnnnnnnnnnnnnnnnnnnnnnnnnnnnnnnnnnnnnnnnnnnnnnnnnnnnnnnnnnnnnnnnnnnnnnnnnnnnnnnnnnnnnnnnnnnnnnnnnnnnnnnnnnnnnnnnnnnnnnnnnnnnnnnnnnnnnnnnnnnnnnnnnnnnnnnnnnnnnnnnnnnnnnnnnnnnnnnnnnnnnnnnnnnnnnnnnnnnnnnnnnnnnnnnnnncccccaccttccccccaaccgcccccccccccccaaaaaaaaaagagttctaggtttgggatggaaccttagagcaccctggctgccagtgaggtgtctgtcgctcctttccgagcactgcccacccacttccccttctcattaaggctccatttagcttttaggtagcagcttcaaaaagggaaaacccagtcatgtataatctccagttaatgggcatctgttgagcctctaggttaccaaagggataattacacagtacttctttgtgtagtaaacacaaaaaagaaaagaaaatgtgttccaaaggcaagtcagactgttagtgaccaacagcatcctcttcttgagggagaaaattggggcagtcatctactcttgctgggggagatggcaaggcaaggccattccccagatcagctatggagcaagtgggagggaggccttgtctctttaattgctggtgggtgggatgcattactgaacagcagacgttctaggagacattgtgtgcaactattgggaacttgtgagtctctgagtttctgccacaagccatagaacagcagtgatgatgaaggttaccccacaagcttcatgcccaggctctgtaagtgaagactgtatgcttactattgatttaggaggatagcttcctgacccagcatggtgtgtgtgagcaacaagccagagttcttgggtttgtatccctaaactctagtttgggatctcaaagtttatgtcttgtagtcatttaggttttgcagaacttggcataattcaaataacttgtttttccccctttagaacacttcagttatggaagatcaaaatgaagatgagtccccaaagaaaagtgctctttggcaggtaggcatgataagctagcagatgactgtagataaagctctgcctttccttatgtcctcaccgagagcagaacccagcctctgttttgtatagggttgccagattcagaagccaccctgcttgtccaccgttccctctggggagtatccttactgctagtaaagcactttggagttttctggaagattccaaaaaggcagtatcctgaaataccaacttcgtggcctaagatagactgtgtggaaatcctccatcacggggatggtggaggcttagagccaagtgtagactgctgcttttctctgtctgcagcccaccctcctccctgctctccctatgagggtctgtctcctttcagatcagtctcctttcctggctctctcactttcctgcccaatctccccagctttgtggtgggtgtctggggagcacacagaccttcatggtttagtgttttcactaagcatgctggtgagcatttttttcctttgtgaggacatgagtaaaggcacagtatatataaaggaaaaaaaagtgacctgggcacatttgaaaactataaagtaggttagttagctagaatagtgcacgcccagcaagtgtaagatgacgtggaccaaggtgaaataatggcagcaaggctgcagggtttgtctgggccacggggtctgggatagtagctggaaatgcactcctaagcacacaagtgcctgtttgtctttttgaacattatgtatgtgtaagaggaacatgcgcgaccttctgcaccgctttgctgtactgctcttcactgtgacctttagtttactgtggctcccagcgccttagcacccaggttccttcatctgttcatctcctcattggttggttactcagtggaaactagatggtaaatgagaaagtggatgtgggaatactgtgatctaggaagcggggcacaggtgtaggctgtcaccatcattctgtttaacctgttgtgaccgcagaggttctggggaattgtcagtaggggtggagtaagagaggccgagcacatggggtctttgagactccacagttggcgttgccgtgtgcagcctcattctgtcctggttattgtgctcacaccaccataaaaccctgcatatctcgcctttgctccttcccattattttcaaagctgtcagtggttagtccagcctcactgtatttaaagctggaccgcaacagctacactgcagtgttgctgtgcagaaagataagttgtgatttgcattaccaatgcttgtaattagacacttatattttcctgttacaatgttgtgatactgttatgcttaaaatagcattgagatctccttttatgtttatccttttatacttgatatcttatgtaagatccccttatatatctccctttatatttgctgatatttatcatagcaatgagtttttactttgtcttaagttcttctattgaggcaggtagatgaggagtcttccaacaaacagaacttttagaatgcctgttcaatgctgccctctggtggtaacagaggccaattaaattatccctcattccgggaattggggatgacatggagatgtggaaatggatggttaatataaattaagtagaagatgagtgctttctgaccttgctgtaaatgtagaaataaaagcatacttgagatgtgaaactgaaattatttttgtcaaggaaggtcagaagtttcctttgaagtttacagaggttctcgtgtgtgtgtgtgtgtgtgtgtgtgtgtgtgtgtgtgtgtgtgtgtgtggtctagtttaatatgagagcatactattaacaagagctcttcattccttgtaagatgttgggaacaagtttctaatggaagtaatggacatttgtaattcacctcttcaggtctgaaaatcctctagggtcttactttctgttagtgtatgcacataggctatcagaggacagatggcttggcagtggtatgacaaaacactgatgtggctaggtgatggcacacacctttaattccaacactcaggaggcagaggcaggtgtatctctgaccagcctggtctacagagtgagctccaggacagccagggccagacacctcgtctcgaaaaaccaaaccaaaccaaagacctgatgtggcttttaaatagcattatagtggttgtggctttgaatctagggatgtagactgttattgttatggtgatgggggagtatatgggtacatggttgtgagtatgcagatatgtctggacattgtcttctgttgtttggccagcagttactaaccatctgaagtaatatggaagggtcaaaactattaggagaatagccgggcgtggtggcacacgcctttaatcccagcacttgggaagcagaggcaggcagatctctgagttcgaggccagcctggtctacaaagtgagttccaggacagccagggctacacagagaaaccctgtctcgaaaaacaaaacaaaacaaaacaaaaaactattaggagaaaatgaagctttatagatggatttacttttaggcttctcctctatttagatgggggggagggggtgtctcagtatgatcccttaaaatgcagtctggtctagcagactcagcagcacttggaaacttaaaatacagattctgaggctctcatccagacagatggagctcgaatctgtgttaccaggcactcagctactccagcgcttgctcaggtgtgtgaaccaaccctgctctggttttgattgctcttggtgcctatggtcagctgcagtctaaacacactaaatgaaaaatttcacaagtgtaggtagggagaacatatgtacatattgtactatattgttttaagtattttgttattgtcaatatttttgctatgcataatttataagccctgctttatcattggtatgtatgtatgtatgtatgtatgtatatatgtatgtaaaggcagaaatatgtatgtagtgtttgggtccatggtttcaggcctgatgtcttggaaatatcttttttttttcctccttttttcttttctttttttttttttattagatattttctttatttacatttcaaatgctatcccgaaagttccctataccctacctccggaaatatcttgaatataagagagacattaacttttaattttgaggacgtggagacagattactactagccaactagatgctggcttatcaaattgggcatttagtgcctctaagatgatcatctccaaatgagttttctaatgctggagaggtggtatggtacgcaatggggaatagtgagctaaggcaccggtcatctttacaaacagctgtaacttcagtaattactatggttgttaatttgaggctatgggccctcaatgcattttaattgtgtgataaatggatgaacaaaagagcttaatttgacttaggttcaaattggtattttgaggctaaatccataggacaaaagaaatttctaatgaaattgattacatgcctttctagctaattattgtttctttgtttttccaaaacagatcagtaatggaacgtcatctgtgattgtctccagaaagaggccgtcagaggggaactaccagaaagaaaaggacttgtgcattaagtactttgaccagtggtctgaatcagatcaggtggaatttgtggagcatcttatctcacggatgtgtcattatcagcatggacatattaactcttacctgaagcccatgttgcagcgggactttatcactgctttaccaggtaggtaactgcacttctcacggttgatgggcagtgtgtggtgcctagccctcagtgctggcagtgccaagtgtgctctgtgaagtgaatggcagaatgagtgtgtacactgtgagttgccatttctggacagccactgtatttgtagttagattttaatccttcctcaagtgccatgtagtaagatagagtagatgaatttttaggaaacaaaggccacttttgtgattgatcttgctgcgtattagtcaatgctgttgctttatttagttgcttttctgtttttaaagatacactatttaattttggtatgtagacaatctgtattttacatgtaattttaagaatgtatggagcgaggcatggcaactcatgcctgttctcccaaaacttgttaggttaaaatggggggattattttgaggccagccagaggacatacaaaatacatgtgcacacatgtgcgcatgcgcgcacacacacacacgtctacttttccttaagtctgaatcttggcaagcctcaaagagttgagattgtccccttgtctgaagtgatacttaggcaatggccaagaaaccgaggaaactggtaatgtgtctttgttaatgtttttttttttttcctttctttttttgtttcaatttatttattttacgtatgagtgtctgcatgtatatctgtgtgcccatggaggtcacaagagtgttgggtactctggaactggaattagaggtggctatgagccgctgtggctgggaatcaacctgggtccttttcaagagcagcaagtgctcttaacctctaggccatctctccagcctgttaacgtttgttgacactgctttgtctactccttagtgaagcccctccatcctctctcatgcatgtgcacttatgggtagttttctgattaagtgttacttgtatttatgacagttttagtcctgagcaaagtctttaagaaaaaaaaagtacagagaactcttatgctcctacctgtgcccatgcctcccacagcacagcatctgtactgtcattgtcctgctgcatttgtgttcatgggggaacctattgataaaccatcatcccctgactccatagtagacattaacctgttgtggtacgattagactgtgttacatgcaaacctgcacccatcactctcatggaaggtctttactttgtcttcagtttggttggtaagatgtagagctctgacttgtgaagagaatgttggttctgtagcgcttactgccgccatgccatgccagtacaggtctaggagcctcccacgatgggtcagtactactgcaacagacctgcctcaggaacaacaggtttgcagctgatggtgctttctttcatagcacacagaggacctggctgagctgtagttctagcctggaacttggattacaagtgacaaggaagcttctaatgtcttctcactcttctttcagaatttatgagtttgttttctacactgagagtataaagaatatttgagagttagcttgactctgctgatctttcaatgacagactagtgtcccgtcttccattagttgtcttctagaaaagcaaatagaaaccccttccatccagaattacaacatttagttgcttagtccagtttctcattaggcagattataaaatgacaaggatcagagaaattggatgacattccctcgggtcacctggcttgtttgccatgtgctattgtaaaatgatggtggacagatatcgcttcaaagttagcacaaaggatgaaatcactcagttaagattactctgggagagtccttaagttgatcatgaatgttaaataagtggatcataactgtctttgtttgttgtctattgtgatcaagcatcatgttcagaagcaacttagaaaggaaagggtttatctcatcctacagcctgcagtcctccattgagggaagccagggcaggagctgaagcagagaccacgaggaccactgcctaccaactggcatgctgagtttgctttctttcataactctagcctttgtcaagttgatgaaaaacctcaccaggacagtaactcaattcacgtttagtgatggaggatgagaagaagggtctttcattgtgagagagaaaagtctaggtgaatggattcttgtgtgtgcctcctctgtgttgctggaactccagagccctgccattgttctgcaccaagaaaggtcagggaagtctttcaagttgctgactgtactgctcctcatcagtgacgaccaacgaatgaggccaagcctccattctcttaagaaaatctgctgattgtttgtttttcttgttttggttttattttcttctctctaatttgctttccaaatggtttagatgtgggcaagtgccccttatgtttagagaatagccacaaggtggcactgttgaagttcccctgatggtttccagcagccccttctggggtgtggggtgtgcacagccttggagaaggggcagaacagatgaacatgtgttatgtatataaatatggttagtataattgcgaacaattcagttttcattacagcgaattttaaggcattgtccatatctcttttaacgtggaattttgtggtattgaatgttatatgaaatgaatggactgttggctgggacatggaaatatttctgttaaaatgctatttgttttaacaggatttgatctgaacatatatacatatgtcagtatatttcacacacgagaatctaatagcgaaggacaagctggcccagctgattgtgtttgtgaagagtagacttggactaaccctggcattagttcttctcccaggcctatgctagtagagcattgtggggaaaagatgtctgcacgcacttaatgtaggtttaataagatggagaacattttcagtcattctgctagttcagtgtccagtcattcagtaagtatctggagtttggattttcactgttaagatcgacaatcatggtgtcctgcggagctccgagcacgtgcggtggccagctgccagtttgaggcgatgtctgccctggatgacttgaaagtagggtggtcttcaccaggctaaaagaagtaatgatccataacagggtgcactgtggttctagatctgaatgagatcgcgttcatcaggacttcaggtttctgacaacactgttttgagtaatgtatatatggtctctgtaatgtagaggtacttcagttcagatggggaaagttgagtttgctttagaggattgcagaactgtgatgtaattccagagaatgcttgtcaagtccagctacgctttggcagatgaggcagtgagagagctcacccatggccactgagctgcatatctagctataatttttagagggactagatggtgtctgtggactacatgtggccggctacttgctaattaaaaagggatttcagacatctatgtggatggtagccatcttaggacagcttagaatgtttaggatattgctttttaaaagcaaagttttatataaaggttcctataatggcccagatagtaaatattaatactgtctttggttttgcaactatgttgcttttgtgtgaaaaataatgaacttggtttttttgtgtcatcaaataaatgaacttggttatattccaataaaacataactgataaacacttgaaaaaaaaaaaaaaagatcgacaatcattttaaacttttggttgtgaaaaacattagttctaaaaaaaaaaaaaaaaaaaaaactgtctctagtcttgactttttaaaaatgcttactgtgaacattgtacctgtcagtgtaagaaaagtggaaaatgtttgtggtctctggctccttttggttcagtggaaaaagtgataattatgatacgcttttctaaaaatcatggtaaatgtttagtctgcaatgtcaatttctgcaggctaagtttgtggtttgtaagaactgttgttaaagggaaaatttataccatttaaaatagaggcagattgtacttcaaaaaagatgataagtcttgctgattagtttgatgaggtatctgtgtgattaaaaatgttgaaatgcttagcttcctgctcatggtttattcatttgtctagcccccaactaaggacagaaaaccatcacagactataaatatgatagactagatcataggtcacagggatgggcaggaatgagccaaggcttcaggttgggtacagggccaaagacccagcatcacaaatggaagagtgtgctcgctagaactagatggctagccccaagacttcagtcccagactccacacacagtagcccatcctcatctatgtgggtgcaggggtaacctcttagtgggggagggctaaagacagtgtgtctgcaatgtgggtgtggcgaggaagggctttcaccttgtcatttggttttctgccttgggtttgtgacctacgctgattttcacttcctttttagcccttagagtcgcacataaccaggaaaggcttcggcactggttgtaggtggttgttttattgtaaaaggtttttttaataactaaagctgtgactcgtgaagcaaggagcagcagaggttgggtgtttctttacagctgctctttgagggtctgtaaactactgaagttactgtatgatctaagcagctgtgttaagctggtctcaccaagggcattgagctgacatcacacatttgaggttggttttgatatggtagtttttacacattgaactttgaaatcagtgccttttaattgtttgagtttattgctgacattttctggattctcatgaggtgcctacaattagtaccagcagcactctcagaaatgtgcgtgcactatcagtctatattctgctgaggtagtgatgtgtcctcctgttgccttaggagggggaagggaggctctatcagcacgatagagtaataagagccagacacactgctgaggaaaatacttggtttaacacttcaaagccctggctaaagatcaccttgtgttcgttgcataacttctttttcctcgatggacttgaaacaagaaagttgcaagattcgaatggctcagttaaggaggtttgaggggagtggatgagagaagattaaggacattattgaatacctgctacatacctggccctttaaatctcctagtagccttcccagtggacttgagagatggcttccccgtaaaatgtggatatttagaacacttaccttggagagttactttacagattatatgagataacttctttcagcacttaatattgttcctatattatggactaatgatattaaaaaaggatagtagatttgcttatggccactcacatagcagttgactaaaataaaatgtaagtcaggttacctggtttggcagccattgtgtttccataagactaaatcatgctgcctcctgtaaggacaatgggagtttaaggtagtaaccacaggaaacgaatctgaccttaggtgtcactagggcagtgtttaaatgagctcatggcatttggaagaggagatacgtaagggatttgcttatgcaagaatttattaatagcttagttgtgtgagcaatcagtgaggaggaaagatccaagactactagggtacctttgctgtaaaccagtagtccctcatttgtcagaattaggtggcatttctaagagatggattgctaggctgcctcctccagagactggttcgttaggaagtgtgagggatccattctgttgctgtgcatttgaaagtcagtgactctagttgattccagtccagtccacggctttagtatctcatggctgcaggctctggcttgtcagaaaagtggaagtttgaatgctgttctcctgccgcttcacaggtcatgggacctgtcactgagacctggaaaggcagccgcctttctaatgcatgtttgccttgctatttgtttcatctttccaagaataagagggtttgaaaggggaattggttaaggcatgcttataaccaattaggaggatccagttagtgggggaaagtcatgggagtcatgttaaagtgactgttaacaccccgtgtgggaggaagtccagtgagcctccagtttaggaaattagagaaagttttaaggtaggtgtgattaagcatggttttaatgtggttatagttgggataagtatagactcggcttagagcagctgagagattctgtaatttcaatccatagttgtagctgtggcatggaaagagaggcagtcctgtgtgactacacatagaagatataggagaagggcacatgaacatgtggctcacgaaggtgtcaggactttggagaatggtgtcaagaagaacacagagttggacctcaggtcagattgtccagataaggagagttgaggacaaagtattccagccatctggaggggagtcacaaggaatgtagggataacgtgctggaaacagatggcaggttggtctatttccactgtgctttttacctgttctttctgtctcttaaacaataagtgaaagaaaaggtatgggaagttctgagaagtgattgagtgttggtgcagctgggctcgtagtccagcctggtggtgtccaaaggagactattggacaagtctccaggttttaagaactggggagggccgggcagtggtggcgcacgcctttaatcccagcactcgggaggcagaggccggcggatttctgtgttcgaggccagcctggtctacaaagtgagttccaggacagcctgggctatacagagaaaccctgtctttaaaaaaaaaaaaaaaagagctggggagctatttgtaggatgcagctgtttacactggattttactcttcagttcatcttgattaaaaagttaaagtcgtctgaaaggattaggaaggatgggtaatcttcaaaagagcgaatgcgagataatgaaagatctctcggataagggttttagagctggcagttaatttattaatgtgtgttttgtaatttttctccaatgagcatggattgtatatggtaagaaggcacgcaaagcaattggtgccgacttgtaactgaaaggttgcaaaactagtaagtaccagtaagggagagggagtgagcaaggttcagtaagagggagagcaagtgagtgaggttcagttggctcctcctcatctgggtactcttaccagaataaaagtcagaagagtgatctaaagatggcagtgtcttcatgggaacgtctccagatgcccctgtggactgaagtgacagacttggactggactatttagatgtcttgcagagctggcagctgagctttgggaccctggagtattaccagattctttaggaatggcctgctgaggagagcagctgtcctgggtgctgtccttggttctgacccatttcctatgcttgtactcagctgtgagtaaagatagtctgctctttatgtccgtctgcagaggaatacccccttctggatgctaaaacccagagttctagagattgcagtggctaggtcacatggaaaatttgaagctgaattatagtagggataagcataaagtgctgctgactcttatcccaccagtggtcaaacaaagaattaaagggagttgttttaatagcaactggggaaaaggacatagattttattttaacttgtaactgtctcaggagtctgctgtgctgtggccattagggaaaggatgccagtctttgattgtatgtaaggttattcaagtaaactggagagcagtggtgccacatagcctcagggtggagcttgggtcttagatctagtccaggatagaattggtatatgaaaggcttgggaactgccatcagcagtgtggcctgtcattctgagacatttgtaaagcatgcctgctgcctccttcctccaactgaaatgtcaggcgtgggcgcccagtacatgtgggtcagaaagaattccttgtgtgtcgttttgtgttgacactctcacagccagtgattcttgtccatgctctggagagaaggaaatggaggcaacaactgctgctaactgaggcagagttgtttcagtgtttgctttgtgtcgtagaaccaacagtgcatgatgaacttgagacatagaatttgaacattctgtgcttggggatgagttgtgttttctgtagctacagtggacacacctagaagtacaagaaggtttataacagatggtgacagtgcagcccatggtgatcttccatggcacagctcaggcagagctgtatcttgagtgaatttcttttcaaggcccttgcatttttctcttacttatatatgctgtgtacacgtgtgcgtttgcgtgcatgcatgtgtgtgtctctgtgtgtgtataccacaacacgccagactcttatggaggtaagaggacaactttgggagttggttatctccttccaggctcctttcccaaagtcctgaagtaagcaagcgcgttgcttttgagggttcttgcccatctgctcagaatagaaaatagttctctctcagagggagatggagagattgacatgaacacttttactttttaagatttacttattttatgtatatgaggacactgtagctgtcttcagacacaccagaatagggcataggatcccattacaacatggttgtgagccaccatgtggttgttgggatttgaactcaggacctctggaagagcagtcagtgctcttaaccactgagccatctctcccgatgcgtacacttttaattcttcacatgccttcaaaaatgggtcagtcttaccttttggctcccgtggctatcaagagttgatggtggagtgtggttaattgctcatgttcataaatatgagcaacaagcacaggttttgaagcaagaagtcttgagtttccatcctggcttcaccacagagaatagcacaagagcttgtgccgtggctttaactttggagacccattgacctgtaaaggtttggtagaaaaatggggatggggttctgaaaattctgaggacagagctgtcccagacagctctcatggcaagaacagctgctgccggctatacctgtttatgagccttttcacgccttgctcttgcgtgttgtaccggcctctggtttacttagtttttactttaaaagaagggctggtctgtcttctgccctacccattcctttcattgctttcctgttttatagagcaaggcttagatcacatagcagaaaacattctctcctacctggatgccaggtctctgtgtgcagcagagctggtgtgtaaagaatggcagcgagtgatctcagaagggannnnnnnnnnnnnnnnnnnntctatttaaccaaggaagatattgataggttaaagctgtttgaatttcccccttctgacatggatttgttattataaagcttttaatacctcatataggtgatatattcatcctttttaaatctataaatttatgctttttcccatcacaaaaaggtaaggaaaaaatgtgagcgttggagctagagagatccctcagtagataagaacattggctcttcgttcagaggatctcggttcagttcccagcaactacctggtagtttacaatattctggtgctccatttccagaggatctgatgccctcttctggcctccacaggcaccaggcacacatgtggtacacagacatatatacaagcaaaccccatacataaaacaaattttaaaggaaaatatgagagtctagtaatgttacttatttgtttttgattgctaggaattgaaccaactgctctgtcacagagctattccagcagcctgtgttatgtcatttctgtttttattactgctcatggggaagaatgaaaacacaacatagggttttctaggaaagcctgtgagcttaacgcagtttgatagtcctgtgcattgatagcatagagaaagttacagacagaggcacaagactgggaagatggagggtgaggctgcattttttgtgatgggaggaagtctaatgtgaggtaagacaattcacaagcttcattagcacttactcttcatgtgggcgcagtataacatagaccacaacacgagcaaggcacagtcctcaggaagaagggctgagtgtggctaataggcatgaggaattttgaaaagtgatagaacgctaattgttctcctgatgctaactctagcaaggatttttcatttttcatagtgaataaaaccataaaaatatatttgatagtgaaagaataaaatccagtgtgaaggttcacagcttcaaaatgcctattgtaatttttaagaggttcattaaaatgtatatacttgcaactgttcatttcagtgtgttctgttttttatttgcaagattttactaacaaagtttatagggggaagaaagctctaaagtgagagtttaattatttgtgtgacagtactcagaaaataaaagaccagcatcgtgccagaactagattgtctctaccatggaaactacagtttattagaaaccctccttttgaactgttaacactcagtgcaagaaaaagacacaaaacacgggctgtccttataagcatgcttaaataaaatccctacttttatgtgcaaaaatgtaacatctgtttgttttcatttgccagggatcagtacctgtttaaaaacagacctacagatggccctcccaactcattttatagatcattatacccaaagattatccaggacatagaggtaactgtttacttaattgtctcacacccttgggagcttattctcaactttttatattgtttaagtccttttgttctaaactcatggaactcatactttttaaaagttgagttttggaaataaatgtcacagtgtgtaatctatagctgttcttcagagctgatcacacctttttatagaaatacaacctttttaaaacacgaaatgcttctgtaaggctgccagttgattaaaacctttatccaagataaactatattctaatttgataaattttccacaatccaaggcccagtgttttaggtaaacatacttttatatttttgaaccatctctgtagaaggcatgcatgtactctcctcttaagtcatgcataatttttcataaaaatggctcaggttattctaagccatttatgaaatgggctttgtgaagtaggttatgctttggggccgttgtgaagtttagtgtaacttagtgaccagcagagctctgtgcttttgctaagagatgttagctgtgcttgatattgtcagtgtgctctcattcacttttattattcagccctttgccttaaaccaggatagacacacgcacaggtacttctcataactctttcacatatgttcttgtctgttactggtttctccactgtttcctctttggcagaaaagttgagctttcgctggccagagctgtatcgcccataaagttacagccaatttccaaactgtgaagtaatcctcttccccaggtgatgaacataaaagttactgtgccaaaatttgttaatggagaaacatgcctttgtcgaattcaacccccaccccttctcaggcagatgtgaactaatggatgcatcccattaatggttcatctgtgtgtgaccggatatcattatttaaaaagaggaaactcttgtcttgagtgtatgctctctaaacgacttaaaaactaatcttttagggagggctcaataattttaaaccattgctacataaagtttaagaattaattgacctattgttcaaaacttggactaatgtcctgcagtgcttagtgggtgacatagagcagactgtcattacaggttagggtttgtgcatttcagaagggaagaggctgcaccaagggtcagtgcaccaagacagtgtgtatatgcacatcttggaaatgcccttctgttctttggcaggggtaactgctgagagactctcatactttccatgagtggtctcaagaaagcattccttctgaggggatgttgtttaaagctgttcattaataaacaggaactggggagaacctttatcagattgaggtttggtgatgtagattatttagtcatcatgactactgttataattgacagtatgacagcacttaccataaccatttcctcaggctgaaaaaatactttagagttagcaaaggaggcagatgtgatgggaaatggagccatgaggaaacactgtttgacacaaaaacctctgcatcatggtggtcttccccgtggttcttaaagtgtggtttgggaaaacccactgcctggccacagagtctcctccaaatttttgtggctaagtttcttagtatgagggatgacgcttatacttcagtgtactcactaatagtaatagtgacagaaatggtgtaccactaataggacacttacttgtaccagatactttgtttagtagtttatagcataccttctcattcgatagtctagacactctgaaaagtaggtcaagtccacattgaaaaatctaagaaacataggctgataaggtaaactgttaccctggatcacagtgagtggcacagcccataaccaaccacatactctcatggtcacgttatcgagtggtacagtctgcagccacccacatattctaacaaacgtattctaaattctgagtggtagagcctacaaccagccacatacactctggctcatcatacaagacctttgcagtatggctcagtggcactacctctgaacagagcttcactctgttttaggagtgtgctgtgttctgtcagggcaggcataaacgtggaaattctttcctctgtgacatctgtgaggcacacagatgagcttgtccatatgactgctgtgaaagtatcaccatttccaaagtagaaagtcgaggaagtgaaggagaaaggcatgctttattcctgtagacttgtcttcctctgagtatgtggacactcagcgccttgactgttcagacgagatcccgggccttgctttagctctgttagggaaaaggtagcactgaaggttcttaagcacactgcccgagataaaggaacacgagagagtgtcctggcctccctggcctgcacgcagctccgtctgttctacaccccacagatcggctcctcctcgatcccactcttgttcccctctgctcgccttgacagcttgctgactcctcaagtacaacgctctcagcttgggctatcatgagcacagaggaagacgttcctctcccaactttgccttccacatggagccaccagaaattggctgtattttaaggaaaaaatggacaacctggttttgtgtggctagttcctgctgttcagaaaatggggacgtgagaatcagagtctgaggagaatagttcacattcttcactttctgaaaaggttcctctctcctgggtgttcttgccacacagagggtttgcaggcctctaaattgaaaaggaactcctggcaaacctgaggcatgtcccgccaagagggcagccacactttcctagagtccttgtcagtgctgttttcaggggagctcactgtccactcaccacaagggacttggctaggtggcctccaggctctgtccaccctgcactcccagatgcctctgcagatggaagggtattgctcttacaagcaaactaatgtcctgatctaggatttttcttttctgtcattccagagtagtgactctgtctatttaccgggtaagtggctttgaaggactccacttggagctggccatggggaaaatgacggtgtgttgtatcacaccttttaataaaccacatttcattcagggaaagtggaaagctttttttgtggtttgcaaacttgatattaacattgtcccaactagaaaatgctgaaacttgcccacccactcagttatgtttaggcttctaaaaataatgttatttctccatactcagacatctgttttcactctattgccaatttaaatgccgctgtatactctgtatatcatggctactttcccagtgttttgagattctgcgaagggtaaggcgattttacaagtcctctactgaatgaaaacctctacagtagctgtaccaccttacggcaggcacggcaggtattagagagggcgcctgtgtgtgacaccaccttacggcaggtacggcaggtattagagagggcgcctgtgtgtgacaccaccttacggcaggtacggcaggtattagagagggcgcctgtgtgtgacaccaccttacggcaggtacggcaggtattagagagggcacctgtgtgtgacaccaccttacggcaggtacggcaggtattagagagggcacctgtgtgtgacaccaccttacggcaggtacggcaggtattagagagggcacctgtgtgtgacaccaccttacggcatggtacggcaggtattagagagggcacctgtgtgtgactggcctcgacgcggcctcactggggtagtagctgagttccacgtgaaggctgagcaccttgatggtccttccaggaagtgcaggctatcagcagtaactagcagccaggccaacacaattcctgtaatttggggagaaccctccctttttaattacagcccactgtttttgccagtgttcccaataggtggtgatgagcacatgtttcaccttacatggtccttttgatagttgggagtacaggtctactgacctgcttcccagagatgggggctgctgttctgctcagccacaccattggccgaggctgcctgccaggcctgagggctgctttctgtgaaaacctggtttagaagagctggagtgagggttgaggttgtcagacatggtggtggtggtcttggtaggcataatcattagcaagtgctgcctttgtgtgtgggtggcctggagagctaaagagaggcagttcaggagtgcccttggtggctgcatggctgtcttgacacttcctgttggttccagtgagctatacttacctaaagatctaaaaacttgtcctaagtaggggcttcccagagtgactcaccaaacatcttctgaaacttttccttaaaatacagttatcttagaaagttaggaaccttgtgaacatggagagacgctcagccacaccctggtttccttctgactggaaggcaagtggactatctggtggcacttatgtgaagaagccttgtcctctcacaactgtctgaggctcaggagtaaatggggacagctcagctttaatattgactcttctttgcctaggtgtttcaagaactgatttggccaccacaacagatagagaccatgtggtgccatcttggctcctcttcctcatccgttctctgtgtcctagtgtgttaggtgcagttaaaaatcatggccggctcacccattctagaaaatcccttgatgagtagtaggaagtgtataagaagtcctctcagctcctctatttgaatgaagagcattttttccctttcaactcccatgtgatgcaaatgtgctttctcttttcttctacacagagtaaagcctacttagattcacaccactgtagagcccagagatacctatgcagtttagaaacaacgtctggtgtatagtaaggcatgctatgtatttaaagctttgtgttcaaatggaatcacatacttttatcaactcttcttcttcccaaaggatggcacctgaacatgggtgactgctaggctaggaacagactactttctagaatatctggcttcctaagtcagcatttccctggagtgtttagcttgctaagatggcccagtcattattcaaaaatacactatttctctagatggttctaaacaatgggtttgtgtaagctttattgctctggatcccttttaaaagttgccctagagactagttgatacccactatgagagatggttgtatagtggggtaagttaagttttcctggttttgacatttcccagccactggggagatactgcctggcctaggaagtcctgatggtagcaggtgcatagaagagcttgtctatactgctgttgtctctaagggttgggcatgtgccatcccacttgttgattgttcactgtcccacttattcagtgctggctctctgaggacccagatgttcccagggcctatgctgagcacagaggtcacaaaggacagacacttgccctttaaatatacatgtattgatataagtattaatagctccaactctccgtttctttctgtatagtataaaaatgtgaacagtggttcttgcctcagtgttaggtggtgagctggctagaaatacagccggtcctctatataactgtggctccacagactccactaccacagtggaaaagaattagaaacagtaaatttgtattgatcatggacaagattttttctctctctcctttggttgtgattcccctaaatactttagcatcacaactatttatataacatttatattgagccaggcatggtagcacacaccttcaatcccagcattcaggtggcagagagcatctcttgagttcgaggccagcccgggctacaaagagaaaccctggtttcaaaaagaacaccaaagaaaaaccacagaaattccccaatatttgtatcatatttactattaaagctcatctagaaatgactcaatgtatatatgagtatgtatataggtatatgaaaatattataccatttaattaaatgagacaagaagattgacagttaaagccagtcttggctatatagtggggagtgtctttaaaaaaaaaagaaattatgctgttttatgtaattatgttattttacaagatctacaccatagacttaggtatctgtgctagattgtagagcacttccctttgaatgcccagagatgacagtgtataaagcataggacagtgttggctagcattcagagaatgttagcattttagagagttcacaagaatgcaggcctcagagcagaggactcttgaccagtgattgggccgcattgtgaggagaggctaggtttaccttcttcaaacagcaaactctagtgctttagctactcacagatcctctttcaacctggactcaaaagttgagtgtggacagctgttcctgctgtctactggtttcaaagtctaagaatccagatcagctagtcttagaggctgatggcttttaatcttggatagtccctgaggctgggtcttctggtgggcacaccctacttcctcattgaaccgggccatggtctcaggccagggtgcccttgctgcctttcagatcctgtagccagagtttgtttattttgacacagagagtgccctggattgttactgtatgtttgtgttctgtgttctctacctaagagctaagactatcctttgtactgatgaatatattcgtagctgatcagaactgggtgtaacttctagctaatccagtttgcagcaggttaaattctttctttgcttatttataaaggaaaacaatgagaaacactaccaagattattggcttaatctttaaccaagcagatttagttcagagtctagatgttcctcagtgtactgtgggattacatccgataaattcatgttaagttgtaggttgaaatgtgtataaatgtccttaacctgctgagcgacctacttgagaaacacattgtagattccaggtgtgttcctcttgtgctgtagtggctggtcacggcttgctactgtcatacagcatccaattggctagccagggaaaggatcaaaattcaaaatacagttcctcttgaatctatattattgtttttgcattttaagtccaaaattgaaaaagttaagcttaaccattaaaagtgaggaaaggggggtggtggtggtggggggaatgtgtgctcatgcagctgtgtaggaagaatcttgatatgcatcttaggcaggctttgaacttgacatcttgtgtctcagtttctagattccaagtatttgccctcataattggctttatgcctccttggaatgcagtatgcttctcgttgatctttctcatacttcctgatactgggaatatgctaacagctcattaaacaacacatgatgttagagaagtggacaccccccaacacacacacacacacacacacacaaacacacacacacatagggggtgggagatgcgggggtggggtggggaggaggtgttttctctattgttctggctgtcctggaactccctcagtagatcagcctgaactccaactcagatcctcctgcctctgctgcgagtaaagacatgtatcaccaccagtctgtctgcctgccttctttccttccttccttccttccttccttccttccttccttccttccttccttccttccttccttccttcccctttttatttttttaattcttatttacagtgatttcagtctggcaggagcttagaactgatgcactagcacaatgtcctgtcttttcagtgatcaggcaacgcttcagttagtgcttagtaatatggcagtcttttgccaggtgttttaattggcattaggaagtgactcagtgagttactgtttgtattttgggggcaagggatgttctttaaacgtactgaattctgtctaggctgtttcaaatctaacccagagctcactggaaatcccataatgcctgccaggtaggtagggagggtttaagaagaaacattgttgtctagtgttttattgggaaaagagaaaagttgggggtctctggtgggaagcaataccagattgttaaaccttacagaacatttggctcacaaaaccccacctcttgcctcctttctccagaccatagaatccaactggcggtgtggacgacacaacttgcagaggatccagtgccgctctgaaaatagtaagggtgtctactgtttgcaatatgatgatgacaaaattatcagtggcctccgggacaactctatcaaggcaagttactgatctgtgttattgtagtataatacatacacgtggtgcttaggggtaaggtgctgttgtgtggcagtctctactactgctgataggtttttatctgttctcagcatcagcagttctcatagttcagaagaaaccagaaccagcactgtcgcccttgtctgatctcacgtgtctctgagcacattcatactcatcctctctgtttatgatcccccccccccccccattcacttgtcttgttccttcaggctctcctcatacccaggaacccagtggccttcccaccactgtatttagaggggagagagagagagtgtgtgtgtgtgtgtgtataaaatctagcccttcctatcagtgtatacatataacatgtaaccgatttttgaactgacttgttatactcagttcagatgcatttagcctcactctcctgctttgtttagcagtagttcattacttcttgttgtgaagtagcattccatattattgggtacatcatagtgtggtaatctatttagttctcaaggatgtgcatgctgcttgggacttcctcagaattgtaaatgaaacctctagcaatacacgtgtgcaaggttttgctggaatgttaagttcagatcagttgagtgagtgaaaacctggaagctggattgccacctcgtatggtaaaatgaccttgggtttagggatgacattgcagatgtaataccagactatggtctgtgaagaaagaattgatggggtagtcttcattagtgtgtcagttttctgctctgagagaaaatccaggcttcagattgacaggatatacatgtaaaagacatctgatgagggagtcctagttaaagtgtgtagaaactataaaaacccaacaataaggaaataaaacacattttaaaaacaggcagagaccttagtagatagagctctaaagagcgtgtctaaccagcaaagcagcatttacaaagatggccatgttgtcagccttcaaagaaagggaagcatctgggagaagcatcgaattccattagtgtggtgactactagggcccggggagaaggggaggagtccagcagagcctgcatcccatgcttgtggaaatggaaagtgggccagctgctttggaaggcagtttggcgctttcttagtaaacactcttatcatatgatccagtgcttatattacttagtatttgctcagaggagtcgaaaacttagtcctccccaaacctgcacacatttgcagcagcttaattcctaggcaggccttgggaatgagcaggtgttctgcagtgggcgtggataagctgcagggtgcccaggtagtgtgctaactttaaagcattgaaaagaatttgcttaacaagccatgacagagtgaaaaaggctgcccgatggaggaggattggttcagtgtgtgctgttctgaaagagcagctctgaagaagaggaaggaagggaaggaagagctcaggcctgagaggagccgtttgttcttaaggccctgcttcccttcccttccagaagctgcccgctctgtcatcgcatgacctgtttcaattcctaagtgcttagtttgactttgtaacattttcttactaagaactcttggttcattgtttgggattttgagagaacaaaggctctatatttttaaagttttgaagctataaggggggggggggtatgtgtttctaaaaggccgtcatagaggctgtcactatttactagagactctttccagactttataaaaaaacccctttctcaagctgctgattgagcacagtggccaagggctacatacaccataaggaaagccgtgtgactattctgcatgcgagtaggtgttgccccatttcttctcctcttgtcatttcctacctgtttgagactcatcttgtttcctacacactgtgtgtttcttcgatgattcagagtgcaagatgcgtgggaatctgtgtgtgagtgtgtgtattaaactgctgctgtgcttgatcttgtctcactagatctgggataaaagcagcttggaatgtttgaaagtgctaacgggccacacaggctctgtcctctgcctccagtatgatgagcgagtcattgtaactggttcttcagactccacggtgaggtgagtgctctgatctcagagacaaagtcctgaggagacaaggatgcgtaccctcttcagagatttgtacacacatacatatccacatgcatgcacacatatttgtggttctagacatatttttaacttactgtagtatctccaggttctttttgatggagttgtactaagcagatagagcaggaggctgagttttagctgtgtcctgttcctcttcatgctgtatagagatggcactatgctctcctagccaatcacactgccttttgttaccttcctcctgttcttaggagcctgccaacagagcagaggggaagaagtccgctgttgttgaagtgtgaaggatgcaggaactgagaaaatcaggctgttggcagacccttgggaaagtgagctctgagagccagagatgatagatttgattacggatatctgcttgagttcttttaggcattatcttcatctgtgttggtaccttagaaaactaagaagttaaatagtttcccgggagtcaaattaccagtgcattttgagccttgagtttaagtaacctgtgactgtctttataaagacaaggcattaatggtggaggctttagtttttagttgtcaacccaggatagagtggagaagacattgcataagagagttgtgactagtagttgggtatcaaagattaaaaagggagcgtcactgagatatgctcctgtgctcctgggaaagcactcctccccatgtctcaggattgcaggcaaggtgactgagtccaacagagaaaaggacatcataatgccaaggctggctagactgagggggactacaggggatgaggagtggaaagcagcaaatcttatgtgattcagatgcttagagacaatcgcttattcacaggacataggatagttgctcattctacctctggattctatgatgtccccttttggttactgtcacactgtcaggctttgtttaaccctgcccacagcacagctgctgcccatgcccctgcttggcttctaggctgctgcttcagcctcaggtcactgtttagccttcagggttatcttttggtctgtgacagtatcctttaggatgttggagctttttctagagatgctacacctgtgcaccccatgtcttgggtcagacagaaagtgctctgacaaaatgccacagcttagtttgcagatgaaagcagcaggttcctcagcatgccagaagccagtgggaactgtcagactcctgtcatcacagactcactcaaagcctgctgtcttgagggattgtctttgtcattggtacaaacctgaaaacatctctgagttaatttcttagagtgtgagataaacctgtgtatagccagatttaacttcttaagagcatcttagatttatcagtattaaggaggctgctgccagggatctgctggtgctaccacacacctggtacagcaagaatggcatgagcccacatgtcacctttccctggctttaccatcacaactttctgttctcttccagagtctgggatgtgaacactggtgaggtgctcaacacactcatccaccacaatgaagccgtactgcacttacgcttcagcaatggactgatggtgacttgttccaaggaccgttccattgccgtgtgggacatggcttctgccaccgatatcactttacgccgtgttctggttggccaccgtgctgctgtcaatgtagtagactttgatgataaatacatcgtgtctgcttcaggagacaggaccattaaagtgagtgtgtctgctgtcttcatcctgactgttccatctctatacagcagagaaaaggcagagatggcttacaccaggtggcagggtctgttttttatgcattcataccagatcttcccattccacatgcttctggagccatgggcaaggcaagaaaaagccattggtcccagtagagaacaattgcaaatttcatgagctccatggctagtcaccctgagtgtgctgtgtataggagttttaaacaggtcatctcatccaccagcccacacacttttttaggataggtctctgtttcacaaacatggctcaaactaatcatgtggagcctagatttggtttttttgactgctgagagcttgctgttgtgtgctggttagatggctggagaaagaaggatgagcaagacgtgtccctgtcttcaagaagtttatttggcagatggaaggcaatcatgagaccagcaatttgtagactaagataacctgcagcaccggtgtaagaaattcagttctgattcccatatctatgttatctcttaattacattgattctgtgacatttcacacattgtccatgctgataacattcactcagccctcctgcttccacatgatgttccaggcattcagcattctaccctctgtctctgaatttgcctgttcttgacatttcatgtaaacagaataatgagctatgtggccctttgtgtttggctttctcatgtaatacagggttcagcacagatccatgctttgttgcttctggtggccaaattcatctttactctaattggatcacactttgtattccccttctgtgctgatggactgttgctggtttccttttctggcagtcatggatgatgttgctataaacatttgcccatgcatttttgcacgttcatttagttctcttaaattgactaacagcgcaggaaactgcaaatggtttttcaggttgttgtcccatgttatgatcctgccagcatgagactttgtgctggcttgaaggatttctaatggttagcactggacagctctgttccctgataactcaccctacaaatcatgggctatatcacatgaaactggaggtgtctgagagctgaacagtggattttgtgtgtataacttagccatatgccaagagtcagcacaagatcagccctgacagctgagcacttgggcctgattagaagtcacctctgtggggagattgctccactcgccacctgtccacactcatcactgtcttgttttgacctgtagctgtcctgagatgcaggctgctctgtcgagttgcttttactctatggtggcttgtggtgcttgcttgcttgttggtcactgtacctgctctgcataaatgtatcttaagtccacttaaaacttagatagttttatttttctgggtgagttttaattttttgttttgttttgttttggttttttgtttgtttgttttttgtttttttccagacagggtttctctgtatagctctggctgtcctggaactcactttgtagaccaggctggcctcaaactcagaaatccacctgcctctgcctcccgagtgctgggattaaaggcgtgttccaccatgcctggcttatttttttttaattgggtattttatttgtttacttttcaaatgttatcctctttcccagtttcccctctgcaaaccccctatcccatttcccccttacactgcttgtatgagggtgctcccccactcacctactcctgcctccccaccctagcattcctctacatttagtagttaagagaatttgctgctcttggagaaaacccaggttcaatttccagcacctacactgtggctacaaccatctgtaaccctagttctagttctagttctagttctagttctagttctagttctagttctagttctagttctaattctaattctagcagatctgatgccctcttctggcttccaaggatactaagcacaaatgtggtgcacagatatacacatgcagataaaacatccatacacattacatagatggatggatgggtagatgggtgggtggaaacatttttatacactatggatatgaggcccttaatcaggtaaatgatttttctttcattctttcacttgtcgatgtcaaaaaactctaattttgatgatatccagtttatcaaattttttttgtgttgtatgaacttttgttgtgatacctaagaaaccattgcctaacactagaggtttacaaaacaactcctttgtttttccccccttagggttgtataatttcagctctaccatttagatctttgatctccttgaattaaattttcatgtatggcatggggttgggggtccaactccatttgctgggatgggcatagaaatgcctgctcatcattctgctgagctacaaatgctgctgtcgctctcgctcgggactctggccactgtgtgtgtcctcatttggctcaccctgtagaaagtgtgccagggagcatctgcatcttacagacagactcacaagaggaggctgtttaaatcctgtatggaatattttatgagtcatttggcaaaataaatggtgccactcaagaaactggtgagaaggggagatacagatagtgaggcacgtccgagtgtgacgtgagctagatggaaacataacatctgccacagactctttcctccacagaaaggcctgagcctttgtgaagatctcagactttaggcttctttactcccctgaactttactccaactctgtccccctcggccaagaagactcacagtggccaacttccgttcagcctatcattaaatgagaagagagtttacagatggacattttgggcgatccttctcctttctgtagccacactgtctcttgaatgctaggatggtagggtacatgttcctgtccacgctctctgaaggtgtcgtcctaactgcactgctgccttcctgtaggtgtggagcacgagcacatgtgagtttgtccgcactctgaatgggcacaagcgaggcatcgcctgtctgcagtaccgcgaccggcttgttgttagtggatcatcagataataccatccggtgcgtagaaattagtttattttacaaaaaccattgtaaaaaacaaaaagtctctcactccagaatcagtttataccctgtgaatcatgcagaggagaaggcttgatatggccagtggctttgtatttctaagacacttgagtccaaggcccactccttaggaactaaataaccctggcacccagtgcacaggagccattactgagctttgccaagattggagacctccgggcttgggtcgctgcccgtgtgtcatctccctgcccttccttgctgtttgttttgttttgtttcatttcctgcctcatgtccacatcttcagaaaaacttttccgaagccattggactctgtggatttatcagctgaaacaccaggaaaattcccagggactaagcataattgaaatgtctttgttgatgatttgatttaaatagaaaatggcttttaaaggtttcaaattgtataaaacaaaatataacagaaagtgagtttcctgcctaaattagtgtgaaagcacaagtgttagatttagtggtttgtatgaactatgagatgggaatatgggatccaaggagaatagacagacttacctgcacagaacaggggtacacaattgaggagggcgtgagtcatgtgaaagaatttgtttcatagatgactgcttcttgttcaaggttatgggatattgaatgtggtgcctgtttaagagtcctagaggggcacgaagaattggtccggtgcatccgttttgataacaagaggattgtcagtggcgcctatgatgggtatgtgtttcatctgcacaagcatggctgtagccttgtcaaagttgctgtgtattaaacagcaatgtgaatgcagaactctatgagaaagatctgtcatagcagtgggtcaggtgaggatgctcagatccaggaagctgaagtaaagcctgcctcaatcgtgttgtagccaggcacttgaagactcgcttgtgttgtaaccattaacagaaatacaaaaattagggaaggtgcttgctgcacaagcctggcaacctgagttcaatcctcgtgaaggagagagaactcactccagaagagttgttctcagacatgtgtgtgtgcggcacacacacacacacacacacacaccccaaccaaacaaatgcatacaaatacgcacatatacagattaaactatagggaattccattcttttataaataaaccaggaaacactcccttcccccatgaactcagtaataaaattcctcttttctccttttgttctcaatgactaatggaagctgtaagtcccagtctgccttatatatgtttggtcagtggggcattagtgtgctagccatttcttcatttggagaaaggcatcttagccatctcattagtcccccaaatattgaattttgtaacataggtattaagttaggaagtgaattaagtactcctgagtcttctgcctgtccacctccttagcagtaatatccctttaagggttcagagattctgagaggggttaggttctttttctaaaatcaaacactcaaagtctaagttcaaaaacttagaaacaccagcctgtcgcctgttgggtttggttgtagacctttcaagtgtactgttttgtcatgggtatgttcacagtgtagaaaatgttaactcttttattaattccagtctcatttttccttgtaggaagattaaagtctgggacttgcaggctgctcttgaccctcgggccccagcaagcacattgtgtctgcgcaccttggtggtatgtgatttgttggggtggggaaagcgtgtgtcttgtaccacactttgagagacgtataggtatttttggccagccagaacatagttcatttacactgctgcagggtcctgtgtaggtgagcaggcaccctcatgattgtgctcatttctcctggagccttaggggttctgtagtgtgcagttgtgttatatcttataactgcacagtagtaaattgttaaggtctaattcccctcctcccccagtctctattatatgggctcctttggcacatagaaacactttaatttttaaaatttattttaaattagtaactatattatcaaagagaatagtgtgatactttggtctataatatacattatagaaaaattgtcaacaaattaatgaatatatcagttttcatttctttgatagaaatattaaaaatccgtttttttaaaaaccaagtatggtatggtagtttagacttttaatctcaattcttgggacagaggcaggaggattaggagtctaaggtcatccttggctacatcgtgaatttgaggccataagaccttggctacatatacttttaacaaattttgaagtacccaacactatgcattttcctggtcactctatagtggggtggatgattggcagggagtcctgcagtctgggtgagtgagactttgggccttctgaggagcattggattcagtccacctgtccacccttctctcatctagccttccccatctctcacttttgcacccttctttctgcttcgtttctgtgaggtgccagtctgtggggtcagtgtctgcccgtgtctgctttattatccactgactctgatagacctccaggtggttgattttccatgtcagtggcatggcagaatgtcttgcttgctttaagaccaagtaaatactttatttggatatgtggatcttttttaacattactaaagctattgatttctaatattgaggctgcttctgttggaatttttgttttcctttgagagacatctgaaaatagtgataggtttttcttgaaatttttcagcaattttgtttctttttagaaaattatctttagggccatgctggtgacacacacctctaatcttcacagataaatcctctctcaaataaataaatttgtatgaacaatttgcctacgtaggtatgtgttcaccttgtgtgaatctgttggatccactggaactaagatggttgtgagccgccaagtgggtgctgggaattgagcctgggtccttctgtaagaccgacaagtactgttaactactgagcatgctctctaggcccagcagttgtatctgcattgactacagcaggcagcactgtaagagccactcttactttcaccatgaattttgatgactgctatgacttaatacagatgttcttggtcatctttttaaagaattttatagggagctggagagatggctcagcagtttggagcatcagctgctcttccagaggtcctgagttcaattcccagcaaccacatggtggctctcaaccatctgtaatgggatctgatgccctcttctggtgtgtctgaagacagctacagtgtgttcatatacataaaataaataaatcttaaaaaaaaagtttatagcaactttgcccttctgagtctagttttacagtatatcctgagtgggtattactctgacagcctctgtttttcttcacattactaggctataatgtaggacataatgtttaatttaaaaaagaaaaacctaggggctggagagatggctcaacagttaaaagcactgactgctcttccagaggtcctgagttcaattcccagcacccacatggtggctcacaaccatctgtaatgggatctgttgccctcttctggtgtgtctgcagatagctacagtgtattcatatacataaaataaataaataaatcttttttttttttaaaggaaaaagaaaaagaaaaacctagaggcgtatattctagaaagcagaacatttgttctcagggaaaggatgcggctcagtgtgtgtgtgtgggtgggggaggggggggaccacgcaggaggcattgaaaagtgctgactttcccgcctgagctaaatcccagctctggtgataggggctgtaaagccatccttcctacatgttaaccaagccgcttttccataggaacactctggacgtgtgtttcggctgcagtttgatgagtttcagatcatcagcagctcccatgatgacactattttgatttgggatttcttaaatgtgcctcccagtgcccagaatgagacccgctctccctccagaacctacacctatatctccagatagcagcctgcactttggcccaatctggtgagtgtgctcaaactccagccctgcctgggctcttcaagacctcgctcacttctggactttgccttccctctgggaattaggaaactgaggttccttagtgatgtgaatgaaagcatctaccagactagcaggtaaggtctcaataggctcccaacagagccctgcacatcgtgggctctctcgtcgtcattgacaggtagtgatgtctgtggttgctgtttttaaaaaactggttacctaaatgagttccttcatgatcatagccatttaacaccaggatagtttttcaggtttgatttttggattgcagaaatcaaccttcttacctggtctttcagttctgtggctgacagacagacaggcagatgggtgtagtcatgcccatgcatgcgcgcacacaggaccatccaaaattcctcttcccatcaccaagtccactctgctttaccatctccacaaggagctatcacttaattatgctgtgcattcttcatggtgaggcgtgacaggtgcttcagaatgcaaatcctccgctctagttacagagccgctgtcatactgttggtgacagattgttttgctcaccaagatgctgttttagatagaaagagagaagcccgatttgcccaatcccagatatccatgactactgggaacaatattcctacctggaagatttgccgggatccattagattctgcgcacatcccgctttgtccacttcataaatacccttacttctgtgactgtttaaagatttgtgattaaattctcttagttaaaaagcattgcttagccgggtgtggtggcgcatgcctttaatcccagcactcaggaggcagaggcaggtggatttctgagttcgaggccagcctagtctacaaggagagttccaggacagccaaggctacacagagaaaccctgtctcaaaaaaaaaagcattgcttaattctttatagctttttattatgtactttctagcttactaaagagtaagctaggtggtgctggcacacccctttaatctgtttcagatattttttagtctagattctgagtcccataaatgactctcaagaagtttaccttgctcgggcttaacacactgtagccaagcattgaatttgacccactgtatgctttgtttttctgccagtgcaggccaaaagtagatcttacactttaaacacttgaaaaacattttaaaaattcatgccatataaaaactctgtgatattaaaattccaacctccataaaatccgtgtgattggagcttacctgcgctcatttgtcacatgtcactgtggcatagttgaggagctgggactcacacatgtcagccacttcctgtgcagtgctttaagggtctggtgcgcatcaggaacggtcgctctgtgctgctgcgaacatctgggtttcattagtagtgacaggtgagggctccctttagagtggctgtggaccccaaaggactgcagggcagggtgggctggtgacatctgctgtggggggttagagggggaggccatcagaaggtttactgctcctggccttccattgtccacaccatctctgcctacacagtcatctccccactactttctcttggaagaacttttgtaagtccattgacaaacccacctggtagtagtcattgagtgatgtcttcagagcacatgactctagaggtttacagaggcagaagacacagagctcctcaccaggcatagtcagaaaagtgtaatgacacggggaagggatggaggaggaggtctgacaccccactctacccccgtcttcccctttccttcttgaacctgccctctgtgacccttccatgtcttgtctagttaaataatgtcattctcctttcttcttcagggtttcctggtcttgaactactggctatatggctatcacatgcctaagggagttcgttcacagctgagtttggggctggactggttccagatgctgggtagatacagagcagccccacccctcaagccctgacattctcactgcaccccagctctacttggagaaggactccttagctctccactgcaagtagagcagcagctcatgtccctcccttcagtgaagaccccagcgcttcccatgcacacgttcccacgaaggacacagcaaggactgtcaggagaagccctgcttctaacttatgtcgtcgctttgcgccttggtttggtactaaaagcagccttgcattctcggtgaagtgctgggtgccaaacgactacacagcgtcttcagggctttcctctccagcagcagcttctccttagaccgtcagtcacagtcaccgtcgctctgacgtgcataggaatgtgtcggacaatgggcagatctggattatcttagtatttttggattacactttctttctgtttgtttcttttaatttaaagaataagtgggctatattacctctgcacaggtgatatagctattttcttttattaactgttctctgttcttcctcatcttctgatatttggtagagtaacacctttatccgagtgcttgcctcctaatttaaaatactgtatccgcatgtagatagagtgtacataacagtccaagctcaagggtgctggccggccccctgcacctgagacactactgtggagattgtcacacctactccagggttgctgtgctggcctagagcctccttcagtattcacttgggttttagttgtcactgtctttgtgtgtgctgtgtgttttcagacagaacttgagaagtctcccatgtttatttgttgtgtgacatctgcagtgggcaggtatcttcacagtctccacattgctgttcttttcctcacgcttacccctagagctagtgctcacctccttggggtgatcattagcttctctgtccaacatcctaccacacggcagtgaccctgagatggagatggcggccagtggacagggctcctggctctgggctccctgtactcggatgggtgttgggggctatagagttagagcctgtggagcaggtcagctggccagagcccacattagggacaaggcactcctctgtgtgtggggcacagcctcaggccctgtcagctctgctgtcactcatcacggtgagagtggcacccaggcaggacattggtgacattatttccctctttcaaaattaggttttgatttccccttgccattgtttccaaagatgaaggaatgttagtacggttttaaaggaccaaccagcccctcccagtgaatgaagcctcttcccatggaagcacactctaggagagagaaggcctctgggctccgcctggcctggcattatgaatgcagtggggtcagtgtgtggtggatgtgtgtactgggttggctttcctttttagtttttttactttttagtttagtttgttcttttccttccccaataaatcattctcacatgcttccatgtttgtttctgagaggtgggggctcaaatgtatagaaagtaggccccagtccataaggaggtgtgaacacacccccttactgcttatcacccatttgacaggaacgcccaggaggggagggggaggggaagaagtgagttctgcacagtcggacatttctgttgcttttgcatgtttaatatagacgttcctgtcgatccttgggagatcatggccttcagatatgcacacgacctttgaattgtgcctactaattatagcaggggacttgggtacccaaggaattccaatttctgggattacagtagtaattcccagctgtactctggacttgattttgctaactgtaactgagcaactgtaaattactgctatattaatgtgttaaagcactggggtagtctaattctaactggtaattatgtttgccaattatctgtttgaaataaatatgtgtctgaacagctattgaaactgttaaattgtacagatattatcatgacggctttgtactgtggaatgtgcttaataaaaacaaaagtttgacctttgtccaataaattgctaagtaatgtcaataaatcaagatgagtattatgcagtacacctgacctggcttcctggcgattgttacttcagctactgattcaagccaatcctctaaataaagtgttgcagtgctcctctgttctgtcacatttctcagaaaagcagttttgtcttgccaggagctaagtgacacgccattagaggtggattcccaattcatctgtacggtgaagccgaaggcagtgtttgtggcttatggaattcttcacttttggttttcccagcaagcttcaagggcagagggagagctccccgcttggagccgtccctgcaggtccgtgtctcaggtgagcgtgatgacttcctgagttctgcaagacaggaaaggggtccccaggactcgtaggggaggggatccttcctcttgaaatggtgtgcgtgatggagctgcaggtctctttaaaatatatagcaagaatttggataagaaaatcagtttacaaccctaaaagagcagagtgcagcttccctgcttcttcccccctctcccctcttcacctcccctgtgtctgctgggtgccagtctgcactaacactgcagagctgggctgtaccacaccccttttctggtgactataccatgcccttcttctttaatggctcagtatatggttataaggatatgtcattttgccaattcagttgagagtggagattggcttgtttcttgtgtatccattttttacaggtctctcccaaaaccagactgttaaatacaataaggtgtgtttgtgtgcgcacgctagtccttaggaatgtactatcagtagtagtgtggcccagagggaatgatagcatcttgcatcttaagctgggcagttttatgtcaacttgacacaagactaatctgagaggaaggaacctcaattaagaaaatgccaccatgagatcaggttgttggcaatcctgtagggggcatttccttgatcagtgattgatggaggcagaggtgaggcaggtccaggcaattgtgtgggggtccagttaattgtgtgtggtgtcatccctgagctggtagtcttgggttctataaaaaagtaggctgagcaaaccatgttgagcaagtcggtatgtggcaaccctccatggcctctgcatcagctcctgcctccaggttccagcctttcttgagtttctgtcctgacttcctttggtgatgaacagtagtgaggcagttgaagccaaatgaaccctttcctccccagcttggtttttttcgtgttgtttcattgcagcaatagaaaccctaagatagatcctgacctctcctcccaaagctggtaaagactccctctctttcctccttcccttcttccttcttgaacgctgcagaccatcctctgctgctggggatttgagggtcctgtagaagtcactgtctgccatcagagatgagctgccctgccatttcaaactgcttgtcttgtaatgaatagagattccaatgggacgtttggcttatgatcctcttgctagcactcctggtgggggtctttgctctctgactttattctggaaagcacatgccaagctaagatgactttgaggatgcagagccactgatgcccgagctgatttcaaggtaacctgggaatccagactacagactcccttccctcaacttctggaagttggaacttactcattaagatagtgttctggggctggcgagatggctcagtgggtaagagcacccgactgctcttctaaaggtccagagttcaaatcccagcaaccacatggtggctcacaaccatctgtaacaagaactgactccctcttctggagtgtctgaagacagttacagtgtacttacatataataaataaatcttaaaaaaaaaaaaaaaaagatagtgttctgtctgtgtcttaagatctggctcatgtctttaatcctggcacttgggaggcagaggcaggcagatttctgagttcgaggccagcctggtctacagagtgagttctagaacaaccaggactacacagagaaaccctgtcttgaaaaacaaaaaaacaaaacaaacaaaaaaaaacccaaacaaacaaaaagatctgtcactgtgataaagggcttatttggcttaaactcttaggtcacacgccatcactgaagggagtcaggcactgaagtggaaaccatgcactgctgcttactgacttgttcctcccagctccttccgtttgttttctaacaccaggaacatctgcctagggtgggccctcccacatcaacctttagtcacgaaaatgcccccacaggcttgcctacagccacatcttacagaggcatcttcccagctgaggttccctcctctcagatgaccacagcctgtgtcaagctgataaaaatagccagcagtgcctgcctgtgtgtatgcctgtgcaccaagttgttcagcacctacagagaccataagaaagcactaggtgctcttgaactggagggacagatgtgagccaccacgtgggtgctgggatttgaacctaggttctctgctgagacattctcccccatcctctgatgattttttttttttttagaccaacttcaccagcttgcatctctgagctagagtgatattaaagcatttttagtgacctgctgacagtgtcactttagggcttatagaggaaaggtccaagattgcatgctttgtagcattgtgcatagtattcagtagtcactccaacatgttcgtttttgaagaggtatttaacagaagatcagaggaggaaggagccaagaactagattccagtcttccattgctgagtgggtgttcaggtcagctgcctcctttggctggactgaggtcagcctcataggaggcagggcaaggtttaggttggggttgttttggtctctatcagaagattagacacctgcctctgcagagctccaagtctctggacttatacaggatccttgcattaagctgtgtcctgtacccagtaggtatccagctatcaaagactatgtggctgttgttggtacgatcatttgttttaggatggggcagtggacccttggtgctttttgttgttttgttttttgaaatggcctctgtagcctaacctgtctttgaactcatagcagtcctcctacctctgttccctggtgctgggatggatcataggcatgccctacagtgcctggcctggtcccctgatgccctagttcatggatctaagaactgcgcaggcatagcaatttaaaagtgctagggcagacatgcgtaactttcctctgatggcttctcagctgcaggagttaaatgaatggactccttacacggttccctggttcccctctgtctccattctcctctgagcctctccaggagccaactgattttgttaatgactctggaacttcttcctgggctggcctgggagaacttaggagacccagggactggaacgctgtcatctctgtatggggcaagttagtggacagggacctccatcgctttagaacctaagcttccacaactagagagcagagacagtgtttttaggagtgctgtggagattaagtggtataacctaaagctgatgtagagtattttaagataaccaaagactgagaggctattccagaagcaatgcctagcacagtacctacctaggagctccttggtgatgtttaaacagctaagagtgtgttcagtcagggcagagtggtctctgggatgacaagagaggggatgtagacactgcagccagcccaggtcctcagtcaggactgtacctcacaaaggagccccaagtttgtaagtagggtctagggtgtacattgggtcctccatggaaaagatgggagaatacgttgcctagatatgcttctggtcaatattggtagccattgctgacctctttgtaggtggctcttgcctctccatgctgtgtaccatgatgccagcggagccccacccttactccctgcagaggaaccaggcctcagggtgtgtagtcccttcaagaaactgacaagattctctttatcttttcctcttctcttctacatccttggcaggcattgtgctttgggttgttttgttttgttttgttttgttttgttttgtttgagatagggtctcactgtgtagccccagctggcctgtaactccttatgtagaccaggctggctttgaactcacaaagatccacctgtaccagcctcctgagtgttgagattaaaggcatgtaccaccacatctggctactagtattcattcttgagcagtaatgatatgtgtgatgtgattggcccaacactcaaggtgtaattgcgagcaaggggtggggtgctcagccatcaggctctgtactgagctagtgagctgcatgtcttctgtctcaattcagaagggtgttgagatctggaataagaaagaacacagaatgtgtcaggggtgggtaggtgcttgtatgggtattaaggacctaggaacgatgagacttagctgtagcaggaggaagagtaggtggcaaggctccctcccatatttagtgtctcccttgcaccattaaagggcactgtgacagaaaggggacaccatcccctgctctcaggaggcttgtgtttcaaaagaagtagtcccctgtacctgctccagtgtgctgaaacacatggaatgccaatacaaattaagatgggaaggagcagtgaaaagctcccacgggcaggggttagaggagcattgggccaactgagccaagacctcaatggtaaggggccagatacatgctgagtcaagaaaagatgttcctgctgaggctacggagatgcaaaggccctgaggtgggaaacccctggagtgggcatccagacccctggataggagggaaaagcattggggtggggctggggttgggcaggttatgctttggggtttgaatggtggaggtgtccagaagggtgcagacctgagagcttcccagaaagggggcttttggtggcttctgagtctggatgaacacgcacgtgggcttaggagaaagggcaaagggtaagccatggtacagacaaccagaatgcaggtgtctcctaggagcggtgcctgtctgctgctgcacacgggacacctaatcctgcctcacactccttccagcctcctgcctctccctggctcttgctggctggctccctccttgggaacgttcctgaggcccatctgcacaaacagcccagggccaggtctgcacctcaggaatgggagataaaaggggccgtggggacttttccaccaaaggcaaaagcactttgtagaatgggctgtgagcttttgtttcaggaaatttcatcatgtctccaagaagggggttggagggagggagaaaaggagagagagagggaaggagggatggagtgggtgtggggaggagttgtctcagacttccttgccccttttcatgttgctaacacaggtggcccaggtcattctcaggccagcgagagttggctctttagtgcccctctgtgaatacctcatttctgtaagagttttccctttaaaaacagctctgccttctttggcagatggtgacattccattagcatatggaatatttttcaaaacacatccgaaagtgtgtctcttatggaggagcctgggtaaaaccatgtgtgtgcttgcaaaagagtgctggagccacttggcacggaaaggaaggccacactcccctgtctggacagcatcatctcgggtcctcacctgaactgagaagctgtctgcccctgaaggtcacctgccagctctgcagagcaggcacagccacagtgcaaagctagaaagaccgaagggccatagagcgtagccggtacctggtgcattgccagtgtgatctcaaggtcacagacctacagtgttcagttctcatcagtctgaggttctgtgggcagctacactgtcagcttccggctgacacttatctgtcacacaaggccgaccaatctcctgcatacacaagtgagatcaggccacttccctgccaacaccccagtggctcccactatcctcacgctctcactggaaggtctcacgccttctatttcagcttctcctccctatagggctgcaggagtggtctccatctctataggtctcctccttatatgggctgcaggagtggtctccatccctgttcccgcctcaggacttttgcatgtgctgtttcttgcctaacacatttccctcagctgtgtacatggccgcttcttcctcactcaagtctcagctttaaagccttctccttagagggatagtctctgatcgatcggtgtgctgtctgttgcaccacagagacatggctagcaagtctgtgtcaccgtccaacacattctgtgtgactttaggttcaagtcttactagagactcccttcccttcccttcccttcccttcccttccnnnnnnnnnnnnnnnnnnnnnnnnnnnnnnnnnnnnnnnnnnnnnnnnnnnnnnnnnnnnnnnnnnnnnnnnnnnnnnnnnnnnnnnnnnnnnnnnnnnnnnnnnnnnnnnnnnnnnnnnnnnnnnnnnnnnnnnnnnnnnnnnnnnnnnnnnnnnnnnnnnnnnnnnnnnnncctccctccctccctccctccctccctcctttctttctttctttctttctttctttctttctttctttctttcttcctttctttcttcttttctttctctctttcagttttcaagatactttttctctgtatcttgaaaactaaatttgtatttttcctggctgtcctggaactcactctgtagaacagactggccttaaactcaagagctctgcccatctctgcctcccaatgttggtattaaaggcatgcaccgccaccacctggcttcactatgtatttcttgaaggcctactatgtgtcaaaaccaatatccctgccctcatgacacctacctacctcatgactaaggaagggagacaatacattgcagtagtctcttgctatcttcaagtgataattctaggacctcttaggtaccaaaatcccagcatactcagacccatcctgtaaaacggcttagtgtttgcacagagtctaccatcgtcccatggatggctatggatggcacagtaacggggtgcctgcacagacagatcccctcgcccacctcacacgaggcagatgacctgtgggtgcacaccctatgacttcagaggcccaactacttacagctctgtagaattgactttcctagccagaaacatgaccttgaggacaagacctttatttgtcttgtttagaggtggagcacaaggcattgtggttagccagaagacagtacccacatttgataaacagccttaagataaacataggcattgggaatatcctgctagtggaacagcaaatgtctgattctaggctggtttagggtaatttcctcatctgctccagcatcctcagagactattgttgtttgcccattttgcagatgggcaagtgaagtctcagagacaggagaagtgggttgactgatcccttaagtgtctgtggctgagacacagggtcagaatatcattgacctctcactcggcacccttcatgagagaaacagctctgtatgtgactgtggagagcatggcgaggcacagtagctctctttaccatggccaggaagcagagaggggcaaaaacacctgagttaaaagtctttccatgacccttccccacattcttccactggggatcctgcctgctggaatatgtacccattcatggtgggtcttcttccctccgctggtcctcccagaagtgctgcctcacaggtgccacctcacaggtgcaaagccaactgtgctccaccagtccgaaccagatgcaccattctccagctgtccagaaggttatagaaagtctctctggtgacactgtctaaacagtggaactccaggctactgtctaatgttttcaaaaacaactttgtcaatttgatgccagtctgtagcagtatttgttggcatcaggacctcccaaacctatgacatcacatagatgacagtgcaacctgcagacctgttgccaaggcaacaggcaccatattcccagaatccatttgtctcacctcccacctttacctgcgttaagtcattttccatataagtaaggagaacgcccctttctctctatctctctctcttcttgccctcctctctttctgccaccaccttgtctctccctcccaataaaacctcttccacgtggaattgtcctggcctagtgtgctgttgagctgtgacccgccattctaacatgtcagtatccccctaagggacattgtgacccagtgagcaggcagtgctcggtgtgtgctgttcatcggctccaccgttctatcccctacaaccctggggacctccaagagctgcctgagtaagatttaattctacatacttactgctgaccatgctatcaagaaattcccatcatattattaagttttctcacccaagatttgtgttccaatggagcatcaggtcctgtagaaaccctgggacttgtccagggtctgtcaccagtagatggacctgaatccaggtcgatcccatcatctttatcactgccctcaagctttggaaatcctgagcctagtggattcgcaaagagctcagcttccttttggctcttagttctaccctgcctgctactaaatttggggttatacactgccaaggtaacttttgtggcaatgtttgtcttgggtacatgagcattttctcttttcctccttgaacctcttcaggagaagctcattggatgatcgtgaaaatctgaccacgtgagcacaaagctcgcacacttccaatccaactctcaggtcctttctgttgggtctagaaccattgggataggccatgaagggtaaagcttggttctaccttagtttaagttccttgctgctgggatgctggatcaggggcagatgattgtcttagctggtgttttattgctatgaagagccaccaggaccacagcaactcttataaaggaaaacatttaattgggtctggcttacagtttcagaggtttagtccattatcatcatagtggggggcatggaaacatgcaggcagacctggtgccagatgtgccttcccccagccttgagcaggctggctcagaccttgtttgccacagttgatagctcacctatggtggagtcttccaacataggtaaagtcttttgtctgccacatctgcagcttcctgcaaaaagctaccatggggagctcattttcctgacagatcctgacaaagcaactgacaagatcctggcatagtgggggatgggtttccccctttaaaaatcagaccctagaaattaaagttgaaccttgatcagagaactttgtcttggctcattatttctctcgatgttcttcccatccaacaccagctttccttttaggaacccagtaacctgtggctgctgggggctacagctgggggggagagccaagagttctacatgttgatctgtaggcagcaaaaaggaccgccccacagtgacacgcttcctccaacaaggccacatctcctaatagtgccactccttatgggccaagcatttaaacagtgagtctgtggggccattcttattcaaaccactacattccactctctggcttgcaaccataacagagccataacttcaaaagttctcatagtctatcatagtctcaaacatttaaaagttcgaagttcagtctcctctgagagtcatacaattttcttaactgttatctcctgtaaaatcaaaataaaaaagtagatcatatacttccaacatgtaatagcataggatatatattaccattccaaagtggagtaaaggaaatactggaccaaaacaagacaaaaaaaatcagctgggcaagctcttcattctccatgtctggtggagctttctttagcaggtatctcatggctctggcctctctaacctcttgatgtctccaaggaaatccaggcttcacacaatgagctttctaggcttgcatgaagggacacccttgatacagtcctggcatcagtgactttccttaatc

SEQ ID NO: 2716 - DNA, 3515 bp, Mus musculus
cagccctgcgctcccctaggtgctctctccggtggcagaagccggcagattggaccaagcggcttcttgctcccacaaagctgcgcgagccgccgcggctgccgggagttgtagtcttcgctgtgcgtcctgcgtcggccgaggtgttctgtgccaaggtctttgtggctaggctgcgccaacctggtagagagcatgtgcgcactgagttgcctgcagagcatgcccagtgtcagatgtctccagctaattattgtttctttgtttttccaaaacagatcagtaatggaacgtcatctgtgattgtctccagaaagaggccgtcagaggggaactaccagaaagaaaaggacttgtgcattaagtactttgaccagtggtctgaatcagatcaggtggaatttgtggagcatcttatctcacggatgtgtcattatcagcatggacatattaactcttacctgaagcccatgttgcagcgggactttatcactgctttaccagagcaaggcttagatcacatagcagaaaacattctctcctacctggatgccaggtctctgtgtgcagcagagctgatctgggataaaagcagcttggaatgtttgaaagtgctaacgggccacacaggctctgtcctctgcctccagtatgatgagcgagtcattgtaactggttcttcagactccacggtgagagtctgggatgtgaacactggtgaggtgctcaacacactcatccaccacaatgaagccgtactgcacttacgcttcagcaatggactgatggtgacttgttccaaggaccgttccattgccgtgtgggacatggcttctgccaccgatatcactttacgccgtgttctggttggccaccgtgctgctgtcaatgtagtagactttgatgataaatacatcgtgtctgcttcaggagacaggaccattaaagtgtggagcacgagcacatgtgagtttgtccgcactctgaatgggcacaagcgaggcatcgcctgtctgcagtaccgcgaccggcttgttgttagtggatcatcagataataccatccggttatgggatattgaatgtggtgcctgtttaagagtcctagaggggcacgaagaattggtccggtgcatccgttttgataacaagaggattgtcagtggcgcctatgatgggaagattaaagtctgggacttgcaggctgctcttgaccctcgggccccagcaagcacattgtgtctgcgcaccttggtgggtttcctggtcttgaactactggctatatggctatcacatgcctaagggagttcgttcacagctgagtttggggctggactggttccagatgctgggtagatacagagcagccccacccctcaagccctgacattctcactgcaccccagctctacttggagaaggactccttagctctccactgcaagtagagcagcagctcatgtccctcccttcagtgaagaccccagcgcttcccatgcacacgttcccacgaaggacacagcaaggactgtcaggagaagccctgcttctaacttatgtcgtcgctttgcgccttggtttggtactaaaagcagccttgcattctcggtgaagtgctgggtgccaaacgactacacagcgtcttcagggctttcctctccagcagcagcttctccttagaccgtcagtcacagtcaccgtcgctctgacgtgcataggaatgtgtcggacaatgggcagatctggattatcttagtatttttggattacactttctttctgtttgtttcttttaatttaaagaataagtgggctatattacctctgcacaggtgatatagctattttcttttattaactgttctctgttcttcctcatcttctgatatttggtagagtaacacctttatccgagtgcttgcctcctaatttaaaatactgtatccgcatgtagatagagtgtacataacagtccaagctcaagggtgctggccggccccctgcacctgagacactactgtggagattgtcacacctactccagggttgctgtgctggcctagagcctccttcagtattcacttgggttttagttgtcactgtctttgtgtgtgctgtgtgttttcagacagaacttgagaagtctcccatgtttatttgttgtgtgacatctgcagtgggcaggtatcttcacagtctccacattgctgttcttttcctcacgcttacccctagagctagtgctcacctccttggggtgatcattagcttctctgtccaacatcctaccacacggcagtgaccctgagatggagatggcggccagtggacagggctcctggctctgggctccctgtactcggatgggtgttgggggctatagagttagagcctgtggagcaggtcagctggccagagcccacattagggacaaggcactcctctgtgtgtggggcacagcctcaggccctgtcagctctgctgtcactcatcacggtgagagtggcacccaggcaggacattggtgacattatttccctctttcaaaattaggttttgatttccccttgccattgtttccaaagatgaaggaatgttagtacggttttaaaggaccaaccagcccctcccagtgaatgaagcctcttcccatggaagcacactctaggagagagaaggcctctgggctccgcctggcctggcattatgaatgcagtggggtcagtgtgtggtggatgtgtgtactgggttggctttcctttttagtttttttactttttagtttagtttgttcttttccttccccaataaatcattctcacatgcttccatgtttgtttctgagaggtgggggctcaaatgtatagaaagtaggccccagtccataaggaggtgtgaacacacccccttactgcttatcacccatttgacaggaacgcccaggaggggagggggaggggaagaagtgagttctgcacagtcggacatttctgttgcttttgcatgtttaatatagacgttcctgtcgatccttgggagatcatggccttcagatatgcacacgacctttgaattgtgcctactaattatagcaggggacttgggtacccaaggaattccaatttctgggattacagtagtaattcccagctgtactctggacttgattttgctaactgtaactgagcaactgtaaattactgctatattaatgtgttaaagcactggggtagtctaattctaactggtaattatgtttgccaattatctgtttgaaataaatatgtgtctgaacagctattgaaactgttaaattgtacagatattatcatgacggctttgtactgtggaatgtgcttaataaaaacaaaagtttgacctttgtccaataaattgctaagtaatgtcaataaatcaagatgagtattatgcagtacacctgacctggcttcctggcgattgttacttcagctactgattcaagccaatcctctaaataaagtgttgcagtgct

SEQ ID NO: 2717 - protein, 461 aa, Mus musculus
ALRSPRCSLRWQKPADWTKRLLAPTKLREPPRLPGVVVFAVRPASAEVFCAKVFVARLRQPGREHVRTELPAEHAQCQMSPANYCFFVFPKQISNGTSSVIVSRKRPSEGNYQKEKDLCIKYFDQWSESDQVEFVEHLISRMCHYQHGHINSYLKPMLQRDFITALPEQGLDHIAENILSYLDARSLCAAELIWDKSSLECLKVLTGHTGSVLCLQYDERVIVTGSSDSTVRVWDVNTGEVLNTLIHHNEAVLHLRFSNGLMVTCSKDRSIAVWDMASATDITLRRVLVGHRAAVNVVDFDDKYIVSASGDRTIKVWSTSTCEFVRTLNGHKRGIACLQYRDRLVVSGSSDNTIRLWDIECGACLRVLEGHEELVRCIRFDNKRIVSGAYDGKIKVWDLQAALDPRAPASTLCLRTLVGFLVLNYWLYGYHMPKGVRSQLSLGLDWFQMLGRYRAAPPLKP

SEQ ID NO: 2718 - DNA, 165454 bp, Homo sapiens
  misc_feature (1)...(165454): n = A, C, G or T/U
gtcttacactgccagagcaggaggaagagagaggggagctgccacacacttaaccagatctcaggaaaactctatatcaccgaagggttagtgctaaaccattcatgaagaatccacccccatgatccaatacctcccaccaggccctacctccaacatttgggattacaattgagcatgacatttgggtgaggacacagatccaaaccatatcaatacttagaagacttgttcatatatgaatgaaagttgtcttatagcgatgctactcaacttttttggatgctttccaagttattatgtcaaaaattacatagtaatctctcagcaaaattatttttttatcataaaacgcaattcaatcctcctccaattttgttgggagcaaagtactggaaaccacttgactagtagaaggatttttatttatttatttattttgagacagagtttcactcttgttgcccaggctggagtgcaatggcgcagtcttggctcactgcaacctccgtctcccaggttcaagtgattctcctgccttagcctcccgagtagctaggattacaggcacccaccatcacgcccagctaattttctgtatttttagtagagataggtttcaccatgttggctaggctggtgtcaaactcctgacctcaggtaatccacccacctcagcctcccaaagtgctgggattacagacatgaaccaccgcgcccagccaatgttttttttttttttttatattgtcactggagaaattcattttctcaatttctggggagcataccaaaatggctttactaatatatactaaatgaagattaagtatacctgtgtagtagagacaaccctatatgcttaccaaattctacttcatttccctttttttgggtatatagttttgaaaagtacatcgtgcaggctcccctgcagcttctagggccatgtgcgtaagaactgaccaatgaacaatgagcaggaagaatgtacttctgagattcggcagtcactcactgacgagcctcccctgtatgcctgctcttccccagcaatgctggacaccataaattctagatggtataactataacatggagggctcatggactcagattggacttcccaagaaaaagatgttttaagccaccatgtttctagggagcggacacatagtgtcagtttgcccaagctgagctacatttccctgaattattttcctctgtgtttctgtttaaagccactgagagactgtcgtgcaggatttggagcattgaggtgaagcattagtcattctgtggcccatatacattgctggtgatcggctgactccctgcttggtatgaggtagtggcttggtctgtagttgctctatcttcccttcgagcctccttcagttcctctgattcctgggccctatgtgtgtttcactctgtgacaatgggctccagcctctgcatgacacccatatcacccaggtcagaggggacaagcactcacataagtttcagtccccctgtcctcatgggcttccatttgtgccaatgcctgctcccttccacttcatatccatcttctctgactaactgactcttaagatccagcagtggctgtgaagacaatagccttacagagatggctaaactagatttacaattatagaaggtcaactccctggaaaaaaatcccgtaatatactcttgttggttctaattctttggctgaattttgactgacatgcagggttaatctgctactgtggcacagtatattctttttttgagagggtcttgttctgttgcccaggctggagtatggtgggtgtgatctcagctcactgtggcctcgacctcccaggctcaagtgatcctcgcacctcagcttccccagtagctgggactacaggcacacactaccagtcctggatagttttgtatttttttgtagagacggggttttgccatgttgcccaggctggtcttgtagtcttgggctcaagcaatcctcctgcctcggcctcccaaagtgctgggattacatgcgtgaggcactgtgcctggccagcatattctattctaatacaacttgtctctactctttaacttggaggtatcttatttaacctgataaactcaaaaagggttggaaaaatacaaatattaattttaatacatgtttgcaaacaaattaactgatgaaatgtttttaggcgctttaaatatatcttccttaaagtcacggaactaaagatttaactcacctaaaatcaattattggtaaagccagtccttaataacaaacagcaaaattagactctgtaagaaaaagttgaataaatgtgctaataatgtatttcataattatccttttttctgggttctacagatagagggataaggtatggagccttgtcatgtggttaaaatagggtgctaccacctctaatatttcttttcttttttttttgagacagggtttcactttgtcacgtgggctggagtgcagtggagtgatctcagctcgctgcaacctctgcctcccaggttcaagtgattctcctgcctcagcctccggagtagctgggactacaggcatgcgccaccatgcctggttaatttttgtgttttttttggtagagacggggtttcatcatattggccaggctggtcttgaactcctggcctcaagtgatccgcctgcctccatctcccaaagtgtggggattcaggcgtgagccaccgtgcccagacaaatttcttaccaatactatgtttcacaatattccccctcaagaaaattcattcttggatattagctggaaatgagttaagtcaaaatttcactacaccatccctctttataatgtatctaaattcagaaaactcttcaaaggttaaaatataccatttaaaaatgtcactcttggccaggcatgatggctcatgcctgtaatcccagcagtttgggaggccgaggcaggcagatcacttgaggtcaggcatttgagaccagcctgaccaacatgccaaaccctgtctctactaaaaatacaaaatgggctgggcgtggtggtgtgcacctgtaatactagctactcgggaggccgaggcaggagaatcacttgaacctgggaggcagagattgcagtgagctgacatcatgccactgcactccagcctgggtgacagagtgagactctgtctcaaagaaaaaaaaaaaaaagtcactctttaccttcaatagcattcgtaaaaaagggagacaccgatatggtttggatatctgtctcctccaaatctcatgttgaaatgtgattcttagtgctggaagtgggacctggtgggaggtgactggatcatgggggccgatccctcaagaatgtttagcatcagcaccttggtgataagtgaattcctgctcggctagttcacgtgagatatggctgttcactgggacctacccgccttgctctcttgcacacactcttgtgatgtggtgcacctgttcccccttctgccatgatagtaagtttcctgaggcccttaccagaagcagatgccagcaacatgctttttgtataccctgcaaaccgtgagccaaccaaacctattttcttttttttttttcttttttgagacggagtttcgctcttgttgcccagactggagtgcagtggcgcaaccttggctcactgcaacctctgcctcagcctcccgagtagctgagattacaggcatgcgccaccatgcctggctaattttgtatttttagtagggatggggtttctccatgttggtcaggctggtctcgaacccccaacctcaggtgatctgcccgcctaggcctcccaaagtgctgggattacaggcgtgagccgctgcacctggcccaaaccgcttttctttataaaatatcaagtctcaggtattcctttatagtaatgcaaatagnnnnnnnnnnnnnnnnnnnnnnnnnnnnnnnnnnnnnnnnnnnnnnnnnnnnnnnnnnnnnnctcttgttttggtgtctctattagttatctattgttgtgtaacagtattatctcaacacttagtagtttaaaataagactatttagccaggagaggtggctcaatctataatcccagcactttgggaggctgaggcaggtggatcacctaaggtcaggagttcgagaccagccatgcccaacatggtgaaaccccatctctactaaaaatacaaaaaatcagccgggtgtggtggtaggggcctgtaatcccagctactggggaggctaagggaggagaatcacttgaacccggaaggcagaggttgcagtgagccgagatcatgccactgcactccagcctggacaataagagcaaaactccctctcaaaaatgtacaggcattaagtacaaaggggcaaagacaactgtaaagaaacagggcagggcacagtggctcatgcctgtaatcccagcactttgagagactgaggcgggaggatcacttgaggtcaggagttcaggaccagcttggcaacctggcaagattccgtgtctacaaaaactaaaaaaaaaaaaataattaggtgtgtgtggaggcatgcgcctgtggtcccagctactcaggaggctgtggtgagaggactgcttgagctcaggagttcatggctgcagtgagctatcattgtgccactgcactcccgcctgggtgacattgcaagaccctgtgttttttttttttaagaccctgtctttaaaaaaaaaaaaaaagaatacagaattagcagttacagggaatagccaataactttagggctgagcaagtgcccaaggaaggatcaccccacaccccctaggctgagattcagacctcacaggagagagggtggttgtggcccgccgcacaaagtttgcttaatagttacaggaggtccagcagggcgtggtggctcacacctgtaatcccagcactttggggggctgaggtgggtggatcacgaggtcagcagttcaagaccagcctggccaacatggtgtaaaccccgtctctactcaaaatacaaaaattagctgggcgtggtggcatgcacctgtaatcccagctacttgggaggctgaggcaggagagtggcttgaacccaggaggcggaggttgtggtgagccgagattgcactattgcactccagcctgggtgacagagcaagactcagtcttaaaaaaaaaaaaaaaaaagagttacaggaggttgccacccagcaaggtggctcacgcctgtaatcccagcactttgggaggccaaggcgggtggatcacctgaggtcaagagtacaagaccagcctgaccaacatggtgaaaccctgtctctactaaaaatacaaaaaattacccaggtgtggtcgtgggcgcctgtaatcccagctacttgggaggctgaggcaggtgaattgcttgaacccaggaggtggaggttgcagtgagccgagattgtgccattgcactccagcctgggcaacaagagcaaaactctgtctcaacaaacaaacaacccccaaaattagctgggtgtggtggcacgcacctgtaatcccagctacttatgggcagctgaggcaggagaatctcttgaacctgggagacggaggttgcagtaagccaagattgcgccactgcactccagcctgagcaacagagttagactctgtctcagaaaaagaaacaaaaaaaagcctgggcacggtggctcaggcctgtattcccagcactttgggaggccgaggcaggtaggtcacgaggtcaggagttcaagaccagcctggccaacatggtgaaaccttgtctctactaaagatacaaaaaattatccagacttgatggagcacgcctgtaatcccagctactcaggaggctgaggcaggagaattgcttgaacccgggaggcggaggttgcagtgagctcaggtcacggccactgcactcccgnnnnnnnnnnnnnnnnnnnnnnnnnnnnnnnnnnnnnnnnnnnnnnnnnnnnnnnnnnnnnnnnnnnnnnnnnnnnnnnnnnnnnnnnnnnnnnnnnnnnnnnnnnnnnnnnnnnnnnnnnnnnnnnnnnnnnnnnnnnnnnnnnnnnnnnnnnnnnnnnnnnnnnnnnnnnnnnnnnnnnnnnnnnnnnnnnnnnnnnnnnnnnnnnnnnnnnnnnnnnnnnnnnnnnnnnnnnnnnnnnnnnnnnnnnnnnnnnnnnnnnnnnnnnnnnnnnnnnnnnnnnnnnnnnnnnnnnnnnnnnnnnnnnnnnnnnnnnnnnnnnnnnnnnnnnnnnnnnnnnnnnnnnnnnnnnnnnnnnnnnnnnnnnnnnnnnnnnnnnnnnnnnnnnnnnnnnnnnnnnnnnnnnnnnnnnnnnnnnnnnnnnnnnnnnnnnnnnnnnnnnnnnnnnnnnnnnnnnnnnnnnnnnnnnnnnnnnnnnnnnnnnnnnnnnnnnnnnnnnnnnnnnnnnnnnnnnnnnnnnnnnnnnnnnnnnnnnnnnnnnnnnnnnnnnnnnnnnnnnnnnnnnnnnnnnnnnnnnnnnnnnnnnnnnnnnnnnnnnnnnnnnnnnnnnnnnnnnnnnnnnnnnnnnnnnnnnnnnnnnnnnnnnnnnnnnnnnnnnnnnnnnnnnnnnnnnnnnnnnnnnnnnnnnnnnnnnnnnnnnnnnnnnnnnnnnnnnnnnnnnnnnnnnnnnnnnnnnnnnnnnnnnnnnnnnnnnnnnnnnnnnnnnnnnnnnnnnnnnnnnnnnnnnnnnnnnnnnnnnnnnnnnnnnnnnnnnnnnnnnnnnnnnnnnnnnnnnnnnnnnnnnnnnnnnnnnnnnnnnnnnnnnnnnnnnnnnnnnnnnnnnnnnnnnnnnnnnnnnnnnnnnnnnnnnnnnnnnnnnnnnnnnnnnnnnnnnnnnnnnnnnnnnnnnnnnnnnnnnnnnnnnnnnnnnnnnnnnnnnnnnnnnnnnnnnnnnnnnnnnnnnnnnnnnnnnnnnnnnnnnnnnnnnnnnnnnnnnnnnnnnnnnnnnnnnnnnnnnnnnnnnnnnnnnnnnnnnnnnnnnnnnnnnnnnnnnnnnnnnnnnnnnnnnnnnnnnnnnnnnnnnnnnnnnnnnnnnnnnnnnnnnnnnnnnnnnnnnnnnnnnnnnnnnnnnnnnnnnnnnnnnnnnnnnnnnnnnnnnnnnnnnnnnnnnnnnnnnnnnnnnnnnnnnnnnnnnnnnnnnnnnnnnnnnnnnnnnnnnnnnnnnnnnnnnnnnnnnnnnnnnnnnnnnnnnnnnnnnnnnnnnnnnnnnnnnnnnnnnnnnnnnnnnnnnnnnnnnnnnnnnnnnnnnnnnnnnnnnnnnnnnnnnnnnnnnnnnnnnnnnnnnnnnnnnnnnnnnnnnnnnnnnnnnnnnnnnnnnnnnnnnnnnnnnnnnnnnnnnnnnnnnnnnnnnnnnnnnnnnnnnnnnnnnnnnnnnnnnnnnnnnnnnnnnnnnnnnnnnnnnnnnnnnnnnnnnnnnnnnnnnnnnnnnnnnnnnnnnnnnnnnnnnnnnnnnnnnnnnnnnnnnnnnnnnnnnnnnnnnnnnnnnnnnnnnnnnnnnnnnnnnnnnnnnnnnnnnnnnnnnnnnnnnnnnnnnnnnnnnnnnnnnnnnnnnnnnnnnnnnnnnnnnnnnnnnnnnnnnnnnnnnnnnnnnnnnnnnnnnnnnnnnnnnnnnnnnnnnnnnnnnnnnnnnnnnnnnnnnnnnnnnnnnnnnnnnnnnnnnnnnnnnnnnnnnnnnnnnnnnnnnnnnnnnnnnnnnnnnnnnnnnnnnnnnnnnnnnnnnnnnnnnnnnnnnnnnnnnnnnnnnnnnnnnnnnnnnnnnnnnnnnnnnnnnnnnnnnnnnnnnnnnnnnnnnnnnnnnnnnnnnnnnnnnnnnnnnnnnnnnnnnnnnnnnnnnnnnnnnnnnnnnnnnnnnnnnnnnnnnnnnnnnnnnnnnnnnnnnnnnnnnnnnnnnnnnnnnnnnnnnnnnnnnnnnnnnnnnnnnnnnnnnnnnnnnnnnnnnnnnnnnnnnnnnnnnnnnnnnnnnnnnnnnnnnnnnnnnnnnnnnnnnnnnnnnnnnnnnnnnnnnnnnnnnnnnnnnnnnnnnnnnnnnnnnnnnnnnnnnnnnnnnnnnnnnnnnnnnnnnnnnnnnnnnnnnnnnnnnnnnnnnnnnnnnnnnnnnnnnnnnnnnnnnnnnnnnnnnnnnnnnnnnnnnnnnnnnnnnnnnnnnnnnnnnnnnnnnnnnnnnnnnnnnnnnnnnnnnnnnnnnnnnnnnnnnnnnnnnnnnnnnnnnnnnnnnnnnnnnnnnnnnnnnnnnnnnnnnnnnnnnnnnnnnnnnnnnnnnnnnnnnnnnnnnnnnnnnnnnnnnnnnnnnnnnnnnnnnnnnnnnnnnnnnnnnnnnnnnnnnnnnnnnnnnnnnnnnnnnnnnnnnnnnnnnnnnnnnnnnnnnnnnnnnnnnnnnnnnnnnnnnnnnnnnnnnnnnnnnnnnnnnnnnnnnnnnnnnnnnnnnnnnnnnnnnnnnnnnnnnnnnnnnnnnnnnnnnnnnnnnnnnnnnnnnnnnnnnnnnnnnnnnnnnnnnnnnnnnnnnnnnnnnnnnnnnnnnnnnnnnnnnnnnnnnnnnnnnnnnnnnnnnnnnnnnnnnnnnnnnnnnnnnnnnnnnnnnnnnnnnnnnnnnnnnnnnnnnnnnnnnnnnnnnnnnnnnnnnnnnnnnnnnnnnnnnnnnnnnnnnnnnnnnnnnnnnnnnnnnnnnnnnnnnnnnnnnnnnnnnnnnnnnnnnnnnnnnnnnnnnnnnnnnnnnnnnnnnnnnnnnnnnnnnnnnnnnnnnnnnnnnnnnnnnnnnnnnnnnnnnnnnnnnnnnnnnnnnnnnnnnnnnnnnnnnnnnnnnnnnnnnnnnnnnnnnnnnnnnnnnnnnnnnnnnnnnnnnnnnnnnnnnnnnnnnnnnnnnnnnnnnnnnnnnnnnnnnnnnnnnnnnnnnnnnnnnnnnnnnnnnnnnnnnnnnnnnnnnnnnnnnnnnnnnnnnnnnnnnnnnnnnnnnnnnnnnnnnnnnnnnnnnnnnnnnnnnnnnnnnnnnnnnnnnnnnnnnnnnnnnnnnnnnnnnnnnnnnnnnnnnnnnnnnnnnnnnnnnnnnnnnnnnnnnnnnnnnnnnnnnnnnnnnnnnnnnnnnnnnnnnnnnnnnnnnnnnnnnnnnnnnnnnnnnnnnnnnnnnnnnnnnnnnnnnnnnnnnnnnnnnnnnnnnnnnnnnnnnnnnnnnnnnnnnnnnnnnnnnnnnnnnnnnnnnnnnnnnnnnnnnnnnnnnnnnnnnnnnnnnnnnnnnnnnnnnnnnnnnnnnnnnnnnnnnnnnnnnnnnnnnnnnnnnnnnnnnnnnnnnnnnnnnnnnnnnnnnnnnnnnnnnnnnnnnnnnnnnnnnnnnnnnnnnnnnnnnnnnnnnnnnnnnnnnnnnnnnnnnnnnnnnnnnnnnnnnnnnnnnnnnnnnnnnnnnnnnnnnnnnnnnnnnnnnnnnnnnnnnnnnnnnnnnnnnnnnnnnaatgaggggctcgatatacgcacgtcccctttaatctcgcagctcctcgcagatcgtgtgacatacatgacagcaccacagcacatttccccaaaaccccgtctttcccgaagaaatctcgaaactctcactcctgggatgcccatcctctcagagcctcttccccaggccgagcttctctcactcgctggccccttcccacacctgagccccaggtctatacaccttcctaacgcacctagaacccacctgtctccaccatctgcccctaccatcagacactgccggacgggccgcgcagctacctaggcgtctagggagcactgcggcatggaccgcgcatgtgcggaaatgggtcgcatacgcaggacctccgacaagtgaggagttgcctcggagtttccgtcccggtctgggcagccttgggctgccaggaagtcaagagaagctagccggaaggacaacccgggcgcacggctttctgggacacgtagtcgtggcgctctcgaggccctgccatgagcaagctcttaactcttcaggtctgcacgtcctacgcccaccgtccagtgctactctcagctcggagttcagcttcgggctgccaagagccagcaacctggtgtcagaggctcggtcccacaacgctctgcgggccgcggcgcctgctgggaggtgtagtccccgatctgcgtactgcgttcgccgagggggagggcggagctgccggcggcccgggcgggctggcagctagagtgggtgcgatagccgcctccgcctctgccgcctccgccgtcgcctcctccgcccgggccgttcgctgctgcgcggggagagcgaggcggggccgccggggccgccatggagcccgactcggtgattgaggacaagaccatcgagctcatggtgagtgcggcccgctggaccgtctgtgcttccgtccgtccggccccgggcgggcctgcccacctcaacgtccggtgcgaggccggctctggcccttcccagacgcctcgacccagacccgggcccccagccttccctggcctcggacctggcgcgggctcctctgatccctcgacatctccggccggtcctggcccggccccctccatgcccctcgcttctccccctccccctggtcccgtctccggtcccagctctcggacgaccctcgctcgtttatgctgtagacttaggtcgcactcgctctagcaccccattctccttcttttagaaagggatttttttttctttcctctgtttcggcccaggcccgcaccgcgcttgcaagccccactcaggccgagtgagatggtgggaaggagtacggagatgggttggggccgcctgggcctccgcgtcctaggagaggtctcagcacccactccccagcctaggtctgtgtggatgccaggataggccctacagagctgggggggcagggagctttcgggtttgaggctgtggcggataaggaggcctctttcccgggcccttgtggtgtccggcttctcggacaaagggtttcctacccggcggagagggatgtttgcatagcaagggcccaggtactctggattccatcctccaggaaagagaaggcgcaacttcacgttttccagagctgctttgggaaattggagatgactggggagggagccatcctcatcactgccgcgaggtctttcttctcagaaagaaaaaaaaaagaggggaatccttggcccccgggggaagcgaccactcttctgttagaaaccactggcagccaggccagactcccggtccgtggacaccctccaccctcctccgaagctttaggatttgaaaccagaaggggtttttaggaacaggacagtgagagagtggctagaagtgaagaatttgctaattgatggatgatttggtggaagaaataaaatatggcagatattacctgccaacgtgaacatgagggaaatcaaattgggctctggagagctgggaagaggaagtctgcatcagcaaatggacatgtccaggatttcttcctatggaagccttgacagtttctttgtatctttcctaacacggtaacaacttcttccccagggttgagaggagaggtggaagaatctacttaacccagcaaaatgttttcctagccagattttcttcagtgtgaaaatgtttattgagtcagtgattccactgggtagggttggtgacatcagagccacttcccccatttaacgctataaataataaatggtgacactgaaagtctgttggatagctgcatggtttctgtggatgatggtgtctggggagttgagatgcttgttttaaaaatggaagtacagtagcataaatatggaggcagcttaatgtttgctgtcctttgcataattcacagaactggacttctctagcattcttgaaaactaggagggaaaaaaagaaactgatagtttttgatttttgcatgcgtgtgtgtgtgtgtgtgtgtgtgtgcacgtggggttgttttcaaagggatgtcacatactgagtgatttttccttttcagcataatttatcatacttgtagtcaagtgtttggtattctgtaacttttgtagtgggttattttggtaactatcttaaatcgactaagtatattacatattcttaagaatgtacacacagtgcatgtacttacaacagaagtacttcatatcgaaaaattgtaacttggtgcctctttgaaattggctgttcccagctccttccatttctattcctttaaaaaataacgaaaatgtatttattttcaaaagaattataagaaatacgttgtaacccaagtcagtgtatggttacaaaataaaaaaataaaaacctttggcctaaattcactggcttcctatgcttataacttaaaaagttttgattttacatgatagcacttggttttgatcagaaaagagatttcagcctgttaaggacattataaactgggatttaaactggaattctttgaaaatttaacagagtttagttatattacgattaattttaaaatggccttttatttaaggattttgatatttcctgaaagggatatcagttaagactcttagacaacccttatcataaattaaatatgtgtatttattttagtaaagtagcacaggtgcttaacaactgattgagtaaatccaggatcaaatgtaggaaataatgccttagaatctaattgcatgtggctttctgttttcactgcatttcaattacagtttccagaactgggttaaaaatattttttacattggtttcaagataatacgattgatggaggaaaaggggttaaactgatggtgttttgaaagcctaaagcatgaaatatttttagatttttatgagtcagcttcagtactcaaatatttgtgattgtgctgcttgtaccagtttggcacttaatgcttaacaagataactttcatttgctgttccaaagtgtgctgtattaaaaagaggaaacagacttcttggttatctccattttctaatcttcatccctgtactttccttaatattgattcttctgtttttccttgcatttttgataagtatattaggaaataaagctggtgatagcagaatagttaaatttctaaaatataacccccactttgactcctaccgctgcctgaggcctgggtccacccaggttgcttctcctcctgacccactctataggattcagctttgaatattagtaaagtctataagctcttaatttagaccctgaatttacagttactaatggtaaataatttaaccgccagatgacttttagggccttatattggcccagggctatacctgttagtgggcctatttttccaaacttctgagtttggtaaaattcgccttatgaatgaggcagaaaactagtaattcattttggaaatatgtaaagtttatccggctatgttcaatggacttcattgggaagaatgagaactgtacaatatgtatcacgtggtatttattaacctttgagttaggaatatgacttgattttcaggcactcatcactagaaagcactcacaagagcttctgattggaagagaaagatgattagattaccctgtaagaagccagcagaaattgatgctatcactttaggaaaggcgatcctgcctcctccacgggtgtgagtgaatcccctcttccctttacacaattaatggatggtttataattaattgttaaatgacttccctttttgctaagtgaccttaagtgagtcatttcccttctgtcttatctcttaagtggctgtattacttgttcaatgaagtaatgtaggttaaaatacactgatccttattaagaaggtgtgggcaggtgcggtggctctagcctgtaatcccagcactttaggaggtgggaggattgcttgagcccaggagttagagaccagcctaggcaacataacaaaaccctgtctctacaaaaaataaaaaaattagccaggcatagtggttcactcctatagtccctgctactcaggagcctgaggtggggaggattgcttgagcccaggagtttgaggttgcagtgacctgtgattgtgccactgcactccagcctgggtaacagagcaagacactctcaaaaaaaaaaaaaaaaaaaaagaaaagaaaaaagaaagaaacgaataaatgaagttactggaaatgttgtctttttttctttttggatcttttttttttcttcctgtcattgactttctcggggtgagtggggttgtttagtgacttcatcaagaaattggatattactttgtcaccacctttctcctcatgtagcacaccactaggggtgctaacttactgaatgcagactcagtggacacaggtttcaatagggtccaaatgaataaaccacacacacacacacacacacacacacacacatttatataaaatatatggacctcactgacctgcctaaagaggcattggctcaaatatatcaatttttgcccctgattttgcagtaggttagatatcctttcagatttgacatggataaacatgttcctgcacacaagtcttggcattctgggctcttgactgctatagtctgtctcctgcaaatagggagctagcccaggagaatcactcagccattacatagattcacaacagcacatatatgcctcttactagtgttgtttgagcctgtgaattctagaaacaaaattatctgccctgtaagatctgtgggatcctgggttctaccttgtgatatttgttcttcatagaaaacaaagcattttaagtcctagtgattccaattccagtcttcctttgtattccattctcccttatggcttttctgcctactttccttgcttactgtatattctagcacatggaggaccatggtcctccagattctgctcacacgtttcctttgtcagcactgataggaatggacctaagcccatttattgaaggctactgatatttatcaaaaggatctaataggtggttctctggccaaattggcttaggttatatctcagcaatcttctctttcatttatgctaatgaagtcctatccacccataaaacacaataggtgccacctcttttgatgtcagtttatattatggtagcagagactgtctggtttttgtgtctgtatagcactgcctatatgacactcaaatgaaatgaatgaattctggcactttgtatttatcctgtagcacttaacatatttcaggcttgtaatatagttacctgtttgtgtcctctgttgaatgataaactcctcatgggaagggctgggaccttaattatcttccagtgacacacagttccttcatacacacggtgtcttctttgtggtaggctttcaggaaatgttgggttgaattttcctggtgatcattttcagacattattgccttttgcctgtgtcttaactatcctcttttctaaacattttcacccacattactaattctcacaataatcagttccaaatttttatgggacttatcatatcatcctattatattataaaaacttgtggttgtgcctaaactcttcttctagaggctgtgtttgattgccctgttactcctcagcacatgggtgctcaatatggatttaaattaatgttagattttctttctttcatgcagtgaaaccttttaagatttccttttgaatatcttaagacaaaggtagagatgaatagagaagaaagatggggagggggaagaggtgggtggtgtgttgtttataggacatccatagacatattaaccattatttacagactttccacacatacagattgatttacatagaactcagagactggttgttagcaaagaactgaggaaactgaatactttttgcatcagttggtgcaggtttgccaaatagttgataagctccaagggctccatgaccttagaaaagcatggtttagcagaaagggcatgggctttgaagtgaaacacctgagtttgtatccaagctctgtcgcttgctagctgtgtgacataaagaaaggtaacctttctgcagtatgatttgattatatgtaaaaataaataagaaaacttaggtattggtctgagttgttgggaggattatatgagagatgtgtgtgaaaggactttgcagaggcttgcttttcttcaaatgctgaccatactaactttccccacaagtacagggaccctaaagcgaagtcaagaccgatggtgtggaaaaggtctttctcctgagttgcgcatgtatttatttgtgaggctttacagaagactaacatttagttgcttttagccatacatttaatgagccatctttgggaaaaacaatgaaatcatgcagagtcaatactgtcttggaaaatctgggaggtactatttcaatgactaccaatttggcgtaattagatctatgctgtaactacagagagaacccacccagtcctatttttatgcctggtatcctgacagaaagagactggtgattagtttatattgacattgagcattgggatttatgtttgatcggtttagtttagactgaccaaattgtggtttttgaattcttattcttaccatcatcaaagctgatggttttaaccttaacagaataagcagtgagaattcatacaagattttcttctgagttgtattgttcattgaattagatgacaatgggggaagaaacgtgttggttaagaatgtgctcgttacccttggttagtttctgctgatcgcaattgcttaagaggaagtttgtctttgtaggcaaatgagagacagaccaggaagacctgacaatccagtagggtatctcttacctggttcttagtgttttaatgaaactaaaagatggaagagttctgtgatgtcagcgggaagcgtttttaggaaattccctctcaggttgagttaacaatgaagagcttcacaaaatggaaagctgtgaagtataaacactgggacattaataggaaaaataaaaaaaaaagctttggctctttggcttgtgatagagaggtgtgtaaatataagcatattgaatgtaggaaaccattgtatagtaaaaagcctctgatccacagaagaaaaagaaagactgaggttctactattgtgaaaaaggaacttgagtaatttttaatgtttatttttttaggagttaactggagaacattgaaccagttttggtaactaacaataaaatatattttggccctctgaaatgactacatgatagattcaaagagaaagggggcagaggggcaggaagaactcagtcctgacactactcacctggcatctgttaatctttgtattactagcataaggcctgccagcaattagggattgaagaaatatatatatacaattagggattgaagaaatatatatgtgtgtgtatatatatatatattttttttttttgaagggaagggagaaaaattaactcactagtacaggggaaaagcctgaggattcaagaggtccagaaatgagtctgttagtcaaattgctgtggttgtgttttgctataacttgttttgcattttggatagtcgtaccttgaaaagcatagtatactgttttagcagttcgctactagccatagttccctagctacttctgtcaaaattgggtttccagtttattcttaggcttaggagtaataccacttaatgggaaaaacttgagaactcattatttgcttgggattttacttttgtgatctccttaaagttgtgagtcttaaggtattttcatctgattgttatggcgaggttaatcatagaccggtatttcagtcactttaattgccttacctacaatatgaacaatcagaacatctttaagagtcattgcctgtggactgtcaacaaatcttagaatttaaaaattacttgggttcagctggatttgagattctttgtcacagttacaatctttgctgctaaacacaaagactacttgagtaccattatagtatgtcttgccacagtcttttttttttttttttttttgagacggagtcttgctctgttaaccaggctggagtacagtggcacgatctcagctcactgcagcctctgtctcccgggttcaagtgattctccttcctcagcctcccgagtagctgggattgtaggcatgtgccaccaggcccggttaatttttgtacttttagtagagatggnnnnnnnnnnnnnnnnnnnnnnnnnnnnnnnnnnnnnnnnnnnnnnnnnnnnnnnnnnnnnnnnnnnnnnnnnnnnnnnnnnnnnnnnnnnnnnnnnnnnnnnnnnnnnnnnnnnnnnnnnnnnnnnnnnnnnnnnnnnnnnnnnnnnnnnnnnnnnnnnnnnnnnnnnnnnnnnnnnnnnnnnnnnnnnnnnnnnnnnnnnnnnnnnnnnnnnnnnnnnnnnnnnnnnnnnnnnnnnnnnnnnnnnnnnnnnnnnnnnnnnnnnnnnnnnnnnnnnnnnnnnnnnnnnnnnnnnnnnnnnnnnnnnnnnnnnnnnnnnnnnnnnnnnnnnnnnnnnnnnnnnnnnnnnnnnnnnnnnnnnnnnnnnnnnnnnnnnnnnnnnnnnnnnnnnnnnnnnnnnnnnnnnnnnnnnnnnnnnnnnnnnnnnnnnnnnnnnnnnnnnnnnnnnnnnnnnnnnnnnnnnnnnnnnnnnnnnnnnnnnnnnnnnnnnnnnnnnnnnnnnnnnnnnnnnnnnnnnnnnnnnnnnnnnnnnnnnnnnnnnnnnnnnnnnnnnnnnnnnnnnnnnnnnnnnnnnnnnnnnnnnnnnnnnnnnnnnnnnnnnnnnnnnnnnnnnnnnnnnnnnnnnnnnnnnnnnnnnnnnnnnnnnnnnnnnnnnnnnnnnnctgtggagtccatagtgctccatgaaaagggcatgggctctactacctagtagatgtgggactttggataggttacttctttctgctcatctttttttgagaattaaatatgggtaattaatgtaaagggcttggccagttagtagcttttcaataaggtaggtattactataattactgcaggagcattttggctataatgtagcaattgtggaagtagcaaatttatgttcgagtaagttcagtctttttgtttttatctttgttgttctgctgaatgctttttctctttcccttttagtttgtttagaatttgcagtctaatttgatatggtagaaaaagaatattgatataatatggacaggacttaatatttaatggtgtcacctagtaaattgtatattagcgttctttatgatttttcccagtttacgtgatcattggccattgtacgggactggcctttactgagtcagaagttcagtcttcagttatatgttttgaagcacactatattttagctaagggtagaggatttgggtaatatgtagatatgatgtcttatatgtagcaaaccaaaacattttgttaggtacgtaaataaatatctttatggtagatatttgagccctctcgtatcattctttttggctgacaaactatttttctaatggtggaggagctgtcttagaaaatggataaggaagttcagtgtagctgaatggtctaggacaatttatatggatgatagggtaggtattttttagctgctctcatttggaagttgcatgctgtttatcatgagtaaatattaacattagggatgttccattatttgttacgagttttgtatcctttcaacacagaggtgaggaatgctgctgcaggcattttatgccaaatagctgactcaggggttataacttttttcctgtgcctcagatccaccattccattgacccttccttccatttcttggaggctgtcctttgccgctggtgccatggtgggtgtatggattgctttctgtctttcaacagttaccgaagtgcatgtttgggattttgttgaagaaagctggatacagtaaacggaaagaatcttggaagatgcttgactgctgtcttttctcagactagtctgaaagggaaaacccccattcattctggattggtggatctgaagtacaaaatattttccaggtaagcaattaccctgtattgttttgttttgtggaactcaactcgctgaaagaaattttgaaaaatattttcccttatttattttgtccattaatagggaaagggagaaatattagacgtttgtgcgtagtgtcatgtttggnnnnnnnnnnnnnnnnnnnngtctatgtgtctgaattcctggtaaaaactttgttttactgtaagaagtgcagttatttattatctttgagacatcaggtcgcccaggctggactgcagtggcacaaaccatggcttactgcagccttgacctcttggcctcacacgatcttcctgccttagcctctcaggtagctgggaccacaggcacatgtcactatgctcagctaatttcttttttgtagagacagggtctcaccatgttgcccagactggtcttgaactcctgggctcgaatgatttgcctgccttggcctcccagagtgttgggattacagacatgagccaccacgcctaactcagttatttttattgtaagcccaaatagtttttattcatagtctaataggaaatacagtaaacagagacatatgttgtttagggaatagcttgtaaaatatggaaaacaaatggtaactttgaggcattctcacatgatttatataatagttaatacctggtcaaaatattttttgcggtttcatgtaaagtggtgatattttattctgaggtctcttggcaggtcgtcttggggaggtttactaactgtagcaactgcttattgagagcgagtgctacatgccagttacccttgtatgcactttacatatattacttaattggcacaatgcttcacctgcattttacagctagtgaaatggagctcgtaagcataaactgccagttactcaggtcatacagctagtaaatggtagaaccaagctttaagcttgggtttaggtgtcctcaaagctctgactctttctgtcttactacacttgctgaagtttgtactttaacctttagattttcaaattgcctgtctgcaagagcaaggtgtgattttctacaacacgtttccactcaaagaacacatggtgggtcattgtttggcatggtattttaataatttaatatgattttttttttttgaggcggagtctcgctctgtcgcccaggctggagtgcagtggcgcgatctccactcattgcaagctccgccccctggttcatgccattctcctgcctcagcttcccaagtagctgggactacaggcgcccaccaccacgcccagctaatttttttgtatttttagtagagatggggtttcaccgtgttagccaggatggtctcgatctcctgaccttgtgatccgcccacctcagcctcccaaagtgctgggattacaggcgtgagccatcacgcctggcccatttaatgtgattaaatgccaccgcgcccagcccatttaatatgattaaatgcttgcttactgaaaaatcagatcttcagtcagttcatcaagtgaatgtaaaggtaatttagggagtataggagagacaatgcatttaaatatcaagatgtgctttatacagggaagtatcatttggtccagtgaactcaaacctatatcttctcagttcctcctcagtatttattatttaaatagctcagtagttcattatgtagacttcttttggcctgtggtttgtcatccttacaagtaaggcattgtcaggcaacattcttgaaaacatgacttttttcggtatttaatattctttctggagaacatcctactccctttcatcttaaaaaaattttctttttattgtagacggacattctgacttcgtgatccttgttttaatttaatactttcacatttgctaatatttctcctctggtgagattgtggctcactgcaacctttgcctcccaggttcaagtgattctggtatctcagctgcctaagtagctgggattacaggtgcgtgccaccatgcccagctaatttttgtatttttagtagggatggggtttcgccatgttggccaggctggtctcaaactccgggcctcaagtaatctgcctgactcggcctcctgaagtgttgggattacaggtgtgagccatttttcactttgtcttctgaaggatagtcaggacagtctggtggtggtggtggtggtggtggtagtaatggtactagtagtagaagtaatagttaatactgggtacttattctttattgagcatgattctagatattttatacatataaacttttttttatccttatacaggttgagtatcccttgtctaaaatgcttgggatcagaagtgttgagaattttgaatttttttcagattttcaaatatttgctgtatactgattcagcattcctaatctaaaatctgaaatctgaaaagtttcaatgagcatttcttttgagcatcacgttggcactcaaaacgttttggattttggagcactttggattttgtatttttggattagggatattcaacctgtagtaacctaatgaggtaggtaccattatttcccccctactggtgaggaaactaaagggtagagtggttaaataacatgctttaggtcacacatcttgtaagggacaaaggtgagatatgaacccaggcagtctggcttcagagaatgtgcttcttacctctgttctatattacctgtagattagagtatcatccagtgataaaggggcagaaatcctaaagactaaaactatatattctgatttcaagaaatcattgcaaaaggaaacagttttatatatttcttaccttctgtagaaaacagtctagctctcaggttctgcattagccatctcgggctgtcaggctgtttcctaaggcaacttggaataggttagtttgaggttaccttttagtacagtgctgtcccatagaactttctgcaatgattgaaatgttcagtgtctgcactgttcaatatggtagaggtttgaagtgtggctcaaagtaactgaatttttaattttaattaaattgacatttaaatagctacatgtggagatttataatttaccatcatcctagatctggtccttggtttaacactcacagaaatttgatctgctcagcatgcctagacatccccttatcccagggttggaccaacattaaccaactttacaagactgatgtgtaaaacctaaattttaatttattaatttacagtgatatgtgtgttggcatgattagtatattcttttcttttctttttttttgagacagagtcttcgctctgtcaccaggctggagtgcagtggcgcgatcgtggctcactgcaacctccgcctctcaggttcaatcgattctcctgcctcagccttctgagtagttgggactacaggcacgcatcaccacacccagctgatttttgtatttttagtagagagggggttttaccattgttggccaggatggtctcgatctcttgaccttgtgatccacccgcctgggccttccatagtgctgggattacaggtgtgagccaccacacccagagtatattgttttttgataggcagatttacttactaggtcctaattaatatgctagtttaattttttcaaacaagtcagagagacctgaagactcaagccaaatgactggaatattctcttcatataggaagactccatcagggaagtaagacgtctgttggcctgggactgagacaccctcattcagcttacttttagggatggtggtttttccctgtggtaaagcctcttcgttcacctcttctgcttgcttttgcttcccagatccttttatgattaaggcatttgtttttagacagattagtacattcagcttgaatgcacacttgacttacaggtttgggaagccctttgttttccttaaggttcctttatcactgctgtaatccattttgtgttcattttcaactctgagaaaacagttgaattttccttgcttccttgtggcctctttatattaaagtgagttcagtttgggttatggtgaatttgagttgcctatggatggattgtctaagaagagaagtatctagtaggaatattggcctggagttcattagagagggcagggttagagagaaatattggggagtttttaggtgcagtggtagctgactagactttagtacagttacatgattactcagagtatagactgaagaatgtatgtattggtgtatgggaatggcaacataaaggaatgggctacagctaaggtcagaacctgagatcatatgtcatgttgaccaagaggtgttattactaccctctcctctcttcctttcctttcctttccttctttttctttttctctttctctttctttctctctcttttctttcttcctttctttcctttctttcgttcttcctctctctctctctctccccctttctctctttttctttcacagagtctcactctgtcacctaggctggagtgtcatggcatggcctcggctcactgcagcctctgcctcctgggttcaagcgattctcccacctcagcctcctggtagctgggactacaggcacatgccaacccacccggctaatttttttatttttagtagagacggggtttcactatgttggccaggctggtctgaaactgctgaccttgtggtctgcctgccttggcctccaaaagtgctgggattacaggcatgagccaccgcatccggcctcctttttttttttttttttctttttttctttttaagatggagtctcactctgttgcccaggctggaaggcagtggtgcgatctcagctcactgcaacctccacctcctgggttcaagtgattctcccacctcagcctcccgagtagctgggactacaggcgtgcaccaccacgcccagctaatttttgtatttttagtagagatagggttttgccatgttggccagactggtctggaactcctgacctcaagtgatcctcccacctcggcctcccaaagtgctgggattacagatgtgagccaacctcccggccacaccctctccttttcatcttgacctgagaattttgttacagcctgctattacttactcctagtcagcaaacatttgggttgtgactttctcttctactgtaatagtttgcttaatttttgaaatgtgtttttgagaacgtatcttatgtacatttatgcaaactcaaattttatgcatctggtgacaaaaataagagaaacagaacctgaacagtgaagactgtggatcaaacgttaagatgggaaatgggaatctgttctttcagtctgtcttgagtcctgagtgcgttttagcttgctgtgatatgtgtgcttatggtattttaaagacacacacttttaacatcacaacgtgaggcctaaatacaagccagctattttatctgctagtcagttgaagaaactgtgaactgttccaatgctggagtaaaaattagtggtgttagaattattgagatgctgtgttggtctcaagtatggcatatccttaagggatttttgaggcatatttttgtcgtatgctattttcaccttacatattcacttcagaccctaattcctaggcctcctgcgactccactgtaactaagttttgatagtgaaagcatggagacatgaagagttcattatagctacagtcaatcaatactcgacaaattttttgaatgaattactatatctgtgatacaaaattaaggtacaaaaggggctgggtgccatggctcactcctttaatcccagcactttgggaggctgaggcaggtggatcacctgaggttaggagttcaagaccagcctgaccaacatgatgaaaccccgtctctactaaaaatacgaaaattagccaagcgtggtggcatgcgcctgtaatcccagctacttgggaggctgaggtaggagaatcgcttgaacccaggaggtggggggttgcagtgagtcaagattgtgtcattgtactccagcccaggcaatagagcaagactcaaaaagtgcaaaagggagtaaccagcgaaaaaaaaaagtttctcattccttctagccacccaactacattcttgtgtaacctttctatacatacgtgtatcctgtacacattatttttgcacctttttttaagtaaaatatgactcagttatctttcatatcagttcccaaagagctgtcatattttttgaggagataatttaatttaaaagatacatgctgatttattgtacaaatatgccataatttgggtaaccagtttggactgatgcatgtgtagatgatttctagtcttttgctgttacagttaatgctataaagaagaactgtgcatatggaaggtatcttcaggacaggatcttgggcatactgactaggtgcttttataaatctgatagacattgccacattgccctccagtcacattgcagcaatttatactctcacagatcttgagtaacagtgctcttatttcctgacagtctcatggtattacatgaattttaaactgtttgctttttaaattgttcttctctttttcctccattaactttttattatgaaaaatatcatatacatctaagagttgaggtaaaaaagtataacatttatatactctcttgacctagattcaacaattgttaacattttgtcatatttgagtcatttctctgctacccccctcccttctcttcctctttccccttcttccctccttcccatttctctccttttctccttccctctcttactctgtcttttccttcctccctacctcccttttttgttgttaaaaatttgaaagtaagttgcaaacatcataatacttaacccctaagttttcagcatgtatctcctaaaataaggatagtttctctctctttgtctcaaaccattacatgcatacacacaaccatatctccgtgtatacaaccacattatatataatcacatatactttatgcatgtgtaaccacaatactgttttcacatctaagaaaattaaagtaattccataatataatatcaagcatcaattaaatctaaattttcctaattgtctcaagaatgtctttgataccactctcacttctttaaaacaaacaaaccgacaaaacaggatccaaacaaagtacatcctttgtatttggttatgtttcttgtactcttttttaagaacagttcctttacccttttccttcctttgcctgcattaacttgtttgaagagaccagctctggttgtcttgtaggatgtgtaaccttgtgcattcattatttcctcgtggtgtcatttaactggtttctctagctcctctacttcctgtaaactggaagttaattgagatgcatccaggttaaacattttgacgagaatgcttcatcataggtgaagtgcagttcacattgagtcatatcaggaggcacttaatgacgggttatcccgttatgagcaatgctaactttgattccttggcgcagccagatctctccataatgaaggtaaaattttctcttctgctattagagaggaatctatgggacactattttggcaccttgtaaataccctgtttcattacagcctttcactcattggtttcattatcctgatcctgaaatcggttattacaataggggttgcaaaattgtagattttttattttattattttaaacagagtctcactctgttgcccaggctggagtgcagtggtgcaatttcagttcactgcaacctccacctcctgggttcaagtgattctcctgcctcagcctcctgagtagctggaactacaggtgcataccaccacgcccggctaattttcatatttttagtagagacagggttttgccatgttggccaggctggtcttgaactcctgacctcaggagattcgcccacctcggcctcccaaagtgctgggattacaggcgtgagccaccatgctgggccaaaattgtagtatgaatgtatgtgtgtatgtatatatttatttatttattgaggtggagtctcgctctgttgcccgggctggagtgcagtggcgtgatctcagctcactgcagcctctgcctcctggattcaagcaattctcctgcctcagcctcctgagtaactgggattacaggcacctgccaccatgcctggctaatttttgtatttttattagagacaggattttgctatgttggccagactggtctcaaactcctgacctcaagtgatctgcctgccttggcctcccaaagtgctacgattacaggcgtgagccaccgtgccagaattgtagtttttaaattgccactcccacaggctgcccccatttttcttccttccttttttatatcaccatactctcctggacttttatttattcagtgttaacaatcaattacagtctttgctaatgctcagattgtctcaggtttggctactgataactttttctaggtagctcctcctgtttcattttgacatgaccccatcactgttttttttgtttgtttgtttgttttcccttggcttttttggcacaacaagatgtcccagactcaccttatatttccataaggtgatcaggaatcagccatttctccaaggctctggttctttttagtaaggaatggtatttagaaactaaaatcattgccatgggttgtcattgcttctagaccctttcagtggacagaactaagaaatatgtttaaaaagaaccgtgagttcatgttatttctgattcagatgtaatattagagagacttttttctgactctgttagccttttaattttccaaatctaagggaccttgtcggtatcatggccccatcaaattgagatacacattgttacttaaataggcagataaatagtttcatccattcattattgagcatgtactctgttctaggtattgtttggggaatacagaacagaatcaaatgcataccttgcttccagaagcttgtagtcttttacataaaaaagtataccatagtgtgaaaacttgtaaggatcacgggaagtagacaaacagtgttgtaggagttagaaaaggaaggaaatttcataagggatattttaaaaacttacccttggccgggcgcggtagctcacgcccgtaatcccagcactgtgggaggctgaggtgggcggattacctgaggtcaggagtttgagaccagactgaccaacatggcgaaaccccgtctcactaaaaatacaaaaaaagtagctgggcatggtagtgggtgcctgtaatcccagctgctcgggaggctgaggcaaagagaatcgcttgaacccgggaggtggaggttgcagtgagctgagattgtgccactgcactccagcctgggcagtagagtggcactccgcctcaaaaaaacaaacaaacaaaaaaaacccaaaaaaacttaccctttgaggctcgagcagaagttagacgtaaacatggatgtattgggatagtggagcttcatagcaaagggaaccaagtgaacaacggtttgcagacagtggtgtttgttgtctatctgggagacaagtaagtaattctgtgtattgccggagtattgcttgtgtggaagggagtatgggtgatgaatttgaaaaggcaggttataactaaatcttgaactttatcccgttaggtcattggtctccaacctttttggcaccagggaccagtttcctagaagacagtttttccacagaccaggcacggggagtggggatggaactgttccaccttagacatcaggcattagctggattctcttaaagagcatgcaacgtagatccctcacatgcgcagttcacagtagggttcctgcttctgtgagaatctaatgcctgggctgatcatctgacaggaggcagagctcaggtggtaatgcgagtgttaggggacagctgtaaatacagataaagctttgcctcctgctcatctcctgctgtgaggcccagttcttaataggtcacagactgataccagtccacagcctggggttggggatccctgctttatgtcataagatgcaagctaataacctgtggataggtagagcttcacaaacatattttatgtggtccacacggattttttttttcttttttttttgagacggagtctcactctgttgcccaggctggagtgcggtggcgccatctcggctcactgcaacccttacttcctaggttcaagcgattctcctatctcagcctcctaagtagctgggactacaggcgcacaccaccatgcctggctaatttttgtatttttagcagagatggggctttgccatgttggccaggctggtcttgaactcctgacctcagatgatccatcctccttggcctcccaaagtgttgggattacaggggtgagccaccacacctggcctggtccacacggattttatttatttatttattatttgtttttgagacagagtctcactctgtcacccaggctggagtacaatggtgtgatctcactgcaacctccacctcccaggttcaagtgattcttaggcctcagccttctgagtagctgcaactacaggtgcataccaccatgcccggctaatttttgtatttttagtagagatggggtttcaccatgttggccaggctggtctcaaactcctggcctcaagtgatccacctgccttggcctcccaaagtgctggtattatagatgtgagccaccgctcctggccagattttaaaaattgggacatttcatatgaaaacactaatttgtggttttgtttgaaaattggagctcagtagtagctgtccttttgagtcagagcttgtactttcctgtacgtaactcctatgagaccaatttcactttatctaattggtcatatacatttttaatttttatttttttgggtcagaatcttgttctgccacccaggctggagtacagtggtgtgatcatggctcattgcagccttgacctcctggacgtaagctattttcctgccttagcctcccaagtagttgggactgctggtgcatgccaccatgtctggctaagttttaaaatcatattttatttttcggtacagggtcttcttgctctgttccccagactgaagtggtgcagaggtgcagtcatagcttactgcagcctctaattcctgggctcaagccatcctcccacctcagcctccaagtagctgggactacagcagcatgccaccatgcccagctaattttttaattttttaattttttttttgtagagacgaagtcttgctgtgttgcacaggctggtcttgaactggcttcaaatgatccttatctctcaacctcctgaagtgttaggattataggtgtgagccactgcatctggtctatttttataattttttttagatactgggtctcactgttgcccaggctggtctcaaactcctggcctcaagcaatcttcctgcccaggcctcctgagctgttggggttacaggtgtgagccacatgtaagtttttgagcgtgtgatccctgcctagattggaggaggtatgagggtggtggatgtggttgagaagggagttgactgtgaacattagagcaagatctgtggtttacaaagatcactccagttgtcagattagaggatgctttagagcagggcaaattggagcagggggactgattcatttactgttggaatgtcccagggaaggaaagatgagatagtaacagatggtatgaagaggaggaaatgagacattttagatgtagagtggatgactgtgttgatagctgtgcgtatatgtgtgtttgtattgatatgaatgtaaatcagactattaagagagtcctgtttctgaaaagctttgccttcataaatcagtgtctgaaagttaactgcttgtttttataacctgttggttaattttggaaggcagtagtaatagttttaggcatgtcgtcaccgtaaagcttagttttataatatgcaaataacatgcttctgcaaaaaatgtaacttcgacctgcctttatttttgaaaattgtgcataaagtaaatatttatagtgcgattctttttttctataattttccttataattatggagctaaatttttaaacaagattggaaagctatatacttatttttaaggagcttgctgcatgtatttaattttcctacaatcgctactagaagttaaaaggatagtgaattcataaggtcctttcccccacacttaaaattataccatattatgatcatctagactgtttataactattttgtcagaaattctccctgattggagcatgactttatctagttccattaccggtgccattattctggatatttagtattacctccagcccacacatgctgagggagatagacatgaagtacatgtaaatgggtagactagaagtgagattgactgacaagccatgcctggctactgtgtaataagcttccggctttggaggataaacagagattggttaaaagagcatttgtataggtatgttttattgtgtataacttacattaaagaatacatgttttaagtgtacagctcaatgaatttttacatgtgtgcacagcacatcgtgtaaccactacctagatcaaattatagaccttttccagagcatttcaaggcttcctcttgcctgtagctcatccagtcaatgaactctcttcttaaaggccttttctgacctctttcactgtaggctagttatgtctgtttttgaaatttatgtaaataggattatagagtatatactcttgtggttttgttcccccactcattattattatgtctgtaaaattcatccgttttattatgtgtagctgtagtttttttttttctatgcattattccattgtaaatattcagtttgtttgttttacttggttgatgaaatgcttgggttgctgagtacttggctgttattgatgaatacgtgagttgcttctaatttttgtctgctactgtggacagcaattctaaggtagacatgagcacttgtttctcttgggtatgagaacccaacagaattactgggtaatgggggtaggcatatatttagctttaatagatactgcttgttttgggaaaaactctcaaaccatgtttttcctctgctctcaaaccagtacaacagcagtcatgaacacagaagaaggcttctgtgaccaaatgtgtgggagtgggtttctctccaccactagtgagcaatcagttctgcagcgggcaccagctgtgtgttccccaattcaattccgacacaatctacctagagatagtgtccgatcccacagattgagggcttggtccccgagattgcccccctaccccacataccagtggcaagcctgggcttttgtccttctgaccaacttgcttcaagttggggttcccgctacccatactgtgggttcaattaatttgctggaaaggctcacagaattcagggaaacaggtaacatttaccagtttatcataaaggatattattacaaaggatatagatgaagagatgtgtagggtgaggtatggggcagagcttccatgccctctgtgagtgtgccaccctccaggaacctccacctgttcatctgtctagaaccctgtcctcttggtttttttgttttgttttgtttttgagacggtcttgctctgttgcctaggctggagtgtagcggcacaaacagctcaccacagccttgacctttcgggcttaagcaatcctgcctcagtctcctgagtagcttggatcacaggtgtgcactcggttaatttttcatttttttgtatagaccaggtgttccatgtttcccaggctggtctcaaactcctgggctcaactgatccacctgccttggcctcccaaagtggtgggattacaggaatgagccactgctcacatcttaggtttttatggaagcttcatgacatcggcatgccttcccctggggtataaggcaggaccctctctgcagaggatcttaaagattagagtcgtgcctcgggtcaggtcaaaggagggctggagaaggtcaccgagattccgtttcctgaggcctaacttacctaacattataacaaaacactgtaacaagggctgtgggagttttgctgcattggatgaaaaccagtatgtatgtgtcataacaccacactgctaaactgtcttctaaatgtctgtactccagttggttccatctctaatgtagagcattctagccatcacttggtatttttagtcctttaaaatttagcccttctggctgggcgtggtggctcacacctgtaatcccagcactttaggagtggattgcctgaggtcaggagtttgagaccagcctgaccaacaagatgtaaccccgtatctactaaaaatacaaaattagctgggtggtggtgcattcctgtaatcccagctacttggtggaaggctgaggcaggagaattgcttgaagccaggaggcggaggttgcagtgagctgagattatgccattgcatgctagcctgggcaacaagagcaaaactctgtctcaaaaaaataaataaataaataaaaataaaaataaataaaataaaatttaacccttctaatgggtgcgtggtagtatctgtattgtggtttctgttttttatttaatcagctttattatggtttacattcaataaaatccactcattttaagtgtactgtttgagttttgagaaatatatatactcacataaccactactgctatcaagatatggaacatttccgtcaccccaaaaaacttccctgttccccttttcagtcatttctctgccccagccctaaataacctgccttctataactatagattagttaaatatgttctggaatttcatataagatggaatcatacaagatgcacatactgtatgcactctattatgtttgacttatcttagattcattcttgttgtatcagttcattcctttttattgcttagtagcattgcattatatgagtatataactgtttaccaattctactgatggatgtttaggctgtttcctgcgtttggctattatgaataaaacttgggtgagcatttgtattcagatctttgtgaggacatcttttttctcttgggtatacttagtagtggattgctgagatagagtaaatgtaaaggaacaaactatttttctatacgctaacatcattcctgactccaaatgttttttgtttccacaccaaagcaattcttcagttatttgcagacaccaactgggtgtcctgtagttcaattcaattctgactgtatttacctggagctagtgagatcccttaaattaaccaaaagactgcccccacttaaggtgccagtcacaagtcctaagttgccagggtacttttggttataacttgaggggtctcatgatcacctgctcatgttcagtaatttgctgtaaaggctcacagaactcagggaaatactttacttacatttattggtttttaaaaagaacattataagggatacaactgaatagtcagactaagaggtatgtagggcaaggtctagaagggtcctgggtgcaggagcttctgtctctgtgaagttggggtataccatcctcctggtagaggcatatgtttgccatcccagaagttctctgaaccctgccctttaagattttttttttaatggaggtcacattacctaggaatgattaatgattaattaatgattaatcattgggcattggtgattaactcaattcctagctcctctcccgtctccagtccctttccttttcccggagatggtggtgggggcagtgaaaatttggatcatggttcctctagcagccagcccccatcttccaagagtcaccttattagcataaactctagtatggttgaaagtggcttattttgaataacaaaagatgctcctctcaatactatcactcaggcaattccaagaattttcgcttttgtgccagtaatgggggtcatcagggcagcaaagatcaaatatatgtttcttatgtcacaagatgtatattttgtgtttcaagaaactgccagatcttttcccaaagtggttgtacattcttatacttcctctggcaatatgagtttagttgctctacatcctagtcagcaattggcattgtcagtctttttaattttagccattctcataggtgtgaaatggtatttcattgtggttttaatttacatttctatgtgcctattgcccacttgaatatcctttttagagatacgccttttctgactttataaaaaaaattgagttttcttcttactaatttatgagtctttttatagtctggaaattagtcctttgtcagatgcgtatattgcagacatctcctgttttgtggcttgcctttccactgtcttaatcatgttttttgatggatagcaggtcttaatactaatgaagtccaattttttatttcatggttactgtatttcatgtcctgtttgataaattttaaggtcttcaaggtaattttatttatttctagaagtctgtaaaaagtaaagtagaggtttgtcttcaaagactttcctccccatctagttaggaataaatagtaacttctcttaaaagcaaaatttattcaaagacctgtaccatcattcttaaatatctgctagctgtaataaagaaatcaatatactttatgttcttagctcccacaatttagcttaagtatttgccctggcatgcttatactggtccaagcaagcattaggtcatagcctgttcctcttccttatttgaaggtgtttttacctttctcagcattccacaagttacttccttcttcctttgttctcctctgcctttgcctcttttaaaaagttctaagttgctagccaatcgggacaaatacaaaatgtgaggtcctgttccagccaattgaaactggacacggcagtagggtggacatgtcaggttataaatgaccctgtctcgtttgttcagtgtactctcgtggctaagctgctggcgagtgtaccctttctgcagaaaatagaaaaatggccttgctgagaaaattaaatttatgttcaagtgccatttctttacggcaccagggaacaaggctttcaaacaagtcttagggttttactatctcaaaataattgttttttatggttgcgatagggatcaaagttcgtttttcccccatgttgttaaccagttagtccaccaccattatttacacatatattaaaaaataattgcaaaattattgaataggaacttacctttttttacagaagcaattcacatttattatagaaaaaatgaaaataaatataatgtaaaataagatggaaaaatgtaatgaaaaacgtaaagtaagatggaaaaagaacaaagtttccattataactactattaatatatggtatgtattcttcccttccttcatctatacatatacatgtacatatgtatgtatgtatgtatgtattatgtatgtatatatttattttttgagagagggtctttgtttcccaggctggaatgcagtagcatgattgtggctcataccttgacctcccaggctcaagtgatccacctcagttgactgagtagctgggactacaggcatgcaacaccatgactggctaatttttgaagttttgtagagacaaaatatagggtttttgtagagacaaaatggggtctccctatgttgcacaggatggtctctaactttttttaagagcatgagtatttcatatagccaaaggttttacccactgttcttaacctttatgaacatgatgtgacatgacagactatattctctgcatgaaacatgctttcttcatgtttatgccattttagggttttaataaatcaaaaaatctcagtttaattaaagatttaaagatttaagttactagtgacattggatgtatttttctaatgtttgtggctattcgtatttcttttgtgaagaaagagaagtgttaaaattagctgtagttctgctctgctgcttctaggtgcatgggggagtgtagcggaaggaaatcactagggtgaggaacttctgattttgtcgtgactggggcactgctgctgcccttttgtgattgaaatggccatttttgttaaaagccagctgtggaagtgtttgcctcactctgcatactgtccatggcaaatggaaattgggtcccttctctgcgtagactctggctctggatgctctctgtgagacactttaggatcagttgctgttggcttcactgacagcttcaaggactctcactcctactactagcctttgctgctttgaggtggggttctgttgggaattccttccccttctcaggtgggcttttatttcttaatatgcactgaaccctatttctcgtccagttttttcctgtattatgtttatagaaataccttgaaaaaacttatatatgtggagggcaccactggacaggtttcaagtgccaatgtagtttgtcttttactttgatattcctttgatgattttggttgcatcagtcagtaaccccaactttgacacctctgttttcctcctgagtcttgtctatttttgctctttttcaccctcgctttctgcacttgagtcacagtgattttttttctttttctctgttcctctgaacctgcttgagggttacaacaagcattataatttgttctcattattagggaggggtcaccctttcttccttgtctagttaacctctgcttgtcctttagagttgagctgaagtgtcaactccttaggagccatgcctgggtcccctaggtacccttatagattaagttcccttgtcatgctctagcagcagtcagttctttttttatttttacagctgttaatgtaactgtagtttacaaattgatatggtttggctgtatccctacccatatttcatcttgaattcccatgtgttgtgggagggaccccgtgggaggtgattgaatcatgggagcaggtctttcccatgctgttctcgtgatagtgaataagtctcacgagatctgatctttcttaaaaaggggagtttccctgcacaagcttctctctctttgcttgctgccattctacttaagatgtgacctgctcctccttgctttctgccatgattatgaggcctccccatccatgtggaactgtaagtccagttaaacttctttcttttgtaacttgcccagtctcaggtatgtctttattggcagcatgaaacggactgatacacaaatgtattgcgtaatcccctgctagacaatcagctcttattagaaagtaatctccatgggggcgaggatcatatctgttttgtcatcttcagttcatggcatattcattcccagcatctgtcttagtttgttttgtgctgctataacaaaatacctgagactgggtaatttataaagaacagagatttctttctcttcctctttcttttttcttttctttctttcttttttttttttttttgagacatggtcttgctctgttgcccaggctggagtgcagtggtgcagtcatggctcactacagcctcacctttctaggcagggttcaagcgatccacacgtgccaccatacccgactaatttttaaattttctgtgaaggtggggtctccctatgttgcccaggctggtcttaaactcctgggctcaagtgatcttcctgtctcatcctcctaaattgctgggattacaggcgtgagccaccctgcctggccagagatttctttttttttttttgagttggagttttactcttgttgcccaggctgcaccattttggctctcttcaacctctgcctcctaggttcaagcgactctcctgccttagcctcccaggtagctgggattacagacatgcaccaccacacctggctaattttgtgtttttagtagagatgggatttcactgtgttggtcaggctagtctcaaattcctgacctcaggtgatccacctgccttgggctcccaaattgctggggttacaggcgtgaacgaccacacccggcccagagatttatgtcttagagctcacctggaggctgggaagtccaaggttaagggacctgaatctcaaaagggccttcttgctgcattatcccagcagaagatggaagggcgtgagagagctttgcttgatagagcaagagattgaacttgcagcctgaaacccttttataattggcattaatccattcatgagagtggagccctcatgacctaaacacttaccattaagccccacctcccagcactgttagatttgggattaagtttccaacacatgctttttggaggacatatgcaatccataacagcatctatcacagtgcttgccaagcagttgcccagtcgaatgagggaataaatttggaagagcaaatgagaattactatcttatatcaaaaggctatttctacttccaaagtgagtatatttgctacttaaactcttggtgttttctgtttcagtaccatctcgtaattgacttgatcctgaaaattaaataattggcatcagaaacttctttcagaagttgaaaaagcatcccctctcccctctctggttctaaaccagattttaaaactgtcgttgacttgtaagtcgtccagatagttttatctcactgttacttcaactatcattttgaaggagttgtcatggccttaactgctgccttcccctccttcttcctcccttcctcccctccctctctccatccttccatcctcatgtgttttagtgattaataggttgattattcctgtgagttgttagtaaatgctgtatatagtctccttttggaaactcacctgataatcatcattttaataatgtgtttcccaacatttcccaaactttctgatcccagaattcctccccccatatatttggttcgaaatctgtgtgatccaagagacacacttttggaaatgctattctttatgatttttgttcgccctaatcccttttattcaccaagagtttctcttgtcatcctgccaaaataaggagggaggagagaactagtatttgttaaatacctactgtttgccagatttacaccccctgtttcttttaacctttactgtaaccttgaaaggtagacttgttttccacattttagcatgggaagaagtaggaactggaggtgattaatttttgcccaaggtcacgtagatagcaaagtgatagattttatttacttacattttacttattcatttttactgtaatgcctgtgctctttctcacaccagcatggggtaagaaaaactcttctgattgttctagaggccccacctctgtaataaccacatcttagccagcagcactcgagagagcctgaggctcaggagcagcaggatctccaggctgtggctggccagcagcagattctctgcatttgggtagattgagaagaaaagggggaagccttgactgcctctgcctaaactgcctctgtaaactctcatgttccttcccttccttgttctcccagctccattcttttctagtggcatatggcttctttgttggagttttaggttgatttttatttagtaatttcacagctattgtttattggatgtctcttttaatatagcaggtcttgtacctctccagccatttaaacagctgactcttagtttatataacttgcttgaggtcacatagtattgccaggcgtggtggctcacgcctgtaatcccagcactttgggaggccgaggcgggtgggtcacttgaggtcaggagttcgagactagcctgaccaacacagtgaaaccctgtctctactaaaaatacaaaattaaccgggcgtggtggcgcgtgcctgtagtcctagccacttggaaggttgaggcaggagaatcacttgaacctgggaggttgaggttgcagtgagccgagaaagtgccgttgcactccagcctgggcaacaagatcgaaattctcaaaagaggtcacatagtgttagacttgggatcttaaccaatctttgcatgtttttttgacaatgatatctctctctgtgtttttaagagatgaggtcttgttatgttgcccaggctgaagtgcagtgaatatttataggtgcagtcgtagcacactgcagcctctaactcctggcctcaagtgatcctcttgcctcagcctcctgagtagctgaaactgtaggcataggttatgctcggcttcttcctgttttttttttagcttcaagaaatttatgtataagggaaacttataagcaattaaaacctataaaatcatgtgtttgatgtgctacctgtatatatgtgtgtgtgtgtgtatttttttttttttcttttttttgagacggagtttcgctcctgtcatccagggtggagtgcgatggtgtgatctcggctcaccataacctccgcctcctgggttccagtgattctcctgcctcagcctcccaaggaactgggattacaggcatgtgccaccacgcccggctaattttgtgtttttagtagagatggggtttctccatgttggtcaggctggtctcaaactcctgacctcaggtgattcgccaccctcggtctcccaaagtgctgggattacagacgtgagacactgtgcctgacctatgtttttacaatatatatttaaattaaacatgtagctatgaaacattaaaagaatcttcatgtaccaccaaaaatcatcttgagtaccaaactttgggaaacattgctctaatctcccctcttaacttgatccatccatctatccatgaatttctgtaaaagataagtactcaaaaacgaagacttaaaaacatacacacacatatatatcattccattatttgcatctaaaaaactaataatttttaaatatcaaataatgttcatatttgcctgtttcataaatatattttaaattaatagtctatttttagaacagttttagatttacagaaacttacagaaaaattgagtaggttgtacagaattctcaatcccccttacctccccaacactccccagttttcattatgattagcatttatgttagtgtgatacattgttacaatcaatgaaccagtattgatgcattattattaactaaagtccaagatttattcagatttccttagtttttacttaatgtcctttttctggtctatgatctcatccaggataccatccttacactttgctgttgtgtgtccttaagctgctcttggctgttatggtttctcagactgtcctctttttttatgaccttgactgttttgaggagtaccactcaggtacattgtaggatgccctctattggaatttgtctttagctttcctcaaattattgcattagcttgtcttttgaattcaggatccagacttaggtcacagattgcttatagtgaatagtttcttatatctctttgaatctataaaaatcgcctctcccatctttttttccttgccatttatttattgaagaagctaggttgcttatttgttctgtataacttcccactttctgggtgttgcagattatgttctcatttggtctacatattttgttcctctttgtatttcttataaattttagctagatcagaggctggttagattcaagttcagtgtgtttttgcctcaattaaaaaacagaatgaaataaaacccaaaacaaacctgtgatctttccactgtgccacagtactctctcttttgtgatattctgtattctttccaagtaagtggtccttgaaagcacagtacttctgtgcatatgcgttcttctgagttaaagcctacacagtttatttatgatagatggtgaagcaataacctggctgctggaatgtccacaggtggttgttagtttgccaaagtcaatgatgacacatttcatggcactaacaactggtattaaagttttagtcctggccaggcacggtggctcacgcctgtaatcccagcactttgggaggccgaggtgggtggatcacctgaggtcaggagttcaagaccagcctggccaacatggggaaaccccatctctactaaaaatacaaaaattagctaggtgtggtggtgggcgcctgtaatcccagctacttgggaggctgaggcaggagaatcacttgaagccaggaagcggaggttgcagtgagccaagatcgcgtcattgcactccagcctgggtgacagagtgaggctctgtctcaaaaaaaaaaaagttttagtcctatagttttaacttttttttttttttttttttttttttatgagacagagtctcactctgttgcccagggtggagtgcagtggcatgatcttggctcactgtagccttgacctccggggctcaagcgatcctcctacttcagcttccctagtagctgggaccagaggtgtgcgccaccacacccggcttatttatttatttatttatttatttatttatttatttttgtagagacgaggtctcattgtgttgaccaggctggtctcaaactcctgggctcaagcaattctcctgcctcagcctccccaaattctgggattacaggtgtgagctgtccagactggaatgcagtaacagtttcggctaactgcagcctcgacttcccaggctcatgtgattttcccacctcagccttcagagtagctgtgctacaggtgtacaccaccacgcccagctaaatttttgtatcttttgtagagacagggtttcaccgtgttgcccaggctggtctcaaactcctgggctcaagcaattctcctgtgtcagcctcccaaaattctgggattacaggtgtgagctgtccaggctggaatgcaataacacaatctcagctcactgcagcctcgacttcccaggctcaggtgattttcccacctcagccttctgagtagctggtgctacagttgtacaccaccaggcccagctaattttttgtatcttttgtagagataaggtttcactgtgttgcccaagctggtgttgaactcctgtgctcaagcagtccaccctccttggcctgccaaagtgttgggattacaggtgtgagccaccatgcccagcctccctatagttgttaattttcaacttttccctttttctcagttcaaaaatgtaataaattttttttttcctcctcactgcctgcaaaaacgtaatgacttttgctgctggtaacatatacagaaaccttagtttatttcagaaaaaggatttgagtgattacagtgacatatacagtgtaggaagattaaaaacaaaataagtgggaaaatgaagatgaaaggaaaaataggacaaaaagatgaagtcaggggtaaagttacatacaacgcatggaaaaagggtcttaaaggaggggcacagatgagactctgcttgtaatagtagtactctgtttctgcagtagtttataagacttttgtaaccttagatgataaatatattcctttgtgagaagttccagagtgttgttttctgtccatattcatgtgtacacatgcaaaaagcatctgtaaacctatagattgactttattgttgcaggtgttaagccataactatctgctgttaagactgggtgctttcaagtggtgtgtactgacagcacagtgtgagagatttagaggaactagactagaaaaatattttaagaacatggacaaaatggtctataaagtctgtaaggtccctttcagctccagcatttagcgaaattccttgcttcaagtcgtgagaactccccttttccagttgcctgcaggattcgaacaatgtgaagggaatcaaagacatccttgctgtgcagcaagcagcaggagtcccttactctaaggctgtcctagcccctgcctgaaagacaaattaatttcttagagcccagtggactgtaaggcacacattttatttttatttgaaaccaaggtcagcttaggatataagaacaatgaactatatgaagaagagcaagtgtaaactttactgtaaaattaagggatgataaaatgtgccactttattatctttgacaactcgcttttcatgctgttcttagctaaagaagcaaaatttttattaccattgttttccaaatctctgtgtgggcgtatgtatataaaattaaaacactactaacttggaacatgtatttatttggtgtaggggcctgttaagtctttgaaaataaatgttgtatgtattcaagaaatgagtagtgtttataaaatagtagagggcttgtttaaatgatgtaaggtttgaatttgtattagtttgttctcatactgcataaagagctacccgagactgggtggtttataaatattaagaaaagaggtttaattggctcacagttctgcatggctgggaggcctcaggaaacttagaagcatggtggaaggggaagcaggcatgtcttacatggtggcaggtgagagaggaggaactgtcaaacactcataaaaccatcagatctcctgagaactcactcactataccaagaacagaatgggggagactgcctccatgatccagtcacctcccaccaagtccctccttcgagggattacaatgggagatgagatttgggtggggacatgaagccaaaacatagcagaattcaaaagattttttaacagggccaacttttattctgcaggtactttttcagagctctcaatgagacaagtagcatgttagatggactttcaaagtctttggaagtgttaagtctacaaaagatgttaaaaataccactaattaagccaggcgtggttgctcattcctgtaataccagcactttgggaggctgaggtgggcagatcactggaggccaggagtttgagaccagcctggccaacacagtgaaaccccgtctctactgaaaatagaaaaaattagctgggtgtggtggtgcacacctgtaatcccagctctactcgggaggctgaggcatgagaatcacttgaacctgggaggcagaggttgcagtgagccgaaatcatgccagtgtactccagcctgggtgacagagcgcaattttgtctgaaaaacaaaaacaaaaaaagctgctagttaagttttaatactcttgaaggcagtggaactgcatttatttaaaatgtttcatactttaggaatttagccatctttttccgtttagcaaaccaggaaataatttaagcaatatggctttatttgcagaaataatttttaataccagaatatatagttttgagaatttttgtctatcaaagcatttagtatacttgatgtttagtaaacttttttaaatgactaagcagtttaaaatgaaaaagataaaatagaaatatgatgtagtctgactataattgggtcaaacctttattgagagaagatacatttctcaggtcatcttccagaaagtggtatctcttcttagaaaaaaatgagaatgttcattacatcaggagaaaaagttttcccttccatacattcttttttttggggggtgatgggggacagagtctcgctatgttgcccaggctagagcgcggtggcgtgatctcagcttactgcaacctctgcctcctgggttcacatgattcttctggctcagactcctgagcacctggggttacaggcatgtgccaccacgcctggctaatttttgtttttttagtagagacagggtttcaccatgttggccaggctggtctcaaactcctgacctcgtgatccatctgcctcggcctcccagagtgctaggattacaggcatgagccaccacgcccggccccttccgtgtgttctaatgttcttttaaaaacgtagtcaactttgccctctgttaaatgaaagtagggtaaggattttggcttggtatattagaggacaatcaggatctcgttgtgcacatatttccagaaattctctgattaaagtcttttgactcatgatggtgggtagaaggagcaggaagcgatgcagccagcactagtgtcttagatgttagggaaggggaagttggattaactgagggtggggacaggggcactagtataaatgagagcagatgtctctcagttcctagaaaatgtctaaaaaacaaattggggttttagttttgtcacctggaagacctctcagatgtcatgcggtatggactatatactgtcacatatttagaagtagtaacttagaagatacttaggagttttctgactggagatcatctgttagctatctagaagccagaagcattgaaatgaatggaggagagtgtctttgttacctcaaagtgcaaccaaattcttttttttttttttttgagacagagtctggctctttcgcccaggctggagtgcaatggctgatctcggctcactgcaagctccgcctcccgggttcgcaccattctcctgcctcagcctcccgtgtagctgggactgcaggtgcctgccactgtgcccggctaattttttgtatttttagtagagacgaggggtttcaccgtgttagccgggatggtctcgatctcctgacctcgtgatccgcccacctcggcctcccaaagtgctgggattacaggcgtgagccactgcgcccggcaaccaaattcttatagctgtcctaaccctacctgctctccaccttcattaggagaatggtctactacagtcagggggcaagttgctatgataagatccctaagtaactgtggaaatgccaatattctgtttagaggtggctcagaggagagggaatggagaagtttgagctgtcaattgtatggcctcatctgaaaaaatatggcagcccaaaagaataaaataaaaatcacctgtgtttaattccagatttatatgtgtgtgtgtgtgtgtgtgtgtgtgtgtgtgtgtgtatatatatatatatatatatatatatatgcatttttttttttttgagacagagtctcgctcttgttgcccaggctagagtgcagtggcgtgatcttggctcacagcaacctccgcctcccgggttcaagcgattctcctgcctcaacctcctgagtagctgggacttcaggcgtaccccactacacccagctaattttgtatttttagtagagacggggtttttccatgttggtcaggctagtctggaactcccaacctcaggtgatccgcctgcctcggcctcccaaagtgctgggattacaggcatgagccaccatgcccggcctatgtatatattatatttattaaatgaacatgggatcataatgtaagtcctggtttgttgcctttattcacttagtgtttcttgaattctttccgtgtattgtaactttctttctatgcattaaacttcctttagtgtctgtaaatatattcgtatagcatgatttctatttagcagaaacacaatagtttgtcttatgggtaatccctaatctgtggaacctgtccctttggttagcattttccctttgctattatgaacagtgatgtgaatgacatcttcttggctatatttttggacatttctttattttgtctccttgataaaatttcttacatgtgaaattgctgagtcaaatgatgtgcatgagtttcaagtcttgactatgtattgcagagttgcataccagagattgtatcaatcagcaatatagatgagtgacaggtagataaaatttgaaaataaatcagggaaacttgctgctctacggagtttaatgtcaggtaaaggaagtgacgggcaattatagataagggaagaaagcagggattttagagtcagatagaatgcagttttgccattcttgacctctggcaagtgatttgatgtctgtggtccttagtttttcttgtctgtaaaactcagctgcttgtttggccagaggtggtatgagagttaatgagtacggtatagccatagggtactcactttgtaccccctcccaatttatccttctttgttaattttcatgtcatttaacatttttattgaaaaagattaaacttagggttgagaggtctcgccctagtcctgaacaactttcctagttggaccacagctgctaaccaacaaaggcccagatgtacttaggtgttaaattatctccaggctcaggatttatggatcttggaaaaacctcattgggattgggttcagactgatttaaccttgagcttgctgggggattctgttcccccttggcagctgaacctcacgctggtcctagtacaactgaggatccatgtggctatgccggaaatagattattttgttacatcctgttctctgtcatgctgcttagaatagagattccacttcccacctcaaacatctaattctttcctcctccagcttctgtaagagctctgaaaaacttggtgacatttttgaatcatgggtggtagttgtaaagtggacaaggatgattttttttttcctttggatttcctcaggaataaaccattatgattttgatgtttccaagggccactaggtgaaatatttttctagcactgagcatttaaacacattttaaactgtggatgtttaagatggactcaaaattaattcctggtaaaagaatatgtttttatttaaattgtgtattagtccgttctcatactgctgtaaagaactatctgagactgggtaattcataaagaagaggtttaattgactcacagttctgcaggcttaacaggaagcatgattgggaggccttaggaaacttacaatcatggctgaaggcaaaggggaaacaagcatgtcttaccacgctgatgcaggagagagggtgagaagggggaagttccacacatgttcaaacaatgagattctgtgagaactcactatcgcgagaacagcaagggggacgtctacccccatgagtcaaccacctcctaccaggcccctcccctgacacgtggggattacaattcgagatatgatttgggtggggacacagagccaaactacatgaatatgttgtgaactgccccattaaaaaaaaattgtcaagttactctttataattaaacaaaataagtcatcacttaaaattatacttggtattattaaggtattaatatgagtactaggtggtcattggagaaaaatcggaaaatatggatgaataaaaatttgaaaagaacattacccttcatctctctaccagagagattacagtgaagatccattttagttttaatgcttttgggtactgatatctttttttttttttttttatttttaaagacaagagtctcactctgttgcccaggctggagtacaatggcatgatctcagctccctgtaacctctgcctcctgggttcaagcaattctcgtgcctcagcctcctgagtagctgggatcataggtgcgtgccacctgcctggctaattttttgtaatttttagtagagacaggctttcactatgttggccaggctggtctcaaactcctgacatcaagtaatctcctgccttggcctcccacagtgctgggattataggcatgagccatcttgcctggatgggttctaatatcttaccttagaataattcaagatgaaaattgtttggacattaattaaaaaaattatagtggtgtttaagcaaagtttggcctctgactttgagtcctgattccactacttttgggctgttcttgaatctaaaaacttggcagatagtaaattgtggttttcctcattcttctcatccttattttttttctccccttcctgcctacttctctgcatccccttttcttcccttaacatatatcccagcctgaatataccctgtgatataatattatgacaagaacataattctagaatacagttgctaagaattaaaatgtaaactttttggttacatgtcacatgtttactatcaaattctgttataataaaatgccattataaggaaaagaaagtattttgcacattagggtaatgggccaatattcagttctataaaaggttatagaaaatgccttaaaccgtgaattaacttttatttaacaacctgattgctacattgtgattcttggttttaaaaacaatgcatttatggtggtgagagtgctctttcttataggttgccatcagacattaatagtggaagcctaggttctgaattttagaagactcttctgaatgctttgtccttactttaattacaaacactgctgcttcttgaaaagcaacaggctgagagatgagacacaataggataattcctaagttgggttaactttaatgcttagtttatttggcagtcttcagcagaaactgaatggggactctagctgtcaagtctaggtttagagagctggagttatgtactccccttgagcccacctattgtctgattcatcaagacccagtcctcactcatggctagagattcccagtggaaagggcattactgccaaatggttaccccatgaaattgatcttttatttctcttcttcatcattatcatggcactctttgtttgatattctatcagtagggcctggtggaagttttgtggggggagaaaaaaggacctagactgagtatgaaagttggtaagtgctggttcttgtgtctactctttgtagcccatctgaaagaaattgcattgtttgtaaaacaaaaatgagctgctatcttatagattctcgaagagacttatccttatttctctgcaaatcatgcttggctgcagctgccaagggtcattcctttgcttaaaacagtttaatagctgtctcatcattgtctgtagcagtgatttgaatattaaaattttggatgtctcacttaaaggaatttaacacattcagaacactctggtctttaacaaaatccgtaatataatatctataaaaacatccttggtttttgtactatctgcttacactctttgtcattgggttactgttgagcagacttcttttatcgtttgcggcaaatattctccacgagttctagaaaacatgggatatttctttgttgctggcttgatttggcttggctttggcttgatgttatgcttcaccccttacctcttaatctaaaaacctccatcccctgtccacctccacctccatctctgtgttgcatgatctgtttctattcctctctgacagatattgtacaaactgtgtatctgctgagttgcagaaaaaaaagtcattcacattgatgtaaaattggatgacacagctgagaagcattgggccaactactgatgggctgtagcacagagtttaagacctgttgttctacgggattaagtcacaagtttgatagagagacctctggtccctccctgtctctctaattaagcctttctcatctcacacttaagtattttaatgctaaattaattgcagatacttgcataggatgtttcattttttacctctttggctttgcttatgctatgtattcttcttggaatgtctttctctttttcccctggctgcctcctacttaccctttatgaattagttcaggcatcctcttcctttgggtgggttaagttcatatttgtgtgtgtatgtatatatatatgtgtgtgtgtgtgtgtgtatgtgtatttacattataagtttaagattgccttctgtgagctcctggagaataaagagaatgtcttaattgctttactatgtgcagatagatataagttcagataagttttttggttaatggaacagccactcaacttgattacttcaatcatgatgacaggagtgagaagaagctggtaatgattctgtgggaagtggattaaataaaaagattggtggtggggggagttatagaaaacctataataaggcagatttctaaatcagaggttataacattagagagatgattaacataaaatacctctttggggaaattttaaaagaactgcttctttgagaaggaatcagggcaggagattcaaaacaatcccatctaaaaacagaccgaagttagcttttgtgagttcttcaagtgagccaatcagaatacaaggtgcctgcaaccactttttccttttgatttgtggttcctatggtaataggaagagagcctaggacatttttctcctacctcttttaataaactttttgcttttgaaaaatgccaaaagagattattctttttgtctttactgacttatggtgtttctcagcataatggtttcgatttaggtttttttgattatacggtggatatggcaaaagtaataaacactgtcagcttccctggctaatattattttcttcagctatagaacctacaaatatacaatctaattaggtattagctgttaatatcacaacccattatgaatcatttcctgttctctgtgaacaaccctaaattagaatattaatcattacaagtagctaaatacgaaattataacaaatgtatcttggcaatttttgaccctccaaagtcttctgttaagtatccccactatgatcctcctgggttgtttctcttgagctcaaggctaaagtcttaaggggaaagaggcttagtgtgtattgttggcttaataagcaggtcaataagtatttgttaaaattggtaaatacccatggtatcaggggtattcttcagacatattttagcaatatgaaagaacactgctcacttaaaaaaaaaggacaatcgtctgtactgtgaatttagctaatatgaagaaatcttttcattattctaactgaatagttaagcaatcatggataatagttattctcgaatgatcaacatgggtttccagccatgtccctaaattaaaaatttgaagcttcaagaatcacttacggccaggagccatggctcatgcctttaatgccagcactttgggaggccaaggcaggcagatcacctgaggtcaggagttcaagaccagcctggccaacatggtgaaaccccgtctctactaaaaatacaaaaataagccgggcatggtggcaggtgcctgtaatcccagttactcgggaggctgaggcaggagaattgcttgaacctgagagatggaggtttcagtgagccaagatcatgccaccgcactccagcctgggtgacagagcgaggctccatctcaaaagaaaaaaaaaatcaattactgttgtggtcctagctgtaatttaatgctcttaggttgatgaatgtggaacttttatttttatccattattttcaaattggatcaatgtcctcctgatctattagatctaagacctaagaggaacctaccttgttttggctagcgggtacagactttcttactaaaaggtgggtgtatttcctagaatagcattttctgttgagtagagatgattttcagcaatgtggctggtcacttagcttcaaagtaattattgagtgtgaaagtaagcagttgtaatactttttaaccactgtctgtgttcttaccaaatggaaaacaacactcgtcttgaaactggaagttcccagtcctgggatgatctgagagttgagacttctgattagtagatattggcagttgcatcacacaccagcttgggtgctgcctaggatcaagctgtctcagtgaagagtactcttgcctcagaccttagcaccaacccagcactatgcgattttggataagtaaattacttcatctctgagcctgtgtttcctcttctgaaggggaaagtaatgtctattgtgtaggattattgtaaaaatgagatgagatatcctttataaagtatttagcatgatgtcagcatctaataaatactggcatcattctttatatcttacagtatctaccatagatattatgaagagaaaatcttggaaatctgaccctcagagggtcttttaaaaatctttccctgaatatactagttaaataacaagcttcaaaaagctttgaaatatcagtcttctaataaatggctaatgttttaaaatcaagttcactgaaaattttctttatgttgattgttttccacattgttatgagtattgattaaatcattaaatggttaaaaagccttgataatatcattgtttttctaatttggatttaatttcttcacctcttaatctaaaattagcagtgcgaggttatactaaatagtatttaaaatgccttcctgttctcacaatctgtgattttttgatttactgaatgtgaaaaattgccttttaaaaagttttagattccaacttattagcagaatctaatcaataccttatgctttcatggtttttaccctttgaggcaaatactattaacccttgcagagggaacctgactttttactgaataagtaaaaattgatttacgtatgagctttggtgttaatttgatattagttgctgaatccagatgtaatccttttttgttgttgttgttgagacaggatctcactctgttgcccaggctggagtatagtgctgcgatcttggctcactgcaacctccaccttccaagctcaagcaatcctcccaccccagccttccgagcagctggtactatgggtgcataccaccatgcttggctacttttgtattatttgtaaaggtggggtttcaccatgttgctcaggctggtctcgaactcctgggcttaagtaatcccaccacctcggcctccgaaagtgctggggctataggcgtgagccacctcacctggctaggtgtagtccttaaactctctttgcccatccacttgtgatgtatgctgatgtaagtattcttttattaaacatgtgtaagaatatctctggatagagagtgtttgttgtagtggaaagaaaatcagcttgtcaggtttaatttactagtcctaattctgccatcagttagcccttattcccctgcaccttggacaagttgctggttttttttcttttcttttcttttcttttcttttttttttttgaggcagtctcgctcagtcgcttgggctggagtgcagtggcgtggtcttggcttactgcaacctctgactcccaggttcaagcaattttcctgtctcagcctcccaagtagctgggattacaggtgtgtgccaccacacgcctggctaatttttgtgtttttagtagagacggggtttcaccatgttggccaggcttgtcttcaactcttgacctcaagtgatctgaccaccttggcttcccaaagtgctaggattataggtgtgagccaccattcctggtctgtgttgctgttttaacaaatcaggctctcctttctgttttaattaaaaaaatttttttcttaatggaaaaaaaattccatgggactctgcttgatatctctttcctgatcatcagtttcctcatcataaaatggaataatacctattttacagggttattgtgagagtttactatttcagctgtctagcacataacagaagcttgataaatggcaactactttcattattttatttcattattttattcagcaccttctgtggttggtactctgcaaagtgttgaggcaacaaaatttgtgtacctggagtttcaatgatatattgccactgtattggctttggaataaaggcacaccttggaagtgtgtcattttcattgctaccagaaagctgctcaatttttttattccatttggttcctctgattttgtattctttaaatgccttttctaagtaatctcaatattccgtgtattataggtgaactgtaactagtaagtgacagatactagataggaacccaggtctctctgatttcaagcaaagctatctttgtttgtattgcagttgggtgataatagaatttatccactaaaccagaacacttttgagagtgaaagttatgaggggacaataagtgtcatccaggactatctcaggcaaatgagggtgtttggctattctaattatagctagaacaaacaagtttatgagcttgggtccaagacttctgggatgttttggttgaacccaaacactcacctttaatttttgttacatgagtattgattttgccatagtaaattaattgactttatatctgaatgattgaacagtgtggtctaatggttattaactttacagtatggtctaatggttattaagtagtagctgtagtacatatgttcattttatattttactttttttcttaattcctttaaaatcagcaagcttttaaaagaggatcgaagaggtaaattaaataagctttttaattcttagtcatgtcagacggactttgtaaacaaagtctaaaatgaaaatcatgacgttccaatgtttttcctttgggaaggtggagatgtgatgacactgaaaatcatgcattttaaatcacctcttttattgcctttatctatcagtctgtcacccatctttcttgttctttttgccttattctttaggtctcctgtgattttaccttagggaggtgcaaaactttactcacatgataaaagttggggtgatataagttttcacaatagcagcatcatagtcttgtggaaagaatgtgggttttggtagcagacaaaccaaagtttgaaattctggctctcccctcctttgttgtgtgtccttgcgcgaatcacttaacctttgagcctcggtttccttacaatgatatgaggattagagaacaaatgtaaagtgctgggcaaatagcactttttgtggttttgtaggttcttaaacaacgatgacaattatggttatgtgacatagacgagaaactgtggcactgatgaaattgtagtcgacaatctcaccactaatcttgttttgcactcaaactttcacagttccctttggtgggtttttgtttaaacattctctctgtccctcttgattctattcactgtaccctgagaaattagtggttggcagcagaaacctcctttccatagaacatcaagtgggccctcccccaaggtttcagtgagctgtctgggaccatccctaacctccaaactgccaagggtgcaccccctgccccaactaacattcaagttgcctgtgtgaaggagtgatttgttgcggcctctaactgcttcttctcttccttcctttttgtcatcctgcagtgttctgtgccaaggtctttgtggctaggctgcgccaacctggtagagagcatgtgcgcactgagttgcctgcagagcatgcccagtgtcagatgtctccaggtgcctctcttctttcttgttgtaaatgtgtttttacgtatgccatgaacatttgttgaaacttgcagtagtgtgtttaatccaatgttaagtctgctaaatgttctgtgtaaccctctgctttcctccagcctgggtgccccacatggaggagttagtaccaagaggggcccttttgagcaaacgggtctttggctgggccctgtcctccccttttctgctcctgctttttactcttttcccctcaccttgaggttgtaattctcatgtttaatagttgcgcatgtgccaaaaaaaactcctgacattttccatttggctacctttaacagttctttgttgagttgggagggtttcataattaaagtggtgatttttttctattttgaaactcatccttttggcttgctttctctcccctcttcaaaaaaggagcggggagggaatcactactggcataaagcctcaaactgaagtttataaagatcatagctttatgctgccaataatttgtcagtttgggccacctcccaaaggccagatctgacacctgtcctcagggtccacccagttttccaggccgaggccggcagagaattccacagataaaagtaaaactttttgggggtggatgggaaagggttgctcaggatagaactgttagcaggagtgcagctggtgaccctctcttgttggggtggcttctaagagagccaaggaagaaaacattgtagctttatttctgaagctctgagcaagcatgtgtttaattaaatatggtttcagtagcaatattcagttttcatcactgcatattccagacagtttgatatatctttgaaaagccatattaaattcctggcatctggttgagactgtcctgtttgaggaaaactgcaaaattaggcactgagttagagggatattattgatggcatgggtgactttgctgttctcaagtttatctttctattcatgtttacaatttttaaatggagctggggagccaggaaggaggaaaatgttcttcatattggagtcaggcattttatttacttattggcaaacattcagagtagcactggtgtggttattgattcaaattgctttctttggggaactgtactggaacctcactaacacagttaactggagagcgagttcaatataaggcccagttgtctttagattctgtatataaaggtgggttacaagtctcaccttacaagaacaggatgcttcagtgaggctcagtgtaatgaatatatgtttacttttggaaaagcagcttctgtgcatgcgatgtaacttttaacaaaaatgttcttggaatggcagccattattgcatgtgctctccttgatgctgtataatggatatttgcgttattataataggtgtataataggtgtattataataggtgtatttttgtctctatttttctggattaaaaggaatgttacagttgctttttagtgggctgaccgagttttttccagaactggaaatttaagagggggaaaaattgtagttgttagtgaggtcttgaagtgcggattctttttattgcattcagttaaaagtaattggccaatggaaggcatcattcaatatattttagtaacagtattgtgagttctctggaggtggggtgagtgggaggaggtacacgggttcctaccttgttgaaaatggaaatccaaatttgttaaaagttccttgactcatctttcttagtgaaattcacttaagaaggaaaaaaagatttttttttttttgccttgattgggtcttatttcagtgagtggagcaatattgtctttagagacgtgtagagtattctgtttacttaggtttaatttttgctagtatataattgagggtatgcagcatagtaaaatgaactaagtactcagctcattggcattagcaaatcattactctgttttgtcccacatgtgaatggaaagtaaacatgtattaatattaatgagcctggaagacttccttcctctgtactcatttaagtattattttaatgccaacatttctcccctttacctccagtctccaaacagtgctaaaatttcgtgccttaatttgggtttgggctctcaaagaaggcctgttgcttatatgctgcatctttggtttattgcaaagatgactcttcctttgcacaccttttagcaacctcatattagagcaggcctgagaagggaaggaatagttaggctacctggagagaacagagcctggttctttcctggtctctgaagttccatgaaagagtcccccttaaaattgtcagagtggacccactgataattgcaacttgagcccattgacctgtctatatggctgaattttagtttacctttcgaaaaagccggagggaagatagtagttgcccttaggcataatttacccattccggaagtttctaccatcgtctagaagggaaaacaggtatcagagacttaaaaatcactcattaccaactgttacatggtgcttcacatatattagctttatgacaaccctgtgaagtaggtgttcttatctccaattttctgatatggaaactgagtctgacgtgactatttggcccaagataatgtttacataactgtaaagttactggcatatgaatcacacacttgcctgattcccaaactggttttctttcctctactctggaatgctgcttttgtagttttccatgttggttttatttgtagaaacctcactattgacacctggtatatggtttgtttagttattaatattatttgaaaataagaaaagaaaaacctgccaaattctgtagaaaaaaaaagttgccattctttttgccaaaatgagccctcctgaatcttacagctagtgaggttcctgagtggactttctgcaaacttaattccataaatatttactgagcaattggtatgtgccagggcctctattggttatctctcaaccaagctgaactgagtcagtgtttcatttgcctcagatgtcctgattcaaccagttgattgttatagcaaataatcaggaattcagaccatgtggattattgatttgcccagattcctgtggcatgagaatcataccaatgttaataatagtatgtatcatttattttccacgttctttctatgtgttggactctaggaattggattatctcatttgatcttttatggaaaagttatctaccttgccatttttgtatatgaaattatagaggtgaattgacctgcctaaggttacacatttatttaagtggcagaactgggttaggaacataatctggatgactgcaaagccagtgctctagtcaccagtctgtagtgacaactgccattttaacttgcaactgccatttttaggttgaaacaaattccccttaatttttggagttaaaaatttaaagccaacacagcagcatgatgtaatagactggcaagttgtcttgggaatgtcatttgcagcctcagctgggggagagtgttagtgataagccttttgctggggtaggactgattgcttggaatgacagtgaggatcacgtgaattgagtttgagtgcctccttccaagctctagtgcatatagtgctgggcagtaagtagcacaacttcttgacagctgcctttcttgtttctttttttacttttaataggtgtagtgagccacagtggtctgagaatgccacagaacttatcatagcttttgatataagagaatattttttagaggagggagatagcttggtagaaagaaccctggctttggtgcagacaaacctctattctagtcctgttcctactacttaatgactttgtgatactgggcaagttactttattttcccgaacccctgtttcctcatctttaaaaatcataaagggtttttatgaggtagagaaagataattgccacctcttactgattcttactcttggggggtatgaaatccattttttaaatttacttgctcctggttctccatgtaagaaggaatttcagtcttagattccagggctaggtaaggattagctaaaagaccatgcatatgataaggctgtttttgttcagggtcggtctgtctaaggtcagacatggctgtttgaattcattgcctcttgtctgttttctaataagcattagggatttgtcatttcttgttgattatcttaattatcctatagcactctgggtctgataatgtgaacgttttgggttgctcagtggtagaatctgtagtattttatagacactaaaacctacatttttggctgagcatggtcgcttacccctataattccagtgctttgtgaggcccaggtgggaggattgcttgagggcaggagtttgagaccagccttcgcaacatagcaaggccctacaaacattttatttttgtattttgtctctacaaaacaaaataaaaaattaggtggacatggtggcatgtgcctgtagtcctagctactctgggagctgaggttggggaatcccttgagcccaggagttggaggttacagtgagctatgatcacaccactgcactccagcctgggtgacagagcaagaaccttgtctctaaaacaggggtgtccaatcttttgtcttccctggaccacattggaagaagaattgtcttggactacacataaaattacactaacactaacgatagctgatgagctaaaaaaaaaaattgcgaaagaaaaaaaatctcataatattttaagaaagtttacgaatttgtgttgggcctcattcaaagccgtcctgggggcctgcaggccacgggtttgctctaaaaaatatataaataggctgggcgcggtggctcacgcctgtaatcccagcaatttgggaggccgaggtgggcggatcacttgaggtcaggtcaagaccagcctggccaacatggtgaaaccctgtctctactaaaaatacaaaaagtagctgggcatgatgatgggcgcctgtaatcctagctacttgggaggctgaggcaggagaattgcttgaacccaggaggtggcggctgcagtgagccgagattgtaccactgcactccagcctgggtgacagagggagactccgtctcaaaaaaaaaaaaaaaaaatatatatatatatatatatatatatatatatatatatatatgtatgtacacacaacacacacacacatatacacacacatatatgtgtatgtatatatggttaaaaaaaaccacatctttcctctttataagaaaatttacgaaatagagtttgaaaaagaagaaaacgtccattggtagcgtgagcatctaccacccagagagaacatttgttgctattttagggccttacttcctcctgtctgttcggtagggaggaatccatcaaattgtgcagtgttattctgctgctgctgattttaacagtggtatttttaatgccctgtggaaccccagcttgactttggagtcactagagggataaaggaggggctagcacagtgtgcctcctacttcgatctcacttagaatggctctggatttatctattctacttaatggggctcttaggaagatttcattttaaaaactttctccttatagaaatagctaaacacacaaaaataagagaattattcaacttaatcttgaacagttttcaaaattatgctaatcttagttcaacttttcttcaattttgtttttcttggggcattttaaaagcaaacctaaaatgcctcaaagttttacaaaccactgtttcatgctagcattaaaaaatttttaaacaagcttcaagaaattaaaaataaaggccaggcatgatggttcacacctgtaatcccagcactttgggaggcccaggcaaatggatcacctgaggtcaccaacatggtgaaaccccgtctctactaaaaatacaaaaattagccaggtatggtggcatgcacctgtaatctcagctactcgggaggctacatcacagggctttagcatttttttattttcaaaaaaaaaatagccactttttttctctctctttttttttgagattgggtcttgctctgttgcccaggctggagtgcagtggtaggatcatggctcactgcaaccttgacctcccaagctcaagtgatccctcgcacttcagcctcctgagtagctgggaccacaggcatgtgccaccatgcccagataatttttcagttttttgtacagacagggtcttgatatattgcccaggctggtctcaaacttctggtctcaagtgatcctcccaattcagcctcccaaaagtgttgggattacaggtgtgagccactgatcccggtggctagttttccttttgaggggcctttagactacaatttttttttttgtcttttgtggcgggggttgtattataggaacttcagtgatttcattgcatatgtatctttaggcttgtacgattttgtatgtgtaattgcttggtcaaggaatatcagtattttattatgacttaattaaattatatacagaaaagtttagtaatctctcccttctaatcccttccttccccctaagaaacgaatgttaacattttgttctttatcattgtatatttgttttctttgttcataggagggtatgcaatctgacaactatcagaattccctcatttaaattaaaaaaaaattatttatttatgtatttttttgagaccgagtctaactctgttacccaggctagagtgtagtggcacgatctgggctcattgcagcctctgcctcccaggttcaagtgatcctcctgcctcagcctcctgaataggtgggacgacaggtgtgcgccaccacgcctggctaattttttgtattttaagtggagacgagattttgccacgttggccaggctgttctcgaactcctgacctcaggtggtctgcccgcctcagcctcccaaagtgctgggattacaggcatgagccaccgcacccagccatttttttttgaatagaggaaatgggctcaccctagaaaaatcacaatacggggtcacttatttgctttatttatttaacattatgttatagacatgtccccagattagtaaagtctaactctttcatgaatggtacttttatcatccctagattttaggggtggaggcgagagtacaggtgtttttttttttctttccatttttgaagtataaagtgtatatagaaaagttcaaaaatcttaagtgtgtacagctcagtgatttatcttaaagtgaacagtgctttattttgataggtatggctaaattgctttcatggaagatagacccatttatattccaagcattgccataacccctgaatatcatttaaaaatgtttaaggtgtactttaaaagtattactaaaaataacatacttgttcaaagttaaaccaataaataaaaactggcaaatagtaacatgatgaattaagattttctatcatcatttaaaatcattgtataatattccatttaataaatatattaatgattttaagaaaacttcccttccatattaagactgcttccagttttgagacattttaagccatgtggagttaagcatcattgtaattaagtctttgtatacttctgtgattattttcttaggtaagacagtgtgcacatttaggttgctaacttgtacttttgagaagctgggtaaaattatactcttaaaagcagcccatcagagatcccttttcatactctagatgacattgaatattttaattttgtactttgttgagattttgatggatgaaaatgcagaaatggtatcttgttataatgtacatttaattgctaatgggttggaatatatgtatacataaaaatattcattggccatttctgtggttgttatatgagttacctcttcatgttcttttttccatttttctaatgatggccttatttaaaaaatctgatttataggaactctttatatattaaatatattaactgttatttattgcaaatacttctcccagtttgacatttgcctttcagttttttaataatggttttggccatgatgaaagttttgaaaaaatgtttactttttgtgtggctatacttgttcctttcttataatattcttctagtggtttatagcattgtgctttgcaatctttcattttctctgtaatttattttcctatatgctgtgaattagggatgcacattctttctgaatgacctatcagttgtctgcatactatttactgatctagtgttttttcattgatttgatatcatatgcgcatgtttcacttccttgtgtccaatgatgtgaagtcaccgaagccttcttcaagcttttattcttcttcaccttcctattattatcatcagccatcaacctttgtaagctcatcatccacaactgtatcatgctgtcttttatatgttgtactagtttgaaagtatcttactgatgatatggactttgaaagtttagtgtcaaacgttattcctatgcattgaaatttccatgtcatattttctgaaaacagtgaggatgacttggtgatctgagaatttgaagcagcaggaaaaacagcaaataaattaatattttagagaaagttttaatgatagcacaatgcctgcatatagtactagcactaagaaatcacattccctttggaagagagcctgtgctatgggagaatgaaaactataccttgccttactagcagttgtaatttatggtttccaaaacaatgtgtatgatagattaaggtttcacagtataatttgaggatagggacgtgggtaaatggaattcagaacacattaaaaaacgtctttttaattcttgaacaaaaatgtcatgtacctgatactatagacatttattatgttgcttgtaagagtgcttggtttatttatttctgttggtttatatttactgttcattctgtttatgaaaataactttttttgtttgatttttgttgttgttgttgttttttaattaaatagaaatgggatcttcctatgttgcccagactggtctcgaactcctgggctcaagtgatcttcctgcctctacctcccaaagtgctgagattataggcatgagccaccatgcctggctagtaacactttttttttaatggcagagattttagagagtggacaagcatgaagaagaaattaaccagtcaatcataatctcacttcactttaatatctgttctttgttttctgtcattttgtttctatatagatatgcttatctatctatactttttgtttttatataggtttatactccatacactgaagtataacccagttttttttttttttttttttgagttggagtctcactctgtcgcccaggctggtgtgcagtggcatgatcttggctcactgcaacctctgcctcccggattcaagcgattctcctgcctcagcctccctagtagctgggattacaggcacgtgccaccatgcccagctaattttttgtatttttagtagagatggggtttcactctgttggccaggctggtcttgaactcctgaccccgtgatccgcccaccttggcctcccaaagtgctgggattataggtgtgagccaccatgcctggcctacatttttatttttaaaaataaagtttctatttttttaggcggggtctcattctgttgcccaagctagagtgcagtggtgtgaacatggctcactatagcgtcgacctcccaggcccaagtagtcctttcacctcagcctcccaagtagctgggaccacagacacacaccagccactcctggctaatttttaaattttttgtagagatggcgtctccctatgttccccaggctggtacatttttaataactgcaatttcattgtctgggtatacaataatttaatcagtctcttattaatggacattaaggtcattaaactttagtgtacattcatgcttcataccttagattatcttattcactgaaaaaattctgagtcaaaggaagtggaccttgtttttttttttttaataattgagatggggcctccctatgttgtccggactggggtcttgaactcctgagctcaagtggtctgcccgctttggccttgcaaaatcctgagattacaggcgtgggccaccacacccagccctggactttaagccttttaatctactagcaaaaacattattctagtttttaatatcatcagcaatgtatgattataatagaaataaatgcccaatgtagaaaactgggaaatataggaaaacacaaagagtaaattaaaaatcagtcttcactcttttgttttttcttcaagcaacaaatgacttatgatgttcttactatgtgttaggcatagggcctggtaatagaggagtgcacaaaacagacaaaaagccttgttgtctcagaacctacattttagtggtgaaagaaaatgagtaaaacggccaggtgcagtggctcacgcctgtaatcccagcaccttgggaggccaaggcaggtagatcacttgagggcaggagttcaagaccagcctggctaacatggtgaactctgtctctactaaaaatacaaaaattagccaggcgtggtggcaggcacctgcaatcccatctacttgggaggctgaggcaggaaaattgcttgaacccgggaggtggaggttgcagtgagccgagatcccgccactgcactccagcctgggcgacagagtgagactctgtatcaaaaaaaaaaaaaaaaaaaaaaaaaagtaaagtacacaggatgttagatagtaatatgttctgtggagaaaaggggggaatagagcaccccaagatttgggaagggcttcagttttaaatagagcgaagagggaaagccatttgagcaaagacttgaaggaaatgagggagcaagctgtgcagttatctggaggaaaagaatcccaggtagagggaacagcaagtgtacaacaagccccagaggtaggaatgtttgtggcatgttaaaatagccagaaggctaatgtctggctggaatgtggaatgagggagaaagtagtaggagatgaaatcagggaaggaaggaggaaggtcatagaaattctgtggggcttctagagtttcgtagactttggcttttattctgcatgagatgggaagtcattagagaatttttaccagaggggtcattgaatgtcttgacaggatccctctacctgctgtgtagacatagaaagaagaggcggaagcagggagaccaactctaagattgatcagcatgtcagtcagggttctccagagaaacagaatcaatagtagatagatattttaggaaactgactcacatgaccatgggggctagcaagattgaatgttatgagacaggccattaggctggaagctcaggcaagatttccttgttgcagcctggaggcaaaatttatccttctctgggaaaccccagtcttttctcttaggccttcaattgactggatgaggcttacctacattatggtgggtaatagactcaaagtctactgattgtaaatgttaatcatacctaacaatacccttacaccaatatctgctaatagattagtatttgaccaaacaactggccatataacctagtctagccaagttgacacataaaattaaccatcacaagcagattggaaggaggccacactttggagttagggattcaaaatggaaacagttcatgatgaaatgaaagaaaaggtgagtatgaggttagtaaaaataatattaatcttgttaagccagtatcatttatagcatcaatatctaacaagaatttagtcagcggtgatttggactttggagcctcggtgtggttggaagataaaaatgtgatacgtttctacttgcaatagtgaaatagtgagtgcttcgcagagaaccattagtatatagtgctcaatttgtggaagaactataagtatgtagggaacttacagttaatgagtactacatgcctaaacatgttactaagctctttcccatatattatctttcttcactttataaactttataagctaggcactattctgtctgttttatatgtgaggaaactgaactgagggagagagagcttgtgacctaaacaggggtatctaccttctatgtagtggagccacgattcaaacctagtctttctagttctattataccttactgcctcttaaagtagaaactattttcatggggatgatttttatattttaagttgtaaacagacttttctaaatcccaggtcaattacgcaataggaatgctatttatgttgttataccagtagcttgcatgatcagatatctcctcttcagagagaccttttctgaccacccaattgaaaatagcttcctgctttccactgttattttatgttgctttatttttttccttcatagtgcttagcactgtatgaaattatattccatgtttgtttgttttcctcctgtcggttgtcttttcccccaccagaatccaagttctatgagaaaacgggtcatgtcttctttttcactgcttggtaaacacatctgtttctaaaacagtcccagcaggtagtaggtgctcaataattatttactgaatgaagaataagcataataagctggaatgtgaaggaaaggctatttctaagcttggttaggattatctggtataatattatttgctgtcatagttaggactactttggacttctttctttgaattctgtgaatgtaagtattcctgtgagttgaaagattatcttgaaaaaaactgattttgatttgaaagtcttcaaatcagactgtattttgttttgctttaaaaagttctcttttgattgtaaaattaatactatttattatagaccattggggtaaaagtggaaagaaaaatgagaaaccacagtttatggagtaccattcttaatatttttggcatgttttcttttagttgtttttttttttttttttttttgagatggagtctcgctgtcgcccaggctggagtgcagtggcgcgatctccgctcactgcaggctccgccctgccggggttctcgccattctcctgcctcagcctcccgcatagctgggactacaggcgcccgccacctcgtccggctaattttttgtatttttagtagagatggggtttcaccatgttagccaggatggtcttgatctcctgacctcgtgatccacctgccttggcctcccaaagtgctgggttacaggtgtgagccacagcgcccggccttcttttacttttaaatctatgcatatgttttacatagttgggattattatatatataatttattatatgcatataaatagatgtataattttactttctatgctttgtatacttaatagaatgagtgtattaatgtattcctataatttctcatagcataatttgacattgtcttatatattttatgaactttccataacttgtcatttctttgggtgcttagagtctttattcttaattatccaaaaagctaatcaccatctttgtgcgtaaatctttggcttcattttgaattagctaggatatatttccaggagatacatcatatatatcttgtcaaattgtttcccggagtgtttacgtctcattatgccttcactaggattgaacatttttattttgaaaagctttagcaagcctgttgctctgtataatttagtagcatgctctaaattcaaacctctttacaagtggcaactctttcccctgagcagtttgaatatatgttgagtcagctaaggcatggcctactaaaacaagatctaggccatgcccggtggctcacgcctgttatcgcagcactttgggaggccgaggcgggcggatcatgaggtcaggagattgagaccatcctgtccgacttggtgaaaccctgtctttactaaaaattagctgggtgtggtggcgcatgcctgtaatcccagctactcgggaggctgaggcaggagaatcgcttgaacctgggaggtggagattgcagtgagctgagatcccaccactgcactccagcctggcgacagagcgagactctgtctaaaaataaaaactaaaaaagaagatctgtgctgctgtgcttggccaagaaaaggatgtcaagagatgtccaaacacctaacaacagcctgccattgagttgcctggctgctacaactagatttcaaaattcagatcattcacttagaatggagttactcacaaactacttaagaaaacagaatcactcttatatcttggacatatttatgtaccatggttctgagtcctactatgtcccatgccttatgttacatgcagagaacaagctgccaattgttgtagacagattgcatatgaacactgtctaccctaatataaagaaggttcctctctttagaaaaccaacagtcacttattggcatccctgtaaaatctttacattacaggatgcatcttagttacttaatttggagtagaaggcaaatgttaaatccttcatctttaagacaataagaaatgaaaaattgagggttaaagtaatggtagctctgatgatagtagataggaagaaactgtcacctaatttgaaagaaaaagactgtcaaaagaaacattgcccagggcatctggtagagttcacagaaaagagatagatggatgaaccccttatttttaaaaataataatttatttttaattaaatttaaaaaatttaattgattaattaattaatttttgagatagggccttactctgtcacccaggccagagtacggtggtgtgatcactgcccactgcagcctcaacctcctgggctcaggtgatcgtcctacctcagccttctgagcaactggactacaggtgtgtgctaccacgcctggctagtgtttttggatttttttgtagagacggggtttcactgtgttgcccaggctggtcttaaactcctgggctcaagtgatctgcctgctttggcctcccaaagtgttaggattacaggtggtagctgtcacaatagcaatgagaaaacagcaatcgcttttatgatattcatttaaactaaatctaaccataaggaaacaaagaacaaacctaaattgacagactgtgaaacagctggtctgtaatcttcagaagtgtcaaggtcgtggaagtcccgcaaagaccaaataactcttccagactgaaaaaaactaaagaagtgtgacaactaaaggcaatgcatcattctgaactgggtagctctgctataaaggaaattatcaggacctctgatgaaacttaaataagggctgagaattagttggcagtaacctgtcagtgctaatttaccgatttgattctcgtattatgactatgtagaacatcctcctttgtaggaaatacacagtaaaatattacagcatgagagaagcattcggtcagctttactttcaaattgagaaacaaaaggttctgtgtgttatactaataacttttctataagcttgagactatctcaaaataaataaaaagcaatatttcaatggcttgtttacattaattattacctaacacttcaaactatgagctcatatccccaggaataagtgtgctaaaaatcctttgtgacttttttaccaccacattttaatcacatgatcttaatgaacaaatattctcaaactagcactgactgacactacaggttcatgcgtctttcccaacctaaaagtcacaaaggatttttagcacctttattcctggggatatgagctcatagtttgaagtgttaggtaataattaatgtaaacaagccattgaaatattgctttttatttattttgagacagtctcaagcttatagaaaagttattagtataacacacagaaccttttgtttctcaatttgaaagtaaagctgaccgaatgcttctctcatgctgtaatattttactgtgtatttcctacaaaggaggatgttctacatagtcataatacgagaatcaaatcggtaaattagcactgacaggttactgccaactaattctcagcccttatttaagtttcatcagaggtcctgataatttcctttatagcagagctacccagttcagaatgatgcattgcctttagttgtcacacttctttagtttttttcagtctggaagagttatttggtctttgcgggacttccacgaccttgacacttctgaagattacagaccagctgtttcatagtctgtcaatttaggtttgtcctttgtttccttatggttagatttagtttaaatgaatatcataaaagcgatttctgttttctcattgcatcctctcaggtagtacataatattgatttctctcattcagaatggtgatcacttagatcacttgagtaaggaaatgtctatcaagccttcttcattgtaaagttattctttttccctttgtaattatgcattgggtggggaggtactttgaaactccacaaatatcctgttttcatcagaatttcagtttttcatttattctatcagtatacacctatattttcctattttattcagtacgttattttaatcttttattatcattatttatttcgatggtcagagtgtttaaagtttaggcagtgggtgccttttcaggtcagcgtctgtatcctttttttttttttgagacggagtcttgctctgtcgccaggctggagtgcagtggtgcaatctcggctcactgcaacctccatctcccaggttcaagggattctcctgcctcagcctcctgagtagtgggattataggcgtgtgctaccacgcctggctaatttttgtatttttagtacagacggggtttcactgtgttggtcaggctggtctcgaactcctgacctcttgattcgcctgccttggcctcccaaagtgccgggattacagacatgagccaccgcacccagcctgtctgtatccttttgatctgttctcataattgtttaagtacttccttattttctgttgcaacatgttccaggcttatcttgtattttcccactctcagccttggaaccagccatttctccgaagagccttgtttcctttcactgaggaatggtattagatctgggtggcaagtgtgcttagtgctactggaatgtcattgcttctaggccctctcagccaactgtgttaggaaatgtatgtataattttttgtctatataaaaatacttccctccttgttctatgtattagaaactgtgagtccatactgatatatccaattctagtctagtctcacagatctcattctagccttccagaaggaaacccttttcatatttagtactcgcttctctaacagtgagaaacctgactccggttttccacaatatatttactcacttgctcaaccccagaatgcatatcaagtagttttagaattacagtgggccctccgcattccatggattcaatcaacctaggattgaaaatatttgggagaaaaaccaataaaaataataatataacagtaaaaaataatacaaataaaaatacagtagaacaactatttacatagcttttacttttttttggaattataagtagtctatagagatttaaagtatatgagaggatgtgcttaggttacatgcaaatactattccactttatataaggaatttgagcaccagtcgattttgatatccatagcgggaagagtgtgtgtatcctgaaactgatgcctgaggatgacactgagggatgacacgccttgcaaacatcactgaaaaatacatgtactaacactagccatactaaagattctttacagttttctttctttctttctttttttttttttttttttttgagacagggtcttgctgtgtagcccaggttggagtgcggtggcacgatctcagctcactgcagcctccactcctgggatcaagtgatcctccccactcagcctcctaaatagctgggactacaggcacatgtcaccatgccctgttaatttttgtcatttttcttagagacggggtcttggcatgttgcacaggctggtcttgaactcctaggctcaagtgatctgcctgccttggcttcccaaagtgctgggattacaggtgtagccaccacgcctggggatttctttatagttcttaaaaataatgtttatgactgtgtagtcccattactgagttcaagagtcacttgggtgggttttcaccctcttccattaagtatgattatgttattcatttgtttctgctgatgtattacatctctctttctcagtttttgtttatttttggtttatttatttttgagacagagtcttgctgtcacccatgctggagtgcagtggcatggtcttggctcactgcaacctctgcctcccgggttcaagtgattctcctgcctcagcctctcaagtagctggtattacaggttcctgccactacgccccactatttttttttgtatttttagtagagatgaggtttcactatgttggccaggctggtcttaaactcctgacctcgtgatccacctgcctcagcttcccaaagtgctgggattacaggtgtgagccactgcgcctggcctatctttgcttattttttacacaaaaggtagtatacagtatatattcttttgcactttgccttttcacctaaaggtgtatactgaaagttattctatatcagtcaacaggggccttccttattctttcttatggctgcatagtactctgttgtgttcatatgccatagtttattcagccagtgtctttcgtatgagcatgtaggttgtttccattttttttgaaattacaaacaatgactgaataaccttgtatatatgtattttcatatagttactgaattagtgtatcttcagggagaattcctgtaagtggaattgctgatcaaaaagtaaatgcacaattagttttgttaaatattaacaaattttcttccaaaagggttgtgacacatttgccttcccaccagaaatacacaagagcacctatttcctcactgcttcattgactgaatgtgttatcaattctacatatttgccaatatgttaagtgagaaatgtgtagctttaatttgcatctctttaattatgagtaaatctgaacatcttttcctatttaagggtcatgttatgttttttgaaaatctgtttatggccaggtgcagtggctcacgcctgtaaccgcagtgatttgggaggctgaggctggggattgcctgagcccaggaattcaagaccagcctgggcaacatagggagaccctgtctctacaaaatataaaaataaattacctgggcatggtggcatgcatgtgcctttggtcccagctccatgggaagctgaggtgggaggataacttgagtctggaagagtgaggctgtagtgagctatgatcgtgccactgcacttcaggcttggcgacagagtgagactgtctcaaaacaaaacaaagtttgattatgacttttcctcattttcttattgggattttggtgttttttttacttccctcaatttaaagaaatttttagggatattagttcttttatttgtgacataggctgcaaattttttttccagtttgtcatttaaggtttagtttatggtagttaataaaaatgctgtgcaaaagtttaaaatttttatctagtttaaattttccttttttttttttttttgcttttttttgagccaaggtctcattctctcacctaagttggagtacagtggcacaatcatggttcactgcagcttcaacctcccaggttcaagtgatcctcttacctcagccccctgtgtagctgggactacaggcgtgtgccaccatgcctggctaatttttgtattttttagtagaggcggggtttcaccatgttgatcaggctggtcttgaactcctgagctcaatgattttggcctcccaaaatgctgggattacaggtgtgagccactgtatccggcccccactgcgtttttataaataaagttttattggagcacagccacactcattcacttacatatcatctgtggctgctttcatcctataacagaagagttgagtagttgtgacaaaatcagtgagtcctgcaaagctcaaaatatttacatctgaccctttacagaaaaagcttgccaaccctactctggagtatttgtgtattcatgtgctatgaaagtatcttgcttttcagtagagaggcttatttatggtgtattttgatgtctggtaggactgattccccacttttctttttttgtattttttactgaatactcatgtaagtttgcttttgaatatgaacttgagtatcattttgtctagctccataaagaattttcttgtggggttattggggaaatgttaaacttataaattagggagaactgtcatctttcgaatgttgagttctcttatccaacaatagttatgaagaaaagaatagagaaacctgtcaaagaattaaatcagaaaaatgtatcaggtcagtgtggattcacagagaattccaccagacctttaaagaacaaatgggccagaagctctataaattgttccataacattgattgaaggaattgttcttctttttctaggaattgcttttagttttattatcttttgatcagaggctcttattttctaatttttcttttttattgaacttatttctttgtgatctaatatatgataagctttcagaaattttttacacgtgctggaaaagcaagtttagtctgtgtaaacaggttatcatatcctgtaagacctgcctgccttactgatgcttatgaatttttattttttgttttcttgagctgtcttgtagtgagagtagtgtgtatagtgtatttatatccatgtctctctgcatttcttttagtttgtttctgttcatgatgtgctttctttgctcttttatttttgaaatttctttttatagagaggtttgtatttttgttagttttaattataatttttgtaatgcctctatttcctgttttttttttttttttgggtgagacaggctctcactatgttgcccaggctggagtgcagtagcatgatcataattcagtgtagcctcaaactcctgggctcaagtgattggggccgcccgcctcagcctaccaagtcactgggactacaggtgcgggctaccacatctggctaatttttaaatttttttaagagatgggtcttgctgtgttgcctagctggtcttgaactccttggctcatgggatcctcccatcttgccttcccaaagtgttgggattacaggcatgagctactgcacctggcctgcagttttaaagttgtgttatttctttgtctgaatatgacatgtgattcttctgttatcttcagacttgttttattctttttttttttttttttttttttagatggagtctagctctgctgcccaggctagagtgcagtggcacaatcttggctcactgcaacctctgcctcccaggttcaagcagttctcctatctcagcctcccgagtagctgggactacaggcacccgccaccatgcctggctaatttttgtatttttagtagagatgggggttcaccatattggtcaggcttgtctcgaactcctgacctcaggtgatcagcccgccttggcctcccaaagtgctgagattacaggtgcgagccacaacacctggctcagacttgtttattcttagagccataattgttttaaatgtttaccattaatttttttgacaattttttgcatcatctcaggattactcaaggaaacctttaccctttattttctaaaattttggaagatgctgctccactgatgccttgcttggtgtgttgtttcgagaaatttgatgccaatccaattaatgctctttctctttaaaggtttcttcttaaattaaaaaaaaaatttggggtggggattgaaaacattttttctttatttttaaagtctaacaattgtcttaggatatctcttggagtttattgctgtgggccagtttcccctattacctggagcccctttcaacatgtagttcaggtttccttttatctctggaaagctttttgaattatcgtttttttttctttttaaataacagctttattgagacataactcaaatattgtaaatttacacatttaaagtgtacaattcagtgatttttagtatagtcacagagttgtataaccagtgccacagtcagtttagaacatttgtatcaccaccaaaagaaacacgctaccggctgggcgcggtggctcacgcctgtaatcccagcactttgggaggccgaggtgggcagatcacgaggtcaggagatcaagaccgtcctggctaacacggtgaaaccccgtctctactaaaaatacaaaaacaaaattagccaggcgtggtggcaggcgcctgtagtcccagctgctcgggagtctgaggcgggagaatagcatgaacccaggaggcggagcttgcagtgagatcaagccacagcactccagcctgggctacagagcgagactccgtctcaaaaacaaaacaaaaaacaaacaaaaaaaaccactgtacccttaggctgtcattccctatatccctcacccatccaaccctaggaaccgcttggattatagttttaaaggttatttttattttatttttttctttagaaactccaattatatttaggttggatctcctttgttttccatgttaactactttctcactgcccatattgcttatttcttcatctcatttttattctcttgggttgttttcttgcttgtcttcaatgtttcctaataattttctattttttttttttttttttgagacagggtcacactctgtcacccaggctggagtagggtggcgctatcttggctcgctgcaacctctgcctcccgggttcaagcaattcttgtgcctcagcctcccaagtagctgtaacttcaggtgtgcaccaccacacctggctaatttttgtatttttagtggagttggggtttcaccattttacccaggctggtcttgaaccctggcctcaagtgatctgcatgccttggcccccaaagtgctgggattacaaggcatgaggcaatgtgcccaacctacttttcaaatttttaaaattttcatttgctttatctgttttgggggtattttaatgtattcttgtttgttataattttgtttttattttttgagttaggtcaattcttattacatttcttctggtttttggtacatttctgtcttaagttttcaatttctgattcagtgtttcagagtgtttttaagtaacatcacatgcctgtttgatcatatttaaatcagtttgcagtagctcttttcaaccaggtttctcaaaaacagtatgcgcttacgcactaaggcatacattgtatatagtgaattaatgtctctcatacatgacaggaatggtattatctatgtaccatccttagggaaattaagaaaactgtctgcaaaattactctcataagggcttcatgatctcacagaaccttagttaagaaaggcttgtttgggatgttgtttagttctctctgtttttccctccttcccttactccctgcctcttcttttatatgtaggagtttaatgaacttttccctgtatagttttttttttaaatagatgaaaattgcatgtgtctctacatttttttgagacagacctggcagtttgaggtagtttaagttgataagattcctagcttaagagcattccttatcaaagtattatttctttactgcatggcttcctttgcaggataagcaggtgatggtgggaggaaaggctttgtatcctttggatgttattaaaaattcttttcttgcaggatcctagaatacttcctcctgggattctaggatcccttctacccacatacacacacaacctcttacaatgtgggcatcccataccacagggatacatttgatgcaatggatgagcctaccttgacacaccattatcacccgaagtccatagcttatattaggatttattcttggtgttgtacattctttgggtttggacagatataataacatgtttccatcattgcagtatcatacagaatagtttcactgccctaagaattctatgtgtgcttcctatccatccttcctgacaatcactaattgttttaatgtctccatagttttgcctttcccagaatgtcatctagttggatcacacggtgtgtagccttttcatattggcttctttcacttaataatagatgtttaagtttccaccaggttttttgatgacttgatgcctcatttcattggatgacattcaattgtctggatgtaccacacttttttttttttttttttttttttgagagaaggtcttgctttgtttcccaggctggagtgcaatggtgtgattgtggctcactgaagcctcaacctcctgggcttaagcaatcctcccacctcagcctcacaagtagctggaacaacaggtgcattctaccttgcctgactaaatttttttttttttttttttttttttggtagaggcagagtctccctatgttgttcagtctggtctcaagtcctgggctggagagtctcctgccttggcctcccaaagtgctgggattacatgcatgagccactgtgcctggccctaccacagtttattcattcacctattgaagaacattttggctgcttccaagttttagcagttatgtgtaactgctgctataaacagccatgttaaggtttttctgtggatattagttttcacttcatttggacaagtaaaaaagaggatgaatattagattgttgggcaagagtatatatagttttgtaagaaactgccaaattgtcttccaaagtgactgcaccagagtagggtgaatatagttacaaaaatgtgttgtactttggtgatgggaaccctaaataccttgacttcatcactacacattatatacatgtaacagaatttcacatctaccccataaatttgtacaaattaaaaaaaataaagtggccttactatttgatatttctaccagcaatgaatgagagttcctatagctccacatcttctccagcatttcatggtgtttgcattttggattttggccatgctgatagatgtgttgtggtattttgttttaatttgtatttacctgatgacttatgaagagatgctccatattccatgtttatttgtcatctgtatatcttttctggtgaagtgactgttaaggtttttggcccattttaaaaattgtgttgtttacttttttcttgttgagtttgaagaattgtttctaggccaggcatggtggctcacacctataatcccagcactttgggaggctgaggcagatggattagttgagcccagaagttcgagaccagcttgggcaacatggcaagacctcatctccacaaaatatacaaaaattagccacgtatggtggtgtacccctgtggtcgcagctactctggaggctgaggtgggaggatcacttgagcctgggaggttgaggctgcagtgagtggtgattgcatcactgcactgcattgtgggtgacagagtgagaccctgtgagagagagagagagagagagagagagagagagggagggagggagggagggagggagggagagagagagagagagagaggagagagagagagagaaattgtttctgtattttggataacagtcctttgtcatatatgttttttgcaaatattttctctgagtttgtggcatattttttcaattctcttgacagtgtctctcagagatttttatttttaatgaagtccagcttaataattcttcatggattgtgcctttgatatgtctaagaaagtaatcaacaaacctaagatcatctagattttctcctatgttatcttttaggagttttagagctttccattttccatttaggcttgtaatctgtattcagttaatttttgtgaaatgtgtaagctgagtgtctagattcattttttttgcatatagatgtccatttgttgatgagactcttcatcgtattgactttgctccacagtcaaagatgagttgactgtatttgtgtgggtctattgtgtgggccctcagttctattccattgacctagctctgtattctgttgccagtaccacactttcactttcgtgaatactgtagttttgtagtgccttttgaagtcagacagtatcattccttgaactttgttctccttcagttgtgtttgttattatttatttattttgaattatttattttttttagcctctccatgtaaaccttagagtcatttcaatatccacaaagtaacttgctggattttgatagagattgtattgaatctatagatccagttgggaagaactgatgtcttgaccttattgaatcttcctttccatgaacatggaatatctcttcattaatttagttctttgatttccttcatcaggattttctagttttccttacagatatcttgtgtatattgttagatttatacctaattatatctataggtgtttatgtaaatggtaatatgtttttaatttcacatttcatttgctcattgctggtatataggaaagtgattgactttttgtatataaactgtgtatactgcagatctgccataatcacttatgagttccaggggctgttttgttaattctttcagtttttctttttttttttttttatttttttattttttattttttattttttatttattttttttattgatcattcttgggtgtttctcgcagagggggatttggcagggtcataggacaatagtggagggaaggtcagcagataaacaagtgaacaaaggtctctggttttcctaggcagaggaccctgcggccttccgcagtgtttgtgtccctgggtacttaagattagggagtggtgatgactcttaacaattctttcagtttttctacatagacaatcatgtcacctgtgaaccaaaacagttttctttcttctcaatctgtatattttttatttcctttccttgtcttattgcattagctagaacttagaggatgatgttgaaaaccagtgttgagagggaacattcttaccttgttcctgattttagtgggaaggtgtcaactttttcactaatacgtatgatgttagctgtaggtgttttgcaggtgttctttatcacgttgaggaaattctcctctatttgccttttgtttgtacactcctttctcctaaaaactgatcttttgaagactgcctttttgcatcttgcatcctctttatctgtaatcaactctgaactagcaggacgctttttaagtattttcatacataatgtgattttatgtcaatcttttatctgctgctcgtttccttctttttttattctgcacagttttcctgaactgcccttgatcttcatgaagatttatggctggagcataaggatgtactaggatttaaatttctacttatgttctgtgccttttagttatactgagagcttgagctttacgtagcttcattttttttgtcagtctttgtgtcctgtgaattcactaatatcccatcacttttattttttaatttttatttttatgttttatttttgagacagagtctcgctctctcgcctaggctggagcgcagtggtgcgatcttggctctctgcaacctccgcctcccgggttcatgccattctcctgcctcagcctcccgagtagctgggactacaggcgcctgccaccatgcccggctaatttttttgtatttttagtagagatggggtttcaccacattagccaggatggtctcgatctcctgacctcgtgatctgcccacctcggcctcccaaagtgctaggattacaggcctgagccaccacgcccggccatcccatcacttttattttgtagattcagcaggattttctagttagacagtcataccatctacattctttttgttatttatgtttttatttctttttcttgctctgttgcattgactatagtgaaacttgtgattttcaatttcaagttcacgaattttcaattttttaaattattgattggtttattattatttttttttgagacaggtctcactctgtcacccaggctgtagtgcagtggtgcgatcttggctcactgtaacctcctccttgagggttcaagtgattcttgtgcctcagctcctgagtagctggaattagaggcgcgtgccaccacactggctcattttttaaatatttttagtagagatggggttttaccatgttgccaggctggtcttgaactcctgacctcaaatgatccacccaccttggcctcctaaagtgctgggattacagacttgagccactgcccagcctattttttattttttttttagatggagcttgctctgtcacccaggctggagtgcagtggcacgacctcagctcactgcagcctccatctcccaggttcaagtgattctcctgcctctgcttcccaagtagctgggattacaggcacatgccactatgcccagctaatttttgtatttttagtagagacgggggttgactgcattggccaggctggtcttgaactcctgacctcaagtgatctgcctgccttggcctcccaaagtgctgggattacaggtgtgagccactgtgcccggctcaaattcacaaatttgaattcacactagaagtgtgaatggatattctagctttgtccttcaggacaaggggaaaatgttccatctttaaacattaagtatgatgatgtttcattatatgacctttatcatattgaggaagttatctgagtgtttttaagcatgaatagatgttgaatattgtcaaatgcttgaaatgcaccgattacaatcttccattctgtcccgttggtctatacatatgtcttcatgctagttccacagttttggttacaatagctttgtagtaaattttgaaaccagcttttcaaagctgattgaagtccagtttaattcttgtgtttcaagattatgttgtctgttctgagtcccttgagattgctaatgaattttatggttgattttgctacttacgcaaaaaacatcgttgggtttttttagggattgcattaaatctgtagatagttttgggtggtacgaagatcttaatattaagtcttgcaatccatgaacatgaattgtgttttctattatttgtctctttgattttttctgcaatattttatacttttcagttagtcatattttctataaatttaaagaaaagaaattaatgtatatgcactctcatttttactatttttcttttcagttatgtcttcattcctttactatatccaagttttcttttctttttgtctgaagaactttaacgtttcttgtagtgaaggtttgagaattagatcagagtcctggaagccaagtgaatgaagtatatcaagaagatggaagtgctcaaccttgctgatcggtgaagaaataggaggaataagaattgacccttagatttaataacttgtagtatgaagtcttttctgatgaaaacaaatgattattagtcaaggaattcgcaaaggaaattcagttcagccatccttttggatctcatggatttctaaatttgaccaagaggtaattgtcagagtaggcatgaaggttcattacagtgttgtgtttaatagtaaaaaatgtaatgtttgttactacttgtattgagtaaggaaattatgggatgaagtgaactgtagcccttaaaaatgaaaacgtagaactacaatgatgtggaaagatgtgcatgacacatggaaaaaacagttaaccgaagagcatgttttaaacaattttcacttacatatatgcagttttcagtctgtgtaccaaaatggtccagtggtcatccctaggtggcagtattttggttgatttttcctttttaaaaaaacttcatttgtgtattttcttttgtgatgtgcctgtggaagtcttttgctcatttaaaaatttagtatgtgtgtgattgtgattcttccttggtttgaagtgagttaaaaaaaattctgtgtgtattgccactcttttcttgctctgtaagttgccttttttcttctacatctagttcctttgaaagaattgaggtatattgtggtatattttgcatatcacaaaactaatccacatatgtagtccagtgatgcatcatcaccataaatcagttttcaagcattttcaatctctgaatgttttcaatgaacagaaattattttaatatagtctgatttattacattgttctttgtggttagcagttgtgtattgtttaaaaaagttttgcctattcccaggtcttgaggatgtcctatggcttcttctaaaagctttactgctttgtcttttacacttagatcttcagtctatctagaatggatttttttttgtatttctttgtatgcatgtgagagggtagggcccaaaatatgttaagaatatctagttgatagagtcttttatttaaaagaccattcttttcccactgcactgaagtgtgtagctaatatttatcaatagatatttattatacctctgtacttaagtagtatgctgggaattattctaagtgctaaggatacagattgaataatacaaccaaatatctctgccttatggaagttaaatttgactaaaggagcctctattagtctgttctcacactgctataaagaaatacctgagattgggtaattgataaggaaatggggtttaattggctcatggttctgcaggctatataggaagcatggcagcgtctgcttggcttcaattatggcagaaggcgaaggggaagcgggcacttcgtgtggccggagcaggaggaagagagagtggtgaggtgctacttttaaacaatcaggtctcgtgagaactcactcactcatgccacgacagcaccaagggggatggtgttaaaccatgagaaaccgctcccatgattcagtcacctcccaccaggcctcaccttcaacaatggggattacaatttgacaagaggtttgggtggggacacagatgcaaactgtgtcagagccctgcttgggtgccaggattatctcttaaaattttctcacttactctgccagggaggccctgttttcacctcagttttgtggatgaggacataggcacagagaggtcaagtggaatacagcactgctggacctttcagtaagagtttctgtttccctagaccacagcatatatatctggggtcttggtgtgaatcttttacttacttttaaagtttaacttcaaaatcacttttccttgctgttaaaaagatacgtgtgtactttaaggaaaatttaggtaggataagtaagcaaaaatcaaataaaaattatagagataatattgtaagcacatggttgcttttgtaaatagtaaaataaattttatttgtaaagatgagattgtacagatatattgtgacttgcttttttcccacttaaaatagtttaggccttttcccctatcattgttcttctaaaatagtgtttccctgactttgggcagtttgagtacaaacctcacaatttttgacatgtctgcacaccatttgttcttttacctgctgaccatgttttaaaaatctactttgtaaagtaaatcagaaaagggaactgtaatcactacatgactggaaaatcagtggtgcttactggcgtagattagtgtaaaagtaaataccattaaaaaaccccaacctgggcaacatactgagatcttgtctccataaaagaaaaataaaaaaattagccaggcacggtggcatgcacctgtggtcccagctacttgggaggctgaggctggaagattgcttgagctcaggagactgaggctgtagtgaaccatgatcatgccactgcactatagcctgagtgacaggacaagactttgtctcaaacaaaataaaacaaaacgaaaaaccaaaaacccatatgacgttttagccagatactgttttttttgtttgtttgtttgtttgttttttacagaaaattgaacagtagcctggctctttttgttaaaaacaggtgatggcagatattagagaggtgtgaaaatatcttttgatgaaattagaattgaaagcaaactgaaaaggtagtaacttttagtatgggatttattatactctgctaacctttagcagggtttttcaggggttttcaatgtaagaaatgaaatttatgtttatacctagtgtgtgtgtggtaatttttatatatatgcatgtgatgcaggatgttttctgtgctgcttcgccagctggagactttgcagctggcagtgcccctgcccagggccgcgctccgccctgggcttgctgttggaggtatcttgcccacttggcctggtgggctgctcttagcgccctggccctgatcccgcactcagtctgtgccggggccaggcgtgctgtagcctgcttctgccttgggcaccggcatctagacaagggggaatgcggtggcacttgaaacttttggagacaccagcatccgcgtgaccccaaagagggtgttacagcatgtcgcaactctggctctgggagtggcgaggtctggggccccagaagggttgtagctcttctctcctctctgcagcactaccaatcagcgggggtgggggggtgggacgtgtttcagcccacttatgttacagctcatttaatcctgtcgccctgctctggcccacggctcctgggctggcctggccccgtggctgcttcctgtcatgcggggctgctgcctggcaccggcagagggtggagggctacagtattacagcgttttacctacccatgttcggtaggtcctgagttcttgtcccgcatccaagaagaatgaggttatgctcacaaccggagggtgagcagggcggaaagttttattgagcgacaaaacagttctcagcggagagggcactcaaaatgggcatagtcccccagtgtggctgagttcagggtttttaatagtcacagaatgggagaggtgcgggcagtaagtagcattggaaaaggcaatgtttgattaaaaggcattatccagaaagaaacaattgggaaagagctggcaaacaggaatagaaattctcactctgggtcgtgggcttcatccagaaccagcagccttgtcttcaggcttcaggctgtttttagcttgaaggtggggttttggctgggtgcagtggctcattcctgtaatcccagcactttgggaggccgatgtgggtggatcacgaggtcaggagttcaagaccagcctggccaacatggtgaaactccatctctactaaaaatacaaaaatagttgggtgtcgtggcgggtgcctgtagtcccagctactcgggaggctgaggcagggaattgcttgaacccaggaggcggaggttgcagtgagctgagatcgtgccacagcactccagcctgggcaacagagcaagactctgtctcaaaaaaaaaaaaaaaaaaaaaaaaaaaaaggtggggtttcaccgcggaccctcccctgtctgcctaggattttgtctgccttctgctgctatcacgtgtgtatgtgttatgtctgtatagtcaggaaaattgccgccatttttaattgtaagatattgattataagaaacatctctatttcagagacgttaaaatgtgaaaaaaaaaatacatcttagaattgatgaagtagaggatataatatgtgctctattctatttcagttttaaaaaaaatgctggttatcccttaaattgatattttaaactataatggattgcagtctccagttggaaaaacatggacttaaaatttaaaaatatgaatcttaatttctgctttacttaaaaatcagtaaagatgaattttaaatgaaaatgtacaaggtaaaataaaacctaggtgtggaagaatatctttatgacgttagaagaaaaaagatttcttgagcaagatgacagcataaataagaaaggaaacaattgacaaattaaacttcattaaactttattacttctgtttatcaaaagacaccattaagagaatgaaaagttaagccacagattgagagaagacctttgtaataatacatttgagaaaggagttcattctagaatatatatagaatttctagaaatcagtaagaaaaagtctaactaaaaattgattaaaagctttgttatccaggctgggtgtggtgactcagcctgtaatcccagcactttgggaggctgaggcgggcagatcatttgaggccaggagttcgagactagcctggccaacatgacgaaaccccatctctattaaaaatacaaaattagccgggcatggtggtgcacgcctgtagtcccagctacatgggaggctgaggcacgagtattgcttgaaccgcggaggcagaggttgcagtgagctgggattgtgccactgcactctagcctgggcagcagagcatgactctgtcacacacacacacgcacacacacacacacgcacacacacgattggtgatgacaaaaagaagaaaaacattcgtccacattcattctttaaggtatttttggtatcatttcttgtcgtataatgtcaataacaatgaaatacttgttacaaatttgagtggaactacagtttagattaattagaagagaacttactgtattataataatccatataacaaatttcaaccaaactcctaatggatttaaaatttattagtggtttacatttttatgagatggcagaaagaaaataactggtatattcctatattttagtgtttgtccggagaggggagaagatttccagtcaagctgtttgatggtggttgtgttaatgtatgagcacatatggccttcttccttctgaattgccttgtttgtttgagagataggaactgctattttagacaaatttatctcttctttttcaaaatgaatacttctggctttctagtgattttaattcccagcaatgtgttagcaagatttgggttttaggggcctacgtgtaggtaacaagaacaatgaaaagctgtttggtttgcctttaccagtcattgttctatgtatttatctttggaatttatagcaagtaataattggcggaatatatttagatttttctacttggcctaatcttaaatatgtaataatctgttcctgatttctaactatatttggaattttcttctgtgacctatatcagtttttacaaaatgctccatggaaaattgagaataatatgtagtctcttattgggtagaaagtttgagatatatctagtaaatcaagcccctgcctccctccctccctccctcccttgtttgtttgtttccaacttttcccctttatgtactgttgcttggtgtggtgacttacctgtaatcccagtgacttgggaagctgagacaggaggatcacttgagcctgggagtttgagatcagcttgagcaacatagcaagaccctgtctctgaaaaattttaaaaaattagttgggtgttatgatgtgaacctgtagtcctagctactcaggaggctaaggtgggaagattgcttgagcccaggagttcgaggttgtagtgagctatgatcatgcctctgtacttcagcctgggtgacaaagtggaaccctgactcttaaaaagcactcttctttttgaatcttgcttttcagagatttaaaatgtaaatattgctctccttgcaataaagacccttgctttccttttaatttgaatttttctatgtttttgctcatttcttttaggcttttttatatgaatttgttattttgcttacctttgtgtgtaggggatcttctcaattcagctttgttttattaaaacattctgcttgcagtctattaaattgatttcataggccaaaaccagcagttggaaaacacctaagacacatttttctgtgtggaaagtacattgatttctgagtagaacaggcttaggtctgaatcctgtgtctctcatttactagctgtgtgactcttaactgttaattacttaatgcagaatttgcagcatttttaaagcaggaaattgattcctcatataattctcaaagtagagagttttccaattgaaatatattctgtgtcagttcgtggctcctatgttaaacatatatcactgctaagagcctgttgtacctatacataaactaaatgaaactggaggctaggtcattggaaccagcctaccacttccgttgattggtatgaaagagagaagggggaatgtacagaagagattctaggattattgaaatgctctgaagaaagaatgaattctaagtggtagctgagattccatagcagacacagtattgctgtactaaattacccagttgatgaaaacatcttgacaagttttcaagtcacaatattgtgggatttttttgtttgtttgttttagaatgatgatgcaatggggtccactttctcaggttttgtttggttttatatagaattcagtttcagaaatgtaatttacatctcggctacctagaatgcattcgtttcccagggcgaagactttttgcattggggtcgccatgttcatgaaaatgcacaaataaaaaggaaagttacttttgctaatctgtttatcatattaaaaaaacacactatatgtattttcagttattttttattttgtttattagtattattgcttttttatagagatgaagcttgctctgttgcccgggctggagtgcattggcatgatcttagcttattgaagcctcaaacttctgagatcctcttgccttggcctcctgaatagttacgaggcttggcttatttttaaatttttttaagagatagagtctcactgtgttgtgcaggatggtctcaaactcctcgcctcaggcagtcctcctccctcggcctccaaagtgctgggatttacaggagtaaatccactgtgcccagcccttcagggttttttttttttttttttaaatagcggtgtggaatttgattatgcttcccatcctccttcaccgaacatatctgtgatcagttggcatgaagtttccaaatctgactctgaggataatggagacctgactaaatgaactaaccagacaccatccaaaccagtcatccctagaatggaagcttacgctacttccacttatgttcagaattcagtttatgaagacagagtaactgtgcctgtgttttctcttcttttctttttttttgttttttgagacagagtctcgctctgttgcccagactggagtgcagtggtgcgatcttcgctcactgcaacctctgcctcctgggttcaagagattcttctgcctcagcctcccaagtagcaagtagctgagactacaggcatgtgccaccatgcctggctaatttttgtatttttagtagagatggggtttcaccatgttggccaggatggtctcgaactcctggcttcaagtgatccgcccacttcagcctcccaaagtgctgggattacaggcatgagccactgcgcccagcctgtgttttctttgtgatggtgggaagagtgtctttgaaacaagattaggatcttcattgtgctgcaaatagctataatatatatgcagtctaactgggaaggtagtgtcttacagagtctagctttgaatcttggtactttttgatgtgtaacccaaggcaagttgtgtaacatttctgagctatggttcccccaatgtgtaaaacaggatataggtgctatcatacaaggtcatcattaaaggtaatttatataaagtttctatcacaatgcctgaccatcataggcaatcattaaataacaattattttctctattcttctttggagctacttgataaggtatatagttggtcatgtttttaatatccagtgaatgactggtttcataatttttccttgtaaaagacacccaggaacaggcgttagagtattgtggtatttggtagttatgaaatatcacatattgggatggagtctgtcatgataccatcagtgcagcttccttacttaggttggtgctaccacatgggctgcatcattttgccatagcaatgatttttgagcagagatagatcagaattacttggagaacttgaaaggaaaacgtatgcctaggctccatctgctccatgatcagctgtatatatatggcttcctgttatttatagtcctcattcatgccccaagtccatggacctctagtaaagaaccactgataaccatggttttccaaatatgaatttaatggcaagcaggacgtagccctgaatttagatatcaacatacttcgtgaattaccctaccatggcgaggtcaggatgtatgtgaatagcatcacagactgtcacacgggccaaggaaagatggctaaggagaaagaagggccaggcctgagatggtagtgccttagtatattctcccacggtgtcaagtttaggagcccacatccctagagcactggttttcaagtggagagagtgatttagcccccttccctgggacatttggcgatctggagacatttttgattctcacagttcagagggtgtggaatgctcctggcacaggcactggccaaggatgctgctaaccttctataatgcacacagcagccccacaacaaagaaatatccatctcaaaatggtaatagtactaaaattgatctgcctgagagtctagcttcttcttcctaggttatatctttgattggtagtagtatcagaataataggagggtctgcattgtaatctatttacgtgtgatgctccttggtagacataagaggaaggaaatgatgagaagggtagaaagtaaactggttggtatttcaaataacttttccttctcataagtgttggagacttaaagaggatttcaactctcagattggccatggtttcacatgagagtttggatataggaaatgacctttcttttctcttgggaagctcattgttttttcttacctcacccttgaacctgtgaccttttgtctcttgcctttaaggaataaaattcaaagtgattaaaaaaattatagcttccataagagaattttctatttttgccatcaccacttattcctgcgaccctgtgtacggattgagtatcccttatctgcttgggaccaaaagtgtttctgattttggaaatgtacagattttagaatatctgtattatacttttggaattaggatttttgcatgtgggatgctcaacctgtagcaggctgagaaagatgatggggaataggagaggactgtattgtatttaacaaagtgggtgtttcctttgtctcccaaaagtatttggtgaagagagaggaaggaattacgccaggctgttgctctagtccagtgtttgccaatatgtgctgagctattattaatagatattattataaaatgggggctgtccatgtccaacaaacttgggaaagttggattaaatgaatttaacctaattttaaaataatagtatattatagaaccttttgtatcttaatggagtgtattgtaacttctgagagacatatatataaaatatatctctgaattgaatatatatatttacacacacacacacacacacacacacacacacacagagtgagtctagagtgcaaggatgtgtatagcatttctctaatttctaaacctaattagactcttggatgcttttttctccagacatcttttgcattgcctggaatcctctggatcctctggtcagtgtaacttgagagcagcattttccctttggtgtcttctgaaacctttataaaagaagtggaaaagtatgtaggatgggagaactattgcagcccccatggttttattaaaaacaattttattaaattgtatgtctagccttctttatgaagccttaaggcaatagctgctattttcttcagggggttgtttccttatcaaccatataagtaaacatcatttctctgttttggaataaatgaagagtgaaattttctcactgtgaagagttgtttcatgtatagtgtacagggaagtctgacatttcttgtgtttccatcttaagtaaagaaaatattaaggtggtttaggtcacaatagctctggaggattctggctcctatatttcaaaagcttttagtttaaaacatatatacatctcttggctgggtgcagtggctcatgcctgtaatcccaacactgtgggaggctgaggcgggcagatcacgagttcaagagatcgagaccatcctggccaacatggtgaaaccctgtctctactaaaaatacaaaaattagctgggcatggtggtgtgtgcccgtagtcccagctacttgggaggctgaggcgggagaatcgcttgaagccgggaggtggaagttgcagtgatttgagatcacaccgttgcactccagcctggcgacagagcaagactccgtatttaaaaaacaaaacaaaacaaaaaaaccccacaaaaaacagaaaacaaaacaaaaccatatatacatccctcatatgtttcctctgcagtacctggagacatggggtggggactgacttcccatctctcttccacttaattcctcattcctttccgtgctccacctttcatgtttccagccatttgttctccttaccactcttagaacccagacattgtggccttgcaagacggctttgtaactaccaaactcaggggatgctgtactgagtcactgctccccctttctttattcccctgaggaaacctgcttgctttaaactcttaggtcccttcaagatagcaatgaaaagattacatggagagacctccataaatactacctttgtttccttgttcttcatcccattcagaattacttactgctttcaccactccagtcctgttttggactcttggacacactgccttcctctctagctcatggttgattttcacatagagccccaccctcctgtccctctccctcattgtggaccttgatgctgtggggtttataagattttactgagaaagtcaggttttccccataggcagccatctggagcatcctgtcaaaatctctgaaattagaaaagcataagaagataacacaggggaaaagtagcatcttttttttttttttttctcattttttttttaaattatactttaagttctagggtacatgtgcacaatgtgcaggtttgttacatatgtatacatgtgccatgttggtatgctccacccattaactcgtcatttacattaggtatatctcctaatgctatccccccacctccccccaccccacgacaggccccagtgtgtgatgttccccttcctgtgtctccagtgttctcattgttcaattcctacctatgagtgagaacatgcagtgtttgtttttttgtccttgcgatagtttgctgagaatgatggtttccagcttcatccatgtccctacaaaggacatgaactcatccttctttatggctgcatagtattccgtggtgtgtatgtgccacattttcttaatctagtctatcattgatggacatttgggttggttccaagtctttgctgttgtgaataatgccacagtgaaaagtagcatcttcaaatcggagagtgaagtaatgttttttggaatacccattatgcactaagcattgtgtagggcagtctccatccccacaacaactctgtgtgtttgtatttgttcccatggtaaaagaacttgctcaggctcacacacacacacacacacacacacacacacacacacacacacacacagaatgagtgaccaaatcaggaatccaacttctctttggcttcaaagcctttgactttcctactccatcatactgcattcctgatcagagccagttttgtgacctgtagagcagctagtgttcagtggtgattcttacatcattacctacattggtattttcaaatggattgtttggaaatactgtataaatagtccaaacattttaggacttgtagaacataaaggaaaaatagggaaaatttgagagaggcttattccctaaagacaacaaacaggatcttgtaaaacactgataccttaaatagatctataatatccttttgaataatactatgagacaaatgttgtttaaattttataccccagtcttataattttaggttttggaaggaatttagagagactgctatccgtaaatgagttgttactcttttcagagcacaactagcccacttccccttctcattaagtttccatttagccattaggtgggagcttcaaaagggaaaatccaatcatgtataatctctagttaatgggcatctattgagcgactggatcaccagaaagaataattacacagtacctctttgtgcagtaagcacaaaaatcaaaagctaatgcattcccaaggcaagccagattgttactggctaacagcatcctcctcttcagggagaaggttggggcacccgctatgcttgctagcagagattgcaaagccattccagaaaaacaaggctatcaggggaggaaagacgaaggcaggggggcttccaaggctttgctacttctaattgcggattccttggggtgcattactgaatagcagaccttctagtaaatgttttgtgcaatcatcggaaacctcatgggtctttggaatttcttgtcacaagtacaaaaacagtgatgacggaggttgagcctcagccttactcccacaatttagcctttttttctaagcacacccaacctttgtaaataatgactttatgcttgcttttgtctaaccactaactttatcgatttatgaaagatgagcacatctcccttgacccaaaatggcatgtgttagccacaaagccaaatagttcttgggtttgtattggtacactctagtttgggttttcaaaattatttattgtagttatttaggatttgcaaaacttggtataattcaaataacctgtttttccccccctagaacacttcagttatggaagatcaaaatgaagatgagtccccaaagaaaaatactctttggcaggtaggaatgacggcgcacagattagatagcaactgacttactgtagataggatgctccctcagttaatgtcctcagtggaatcaagagccaagcattttgttttcttttgtgcagttttgctagtttcagaatccaccctaatttatcttcattccatagggaattgtcattacaaatatgctaaataattttggagtttccacaaagattctgaagttggctgtagcctaaaatgttctgtctgtggcctctgcctaagccaaagatggacagtgatggcatcctttgtcaccagaatggcaccatgccacacaccagtgtatacatggatgaccttttctccttttgctctcaacctttactcttctctcccatttccattggtttgccttttccttttaagcttgtctccttctcccttggctctagtttaaggtttgccagttttcttcccaatttcccaggttgtgtgtgtgtgtgtgtgtgtgtgtgtgtgtgtgtgtatgtgtgtgtgtgtgtgtgtatgtgtgtgtggttgggggtttggggagcaagcaaagtttcacgatttggtggtttatcaaccatgctggtacacatggctttccccttcatgaagacaggattaaaagcaaaacaaatctaaatctgaagataataatgtaaaaataaattctctgggttcatttgatttgaaactgaaaagatagattagttagcaggaacaaagtgcatccaacacatttaagaggaaatgaagcaaagaaaaacaatgctaggaagagcttgctgggctgagcacgtggctggaaatagcatattgaaaatgtgctatagaatagtgcacatgctgttattttcttcttaacactgtgtacagactgagttttgtaccctccacgtttattattttgcagtgggatgctcttcatttactatgatttttcaattggcagtggttcttcacactttagctttcagtttttctttcatttatctttcagtcaactagttaatagttatacaaacactctagggaggccagatgattaggaacttatctgtaaataaaataacacttttgtttatcaaatgaattaatggctgtgaaagtactttgtaaattataaagcagtacacaaatgcaagttgttatcattatatttaacctgttatgaaccattattttggcaagttatttggaatcaaatatagaaataaagggggaaggaaagcatacatagttttttttcttaagataaggcacttttgagattttgatgtatatcctttactctgtcatggtgtgttccccttgtcatgaattactgtgatcataatgttttataaaatcctggatcttgccttttgtttcttgatattatttcataagcatgttctgttgctataaaaatattacttttttttttttttgacgcagtcttgctgtgcaccccaggctggagtgcagtggtgcaatctcagctcactgcaccctccgcctcccaggttcaagcatttctcctgcctcagcctcctgagtagctgggattacaggcgcccaccactatgcctggctaattctttttgtatttttagtagagacagggtttcaccatgttggccagagtggtctcgaactcctgaccttaagtgatccagccaacttggcctcccaaagtgctgggattacaggcatgagccaccatgcctggccaaaatcttactttatatgctagttttagtggcttacattatagctcttaatggtgatgtgttagaatttgttttaaatagttgcctgtaattgggcagttatttctaacttttccttgttatattgtggtggacattcttatgcttaaagcaacttagatgccccttattcttgccaatattcatcacagcaaagacttttcatctctgttttgaactcttattttttggatctgttaagactcaaatgtcttagtaaaagcaaaatttcaaaatccttgttcaatgcttccccctggtggtacctggtgtcagtgagcttttcctcacccaagatacaagggaagaaacattcctcgacagtggggcgctaggataaattgagtggaagatagatgccttcccatctcatacctctaaatatggacataagaacttcagacaagattttgtgtgaaggaaaactgaagactcctttggatatttataaaggatgttttctctgggatggatttagtccactttaagttaggggacatactgatagtgaaagctcttggttcattccatgtaagactcctgagataagttcctaacggaattaataggtatttgtaattcagctcttcagttcttagaattatcttttgtgttattttttctggtattatgtatgaggaggctgtcagaatagtggtcaatagatagcttgacaaatgtttgacaaaagtattgaggttattttgtttttagacagggaggttactgcacttcatagtagttgtggtttgagtctagtgattgagattatttttaatgttactgtccagatgcagtgtatgtagtttcagttttaaaaaatatgtactgattttatgtaaggacttgtaggaagatttgatgagaaatgcattgttagtataagagtctgtgagttgtccataaaccacctacgtaagatgcagaacttttcaggtatacatggtttatttaccttgggtcactttctgagaaggtaatcaaaagaaggatgggaaagtctaaaccgttctgccagattagtagccctgggaaagtatggaggagattgaaactgttgggtaaaatgaagctttttggattgaattgctttcaggtttcaacacaacacagcttatctttgttatatagacctgtggttctcaacatgtggtccctaaagtgtagtctctggacgggtggcatcagcattgctgggaaacttgttagaaatagaaattcatgggctccactccagactaataaaaccgaaacctctagggtgggacccagcaatctgtgtgtttaacaatccctcctgttattctgatgctagctcaagtttgagaaccattagcataaatgtatgtagcattaactttgaactttgaggaagtaaaacaaactgttaataatcagttgccactttgccaagttgagcagtttctctaagatggttatctccagcattagctatctttggagatgataattcatatatatcccgtgtatagagatacccagtatatacctttggagcatcattttgtagtaagcattggaaaatgataatttaaggtgccttttagaaatagctataattttggcatttcctgtagtgactaatttgaggacacagaccctgaatacatttttaattcctgaatgaattagtaaaggaatgagtttggctttagggtaaaagtggcattttaagattaaatacacagggtgaaaaatatttctaatgaaatattaattaggtttctttccttgttaaactaattttttttttgtttttctaaaatagataagtaatggaacatcatctgtgatcgtctccagaaagaggccatcagaaggaaactatcaaaaagaaaaagacttgtgtattaaatattttgaccagtggtctgaatcagatcaagtggaatttgtggaacatcttatttcacgaatgtgtcattatcagcatggacatattaactcttacctgaagcccatgttgcagcgggactttattaccgctttaccaggtaactgtacttgtcttttcaaaagctgagcagttgaagaatgcccggcccaaggacctaggtggatatttatgaaatgattgaatgagtactgtgtgaggcagcatttctttgggacgcatactttaatatatggaactcgaggaattataatttagtatctatctaggaaatataggcagtatctttaataatgttcattcctggccaggcgcagtagcttaacagctgtaatcccagcactttgggaggctaaggcaggtggatcacttgaggtcagaagtttgataccagcctggccaacatggtgaaaccctgtctttactaaaagtacaaaaattagccgggggtggtggcagatgtctgtaatcccagctactcaggagggtgaggtgggaggatagcttgaacccaggaggtggaggttgcagtgagccgagatcataccactgcactccagcctgggtaacaagagcgagactctgtctcaaaaaaaaaaaaaaaaaaagtgttcattattggtcataactgttgcttcatttggtctgttgaatgagttaatgatatgctttttattttgatgtagtttagagtctgcactttgcctttgtatgtaattttaaaaaaactggtactcttttcccttcaaacatagtttgtatgtttgggaagtgtcccaaaagtttagggcattcatttgtatctgaagtggcacttaaggaatggcaaaaatacattgggaaaactggtagcatgtctttattatatttctcaaaagctgtttctgcatcctctccctcactactgtcttcccatatatgtctcatacacacataggtgtgtacatgcacgcgcgcacgtgcacacacacacacacacacacatctggttaaatttactttgatttttaaaagtagactttatatttttagagcagtttgaggttcagatcaaaattgaagggaaaatgcagagaattcccatattcacataacccgttccctcagcctgccccactatcagcattgcacagcagagcagtacatttgttacaattcatgaacctaagctgacacatcattattaccccaaattcataggttacattagggtttactcttgctgttattcattttgtgggtttggtcaaatgtctaatgacatatatctgccttaagagtctcctacagaatggtttcactgtgctccacctatttatttccctttgatttttaaaaaataatttaaaatttgctgtgttctgtaccacctttttgtttttctcaacgaggtggcatcttgctgtgtgggccaggctggccttgagctcctgggctcaagtgatactcctacctcagcctcctgagtagctggtactacaggcatgcaccactgtgctgaactcccctttgaatatgattaatcatgaatttttttctgtttctatattgttttttaaaaaattctcaatttaaatttggctaggtaagatatagagatttcactcctatagagaatgctggccagaatgttttcctctgatgtggccagtgtagtgtgtggttaaaattgccatgtcaaaataagcctagaagtagccagggatgagccagtaccattaccacaaccctagcccttgtcagagctacaggatagcttcttaaagagtagctcctcccttagcctatctgtgatttatagaacatcaggactccgtgttctaagtacttccacagcaaacaagactcatgttctaagtacttccacagcaaacaagacccaggctcaggcctcaggcctgaaacctgaggctgcaaattgacaaaccagcttctgatttctaatctctcttccaaaacgtgtaagtttaccttctacaatgggagttttaaggatatttgagagttagcttagaaaaatttgacactgccgttctttttatgctgaaatctagcatgacttgctcatttcttccattagaatctctaggaaagcaaaacgtaaatcctctctttctagaatcatactatttaattgctgaaggggatcttagccatcacgtagtcctgtttttcattgtgtagattaggaagccaaggagaagttaattgggtgagatgcccagaatcacacatcttgattatagtggtggtgatgtgaatgatggtaggggttggttcaaaaattagtacaacggctaaggaaaattccttaaattggccccaagtactgaatgtaaggattacaactcagttcaataattctcacttttaattatgagggagggatccagggagggggagatggagacatgcttttgattgcgtgagagagaattacaggtgaatggaagtaagatgaggcatgtacatatgatgcagcttctctgtatgtacagaactcaaacccagaaacctatggaatcagactgcatctcacaccaagaaaagacagagtctttttttaagttggtgattgtatttgtccctcataagtgattttaactgatgagaggatgccttcatttttctcaagcaattcaatttattgtttgttttccaccgttttggttttattttcttccctgtaatttgcttctcaaacgttttagagggccagggaactcaccttgtatttgcagagtagccacaaggtggcactgttgaagttctcttgatttttcagagtatagttcagaggcaaccccatctcttagggagtatacagccttggagaagaagcagaacagatgaacatgtgttatgtatataaatatggttagtataattgcatacaattcagttttcattacagcgaatgttaaggcattgtccatatctctgttaaagtggaattttgtggtattgaatattacatgaaatgaatggaccattggctgggacatggaaatactttagttaaaatgctatttgttttaacaggacttgatctgaacatatatacatatgtcagtgtatatcatacatatgaatctaatagctgaggacgagctggccaagttgattgtgttagttagtatctagtagacctagattaaacatggcattagttccttaacacagactctgctttaagagcatcacaggagaaacaggtctgtgtccatgttcatacttagatttaataatgtgtggagcaacttatgaatcattatactagtttggtgtttcatttttactgtacatcatcttgagtttgaggtttttacactattgaaattgacagtcaacttacgacttcatttgattgtgaaaaccattaattctgtaaaaattataattatagcttttaaatgcttgctgtgaatatcatacctgtcagtatagggaaaatggaaaatgtttgtggtctctggctccttttggctcagtggaaaaagtgataattatgatatgcctttctaaaaatcatagtaaatgtttagtctgcaatgtcaatttctgcaggctgagtttgcggtttgtaagaactgttgttaatgggaaaattcataccatgtaaagtagggacagattgtacttcaaaaaggatgataagcattggtgatcggtttgttgaggtgtctaagcaattaagagttttgaaacacttggctgtctggccctggtttattcaattgtcttatccccaagaaaggatgataagccattatggaccataaatgtgacagagattagattaaaagtcccaggagatgtggaagaaacagagcgtagataaggctttaggatgggtacacggccagagcagcgtgacaggaaaaagcatgggtgctggagtcacacaggcccttggtttgaatcctagcccttacactttacagctgtgtggtcccactttctggagcctcagtttcctcctctgtgtgggaataatagtaatactttatgggtattgtgtgaggattaatgataatatgttataatatgcctggcatctattgggtactctgaggatggcagcttaagaaaaagcccagagaggcaggaaacacctgcttctccagaggtagtaagatttattggtaggaaattttaattattcacccactgattcccgaattgattcattctgacatcatataggtgtctgtcactttgttgttttgtttcctgggtgttttatggaaaaaagatgttagactttgtgacctgagcttcttttcacttcatttctgtctgaaaccttaggttggtgttttccaagtgaaaggcatccgttgagggactgttgctgttagcaattgcattgttttcttttaaaacgtttagaacttcagattttacaactagatttgtgactagggagggggaagggataacacgggtgggtgggaaaggaagtttctttgcagctgctctttgaaatgcatttctaaaataatataagtttctgtaattgtatgatctaagcagctgtgttaaaactggttgtagtcaagggcatttaattgacatttgagttttgatacagtgttatttacatattgagctttgaaatttgtgccttttaattgttttaatttattattgaagtttttccagactttcatctggttcctgtaattaacaacagcagcatgtcttcagcactgtgtgcgaagtattatggcctcaattttctgaggctgtaatgtgtcctcttgttgccttaggaagagggggtggtggtgagagatgggggagtctcagcatgatagagtaatgagagccagacataggtacttcagaaaatgcttagttttaacacctcaaagcactttttagcccaggcaaatggaccaccttattcagtaacctctttgtcctgaataggcttgaaaccagaaagttacatgctctgcatggctcctgagggtggccactctaaggtacctgaatagagattgtgtgattcctgttcttctcaaaacatttaaggggccatgagacttataccaagaaaataggggggggggggttagctttttgctggaggagatgcgtagtattttttctgcagaaggtaacaagaagaatattgtgtatcggccttgtccattgatatctgctgagaggatttgggggagagtagaacaaagactgatatttcttgagtgaacttcttatttacctagctctttacgtatgctgttttttaaactttcgcagcaagactgggaggttccctctatgtaaaatgagggtatgtagagtacctatctcagaaggttattgtgaagattatatgatgtaatttatttcagacatttaatatcattctgatattatggaagactgagatcctaaaaggaaaactgatctgcttaaggtcacacaactagcagttgacagaactgagatgcaacctagtttttctgactttcaggcagtgtgtttttcacaagactaaaacatgctgcctcatagaaggaggaaatgcatttaaagtatcagacaaaggaaataggtcaaatctcatagatatcactgagatgttgcttaattggactgatggcatttgaaagaggaagaaataagtattagtaagggatttatttctgtaaaaactcatgatagcctagttgtgagcaattgatgggggaatcaaagaggactaaaagggatatcattgctataaaccaatagttcctaatacttcagcattatctagtggcacttcttaaaaatacagattcctggctgggcacggtggctcacacctgtaatcccagcactttgggaggccgagttgggtggatcatgaggtcaagagatcaagaccatcctggccaacatggtgaaaccccatctgtactaaaaatacaaaaattacctgggcatggtggtgtgcgcctgtagtcccagctactcgggaggctgaggcaggagaatcgcttgaacccaggaggtggaggttgcagtgagctgagatcccaccactgcactccatactggcgacagagtgagaatctgtttccaaaaacaacaacaacaacaaaaaaaccacacccagattcctgggccttaccgtctagagattctgattttgtaggtcaggagaagattggggggatcttttctttttgctgttgttttgaaaatcagtaaccctgagttgagtcagatacaaccacacaggcttatagaccacccagataggttgaaggtttgggtgctgctttcccgtcacagatgatggggatgttgcagcctttgaggtttgaaaaggcgagtatctaatgcattctttttattttttattttttttaaaaaaagacagagtcttgcactgtaacccaggctagagtgcagtggcatgatctccacttactgcaaccgccacctcctaggttcaagtggttctcgcgcctcatcctgccaagtagctgggattacaggcgtgtgccaccatggctaatttttgtatatttagtagagatggagttttgccatgctgtccaggctggtctcaaactcctggactcaagcgatctgcccatcttggcctcccaaagttctaggattacaggtgtgagccaccatgcagcccctaatgcatccttgtcttgccatttgtttcacctttcagagagcagagggttctagagaggaattagtttgagatgtgtttataaccagttaggaggatttgggttaatgatgtgaagtttacattactttaaaagtggctatgttctcagcctgggcaacatagtgagatcctgtctctactaaaattttttttaaaaaaaattagcctggcatggtagtgcatacttgtagtctcagctactagggaggctgaggcaggaggatcacttgattctggaaggtcaaggctgtagtgagccatgatcatgtcactgtactccagcctgggcaacagagtgagatgctgtaattagctatgttctaatattaagtgtagaaatcagaaaaggaagatagataagtaccccagcgttagaaagattgaaagagctaagtctgttagtccacggctagagactgaacaaaaatgtgataaaagaaggctgacggattctgcagtttgaaattctgatgaataatttgtcaatcctagtgatggagaggcacaagcagaaccccatgtgattatccttggatttccctgattttaagtaaacatagaagatggaagaaaggcagccaggcgcagtggctcacgcctgtaatcccagcactttcaagaccaaggcaggaggattgcttgagcccaggagttggagaccaccccgggcaatatagtgagacctcatctctacaaatgataaaaaaaaattagctgggtgtggaggcatgtgcctgtagtcctagttacttgggaggttgaggtgggaggattgcttgaacccaggagtttgaggtggcagtgagccatgattgtgccactgtactccaacttgggtgatagagtgagtccctgtgaaacctttgagaatggtaccaagaagaccaaactccaaataatgttaaattgtccaaaatgttgaagtaaattgaaagagttgaaaacaaaataattaactatttggagccagattataaaggatgaagggatagtgtgcttagaatagatagtatagtgataatagaaagaaacaacatattttcactcccattaacctaatcccaccatccccccaacccaagaataatggctttaaaacaaaggttagcaaagttgtgtttgagaaagatgtgaagatatttagcaatcacatagctcctatagacaagtaggcctaaatacattgtatgcctggatagtggcaaaacctgtggttgtgatttttcaaattgtagaacattgtgaagcaattgaaaatcagtatgcagaactattgggtacaattgtgccctgtacagcttgtacagttgcacatggtagtcttgcatgatagcaccagagatgattgatgagcagacttcctggttttaagaactggagaaggtgtttttgggggatttagctattaaatttgatgttgtgctttagcagaattcttagatgagtttcaaaggctaatcagcctctgaaaagattgtgtatggttgtgtaaacctagaaggatgtatacagaatgtgaaaagtggttcccttctctgggaaatggagtttagggatttaaaaatttttgctcatctacactttataaattttctataatgaacatgaactagatatgtttaaaagggttaccaagcagctagtgtcaacatgtaagtgaaaaattgcaatacaactttatgtagtaaaccccagcacgggaacatgaaagcagccataccctcctcaccttatttcctttttggataaagttaccaggctagtaggtaggtctgaagaatgatgtaaatagatggtaatatcatcatctgctgatttttccaaatacctccgaggacagaatagagagatatggactgggcaatggcacatatagatgactacagaccggatgtcgcagtgtgggtgccctgggcatattgatgcggcatcagtgctagcttggagggaaatattataataataggtactaatagctagtgtcatgggtgctgtccttggttctgacccgtttaacgtgtttgccaacatggtttaacatgtttgccttagtactttagcccatcatgcaggtctggtgtggaatacccactcttctgggtgtgacaaaaatcagaattctagagactgaaatggatgggtcagacaaagctttgaaggtgaattatagtaaggataaatataaaccgcacaaagctgccccccacctttccaactagctgtgcaaatagagcattcggggaaattgtttcaatagatgtttttgggggagaggcctgggattttattctaacttactgccatcttaggcgtcttctgtgatatgactatcagatgaaggcagtgcagcctttgaccacattaactgtaaatgacatgcaggaaaggacagtggtcccagtgtagtctttattcttagaccatagcttgggtctttgatctagtccagagtaagagaattttagtatatgaaggacctggaaattataaccaatggtataataatagtcattcttagaattgaaggaactttagtttgtaaagcatttttcatgcatcatctcattttgatattttcagaatcaagtagagattatcgtaatcttatacagatgaggaaactgactctgaaagtttaataatttacctacatctggcctttcaacaaccaagtttagtgctattatactacttctaattattttgagaaaagagaacagatattaaccttgtagagtgcttgtctataaaatgttttcataaaactgttgaatttgattctgacagacagtgtaagaaaggatagttgttactggtgattaccattttgtatgttagggcacaaaaattcaaggcacagggatgtttcagtgtttgtttcatgtcatagaactagtaagtggtgaacctgggacttgaaatgggaattttctgatgataagttctgtgttctcgtccctacacagaataagcttggggagaagctttatttcttgcaactgtagaagacatacttaccgccacaggatgggagtttacaggtggcaacagtggtggccatgttgatcatcttcccattgtgaatgtcaggcagaggctgaaagtggttttctttgagagtatccttgtatcgtgggaggttgaagccaatgacctctaagattctaggatttgtagacatggggctatggcttttgaggattgtcccatctgtttaggaacagaaaatggatactcacgaaagggagatgaaaagattgacaaaaatacatttaagcacaatcgactttaattcttggattgccatttaacttttcataagtttttcaagatgagtcggtgttttgccttttttgtcttctgatctcccagggattcacaccgggtatggattaatggggatatgatttgttatgagagacagtgagtaagatgggaatgaacacaaactttgaagcaagaaatccgagttccagtagtaaagccaagggagtgtaaaatcttgagttctttacctttctgtgcttcatctgtcaaacttggggcgtcattgccctataggagtgctgtgagagttatataaaagaaaatgaaaagtcttatcttaatatttgacaaataacagaactgtccaaggtcagcttttacacacagagaagagttgctatcaattgttttatcgtaaaaaatcagaaccaaaaagaagtgtatatgtttatgtactcatggatttgagtatctgtagaacttttgatatgactaaaatattttacttggttcaggatttctttattcctcttatctttaaggaaatgatggctggtacctttctatctctcttcccgttccttcattcccttttctgttttgtagagcaaggcttagatcacatagcagaaaacattctttcgtacctggatgccaggtctctgtgtgcagcagagctggtatgtaaagaatggcagcgagtgatctcagaaggaatgctttggaagaagctgattgaacgaatggtacgcactgatcccctatggaaaggactttcagaaagaagagggtggtaagtacttgggttgcttgttcccttgaaaaaattttattgacatagagtcagcttgattactcaaaaatgcaattatacttgcaaatgtgctggcctatttttaaaaaggggggaaaatgagtggtcaaaagttggaagaaaaagttaaagctgttaaaatttctccctctgaaatgtgtatttcctttatgaactgtattatatagtttgaatgggatttggcgtttcaaagctatgtatttatgttttttccttcacattttgcttagttgatgataccattaccaaaatatagatatgacaaaaatatgagaaagtcagatagtgccattttgctgtttgttattactgctggttgaggaagtaataacagtgataggatttttcagagaaaactcataactctgatgcagctttatagctagctgtatgctgtatggcccagttagcaaagagagagagctacagacagaggtgcatatagggctgtattttccttacgggaggaagtttgatgtgtactaagttagatttttcacaaagctacattagcgctttttattaaactctatggaatgaaaggctagattgttacatattagtactcagaaaacacgatcaggattttgttagagagctgtgaattgagctaaacttgtctgtaacatgtaaatttgtcagaaatcctgcttttgaactgttaaaactcaatgcaaattaaaagacatgaaagatatatctttgtcagcaccatgtttagataaaattcacccttttatgtgcaaaaatgtaacatctgtttgtttttatttgccagggatcagtacctgtttaaaaacagacccacagatggccctccaaattcattttataggtcattatacccaaagattatccaggatatagaggtaactttatgatttatctgttttatgggctctttgtttcttgttctcaactttttatgttgccttagagtgttcttttggtctaaaatcgtagaactaataattttttttaaaaagttgagcttttggagtaaatgtgtcatgttgtatataatctgcagctattctgcagagaaaataatgtcttttgcaaagaatatctaacttttctaaaacatgaaatgcttctgcaaggctgccggttaattcaaaccttaatctaaaatcatctttttattctaagctgataaattttccaaaatccaaggccccgtttttttaagtaagcattgttttacatttttgagccatctctagagaattagagaaggcacatttcaagttttctctgtacattactcatagtttttcataaacatgactcagatatcattctaagcaatagttaagtggattttatagggcaaattatgctcctggaccattttggatttgagcgtaacttcaccagaccagtaaaactctgtaaacttgatgagaaacattggagatgtttgatatcgttcatgtgttctaattagttcagttttactattttagcctttttccttgaaccaggaaagacatgcacaggcatttctcattaactctttcacatgtgttcttggcaggtcttggttacttcactgtttcctccttggcagaaaactttagcctttgctaggcaatgcaatatcacccataaagttatactcagtttcccaaatgtgaagtaatcctctcccccaggtgatagacataaaagttattgtgccaaaattcattaacggagaaacatgtgctttttcagaccccaccacccttccaggcagatgtgaataatggaatcattccattaatggtaaatctgaatgtgactggaatatcattatttaaagcccaaactgtcttgaatattctgctctctgaaatgatctataaagtaaccctttaaggaggttaaataaaaactttcactagataaatcataaagtttaagaattaattgaccattggcagttccaaacttagaataagttgcccctacagtgctagtggctgagacatggtgttaactttaatcttaggttgatgtgtgtgtattgtaggggagatggggctgtctcttaccccaggtagttgtactaaggcatttcttatgtacacatcttataaactacattaccctctgtttttttttttcacttgatgaggggcaactatttacaaagttatttccagacttctttgaataattttatcaaaaaaattctttgaaaagaatgatgtttaaagttaattatgaacaaacaggaaccttgaagaactctgatcaggttgaagatgtggcaacatagatagtttgattgaatcctcatgactgctgttagaattgacaatgtgaattcagtattctgtggcatgacagtatctgacaccacctgccatcatcacttcttcaggctgaaatgatagtttaaagtaggagaggaggcaggtgtgaggggaaacagctctgtgggaaaaccctgtgcgacacagcctctacatcatggtggtctacccagtggttcttaaagtgtggtttggaaaaacccactggttggccacaaaagtcttctccagatttttgtgggctagacctcttgatataagggatgatgtttatactttgatatatgtgctactagtaataatcataaaagtaatgtaccactaatagcatttacttatgccagatactttgttaactactttataatgcattttctcttttaacattttggacaaaacctgaaaggtaggccaagtacttatttaaatttgaggaaaccttagaaggttaaaaaggttaaacagtttagtcaggatcacacagctagtgggtaattgagagtctgtgatcaaccatgtacccttctacccttaatacgagtttttaacaatagaccactgctaccacctcaaaatagatttttttttactcccattttgagagtgtgttttattctgtctggaataaaacagaatatatagagttttatgtagagagttcttccagtgatccatggatcaaatgagagcctctcacgggcttggctctgtccgtatgactggtatgaaatcctcacaagcagactataataattacaaatacccacttcgagtttttgcatatatcaaaccacgttgggtgatttacatagatgattgttttttattcttacaacaaggtgcatgttattatctttataataaggggaaactgagactaaaagaagttttaggacttgctacatagttaagtagaagagatgggatgggcttttaactgaggtctgtctagctctatccaggctgagagttgttgtttgtcattttcagagtggaaaattcaggaagtgagggagaaagaggcatgttttatgcctgctgaatttcaaggtggcctttgcctctttctctaattgtgtgaatacgcagtgtccttgactgttcgttgaaaaaagggtatgagttaagatctgattagtgggccctgttttagtccagttatgggaaagtagtagggttttaagcacattgcagaaagataaatgacacttggaatgtcaagtggctgtttatgtcccccctccctccccagttgcctgtacatagcttcagagtctcttgtgttgtttcccttagactttgcaaggttgccagttcacaacacctttttctttttttccttcttcctccacctcgacagcttggcttatgtgccagctcctgtaatctgtacgttcccagatttggctctgatgaggagaaaggaaatgttcatctctgaatctgcgcttctacattgacccaccgaaaattggcttaattttaagggaaaatagagaacctggcttagtgcagccaactcctgttattcaggaaatgaggatgtgagaaatggagtctggggagaataaataagtattgtaagctttctgcaaaggctcatctcgcctgggtgttcttgccacacatagagagggtttagagggcctctgaattgagaaggaattcctagaaaacctgaggctcgctcctaaaagaagcagccatattctcctttgctgtctagagtcttagttgttgctgttattattgttgttgttaccattaatggtgggctgactgctggatactttgctacaagtgatttaatttaatcctcgaattgtcaaagctgagattcttacttcaaagcccatgctgctttcactctagcgtgcccccaattgtctattaacagagagataggagttgttataacagccctagagttctggtattctgaacttggatttttctcttttgccatttgagtagtgacaaactccttcaagtaatctaccttcttcctctcttcattcattgcattaacgcctccgaagtgctcttcttggacagacactgggaagatgatggtgtgttgtatcacaccttttaataagccacattttattcagggaaagtggggagcttttttgtggtttgcaaacctgatattaacattgtcctgaccagaaaatgtcaaaacttgcccacccacccagttgtgtttaggcttctaaaaataatgttattcctccatactcagacatctgttttcactctattgccaatttaaatgccgctgtatactctgtgtatcatggctactttcccagtattttgaaaatttgcgcagggtaaggggattttacaagttctcaaaaacatgaaatattcctctacagtagccataccacatgatggctaagtgaaatgataggtatccatataaagaggtgcacctgtgtatgacctctgttcctgctgctggcattaaggtaatagttggattccatttgaaggctgagcctcttcctgggaatggttagggaaggctcaggcttattagcattaaatatcagcctagactgagacaacaatttctggcaactttgtgagaatatatgtatttgttgttgcagcccacttttttttggttaacgttttcaacaactgaagaagaacataactgctaccatttgctggcaccataatgagaacttatatacataatctcatttgaaccttacagtggttttgagggagtagatattactcttcccatctttacagcagcgagtcctttgccaaagttactacttgacctaggtattttctaccacagtgggctacctgccagttttaaaggtctggtttttctagaaaaaaaaaaaaaaaaagacctgggttataagcattcaagtaagagtcaaggttgtcagacatcatgggggcagttttttaggccggcgtagttgacaggaagtgctgctttcttgtgccggtggccttgggaattgagaagaggagttacccaggattggtgcgcagcaaagcagtcaactccctcatctggctccgtgtctctttcgtggcttttcaaagcaagctgcactttgggattcaagaaactaatgattctaaaacaggcctaggcgaggactttgtaaaatgacacatcaagaattggttgacaaactatttcttttaaaatgcagaaacttatttgagaaaagtaggctttttataagtgttgagaagctaagccatttgctaacttctgttcaacttagaatgaaagtctggtatctagcagagcttttgagaggtcctgttccctagctcttacttgagggttggggatagagggtatagcccagcctttaatgttgttgtcgtcctctgtccagacatctcaggggactgatgtatcacaggctgagtatgtacctgaccctggctcctctgtgtagtcttctctgctgcgtcttcagggttttgggtacagttaaagattgtaaccacatcacccacttctaggaaacattttagagcagcgggagagcatggagaaaattctttttggtatagagattcccccccatcccctcttttaaattaaaataattgtttccccctcagactctcatgcggtagtaaatgtgctttttctagtcattgaaatatagagcataacaaagctacttactgcttcagtgtcattttaaagcaattgtatacctcttaaacctaagaacagcttgataacacttgacatatatgtaaagatatattatgtattcatctctgtcatacttgtaatatgacatcatacattctgtagcaactctgtgggcccccagagggtataacgtgaacattggtaactactgccaagagtcactggccacaaattagacttgttaccagtacatctgcctactaaatcagcattttcctggagtgcttagcatgctgagatggcacagtcactatctaaaaatacattgtttctctaaatgattccatgcgttgagttctgcttaagaaatgcctgtattctggacctctttttaaaaagtcgcttatccggacagatctgttgtctactttgatagaggtagcagagatggttgggttagtttttttttttttttttttttttttttttttggttttgaagtgtgcttttgtatgtctaatattttaccaagtcactagagatgatgacccaggctaggaagttctgatttggtggcagatggacaaatgagtatttcccctctcctggcatctccatggcacctccttgtatctcctgagcattggaaatataccatcctgccctcaggatgtgtatgggagctccttgagggaagataccgtatttccaggactcttgctgagcactggggccacaaatgatggaaataatcgctttttaagtatacgtgtatcgatatctccaaccctccatttccttttctataaaatgcgaacaatgattcctgcttcagagtcacgattaaattagctacaaaacatataaagtgagtggtatagtgttagaaaagcatagtgcctggcacgtagctttcagtaaattgtaacattttagagtgcacagaaggatactatcttcaaaataagaagaaatacagtttgttagatgtcagcagagccagtaattaagtactccttcaacaaagcaaataattagacttttagctgtacagaaataattagctactcagagagaaactatatcctgaactgaagtgtaacaggttatggaaatccctgttgtcccctaatttcaaggatcaagaattcagactttagttactcttagtagagacattgtatcttttgagccttaaaaaatcacttatgtctactaccagaggttaggtcttctggtgctctgggtatgacctacttcttcactaaacttgtcccagtgtctcaggctatagagctcattatctcccttaagtcctgcagcacttagaatttttatcactcatttggcacttttggaattgttactgatcttcttacgttctgtgtgcactgccgcaagaggcaggcccatcctgctttgtgggcattgaatatgttagtagcaaaagcatgggtttggagtcggaaagaactgagtgtgatttccagctagtccgattactgattttgtggctgcaggcaaattaagctctgttttcttgtttgtaaaaaggaaataataagtacttccttccttccaaggttattgtatggatcatttaaccaaatacacttagtttagtgtctctctagatccagacaccatgggcctagatattggagtggtgcctccctgaatgcagtatgtctcctgttgatctttttatcctcagtgcctagcacactatgtggaatatattaacatctcagcaaatgttgcatgaatgataagaggaataagaatctagggctaaaatgtaccatttttactctacagaaacattaggaaggttaaaaatgataaaattcttcctatgtagttggcttatagtagttgctcactatctttcctcagtgatcaagacaattctttgtttggatatgtagattgtcaatatatgcttaatgatggttttttaattggcattagggagcgacccaatgagttactatttatttgcatgttttgggtgcaaacggcattctttaaacatactgaattctgtctaggccagttttttcaagcccagtccaaaactcattggaaatcctatgacggttgccaaatgggcagggaaagtttaagaaaaaacattgttgggttaatgtcttacttggaaaagagcatgatcctatccacagacagttatgcaaaccaagattggggtatcggtggtatgctgtttctggaagcaacgccaaagtctgaaacctaatagagtaagttgattcataaaaactcatctcttgcctccttttttccctagactatagaatctaactggcggtgtggacgacacaacttgcagaggattcagtgccgctctgaaaatagtaaaggtgtctactgtttacagtacgatgatgaaaaaattatcagtggcctacgagataattctattaaggtgaatgactgaattttttatgtattatttttagaatcgtggctatgtgttagacactagatgtgacaatctttccatttactctagattggtttttatctcttccactcaatcttggcagctctcagtgtagttctaaagaactagagccagagcatttccccgaaactaatacaagaccctggattgtctcacttcttatccttctctaagcacattcacattctatattctgtattaggtgtaaatagaaaatatcccagtatcacagggctcttgattactttgccagctggtattggtagtttataaaccaaaggtgttaccttttatggttcctgagaaggactcaaataataataccacagaatgatagagcaacttatattgttttcattaacttttcagtagtagataaactggattatttttccatgtttaatctgtttgatggctgatctgatctgattttattttacattgtttgtatcttatgtcctcatatttaagaaaacatgttttttaaactttgtaaaaaaacattataacttacaaacagggaagtttgctcttttgttgtataattctgtgaattttgataaacacacagacatgtataactgttacaaaaatcacgatatggagcagctctctcattcccccaattcccttgtcctgcccgtttcttatcctgggcttttctgcctctttcctgtgcttacccattcacctgttgaaggatgtttgtgttgtttccagtttctgacaattatgaataaagctaccataattatatacctgtaggttttttggggaacataaatttttagttcattgcgtgaaaactgaggagtggggttactggctcatatggtaagtgtatgtttcacctgctaagaaactgcccagctgttctccaaagtgcctgtaccatttcacattcccatctacagtgatgagagttttttttttttttttttgagacggagtctctctctgtcacctgcctcctgggttcaagcaattctcctgccgtcctacctcagcctcctgagtagctgggactacaggcatgtggcaccacgcccagctaatttttttgtttttagtagagatggtgttttgccgtgttgcccaggctggtcttgagctcctgacctcaagtaatgcgcctgccccaaagtgcggggattacgggcgtgagcagccaccacacctggcctgagagttgcttttgttctgtatccttgtcagcccttgatcatctcagttttttttgatactagccattctaataggtatgtgaacatacctcattttgctttaaattcacatttccccagtgatgatagtgagcatctttttatgtgcttacctgccatctctatattctgtggtgaagtttcttttcagatcttttacccattttaaaatgggttctttgtttttttattactgagtttttagagttctttatgtagtctagatacgtcctttgctagatatgttttgcatatatttttcccaattagtgagttgtcttttcattttctttttatttaaaaaaaattttttttgagacggagttttacccttgcctgggctagattagagtgcaatggcacgatctcagctcactgcaacctccgcctcccgggtttgagcgattatcctgcctcagcctcccgagtagctgggattataggcatgagccaccatgcccagctacttttttgtatttttattagagacagggtttctccatgttggtcaggctggtctcaaactcccgactttaggtgatccacctgccccggcctcccaaagtgccccgattacaggcgtaaaccaccatgcctggccgtcttttcattttctcattttcttaatgatctctttaatggagcaaaagattttaatttttttttttttttttttgagatggagtctcactctgtcacccaggctggagtgcagtggcatgatctcggctcactgcaacctccacctcctgggttcaagcaatacttgtgccttagcctcccaaatagctgggactacaggcatgagccaccatgcccagctaatttttgtatttttagtggagacggggtttcaccatgttgacccggctggtcttgaactcctggcctcaggtgatctgcctaccttggcctcccaaagtgctgagattacaggcgtgagccactgtacttgacagaagattttaattttgatgaagtccaacttaccagttttttcttttatggatcatgctttcgatattatatccaagaagcctttctctgagcttcatgaatgtgtaaatttacgtctttcattcattacatttcagaagtcttcagccattattttttcaaatatttttttctgtaccaatttctcctttccttctgagactctaatcacataaatactatatcttttgatattgttccacattgttttcaatctttgttcctcccttttctggataatttctattggcctatcttcaagttgactgaatttttcatctcttcatctctattctcctgttaccctccgccccatcaagtgagtttttaatttcaggtatgatattttacagtttctatttctctgctgagaattctctcttttttatttacctcaagcacgtttatctttatcctgtggagtatagagtaggtgcttaacatctttaaccatgtcagcatctgggtaacctccagcttgacatctgttgattgtccagtcccctgagattgttcatctttcttgatttttgtatgccaggtaatttaaactagtattttgggcattgtggatattatgttgtaaagactgtgggtcctgttataatcctctggacaatgtttttgggtaagtgtgtttttaagcagttagtcaacttagttgggttcagaacacaagttctgtcttgacatcatcagaggggttgcggggatggctctaatctcttttccactgttcaaagcctttgcaatatgccactttgcgtctgtcatgggctttcactacttagaggttaatctgaggcttcagcagtgctttaaatatcagctcattgagacagcctttgctgtgctggttcagtctgttctgcgcatatacagctcaagggtaagcccaagtcatgtgttgtttgggttcttttatttccagttctttcctcttggatttccctaagtctcttcagcccataaggacacttttttccttttcctctggccagaaaaattgggtcactcttggaatttttttatcttttccattgttctgcagtgtgtcgtcatgactggagccatgagccctgtgagagaagagagaaaagaaacccccagggatctctttttttccagcccctctgcctagagggatttctttcagaattttagctgcatgttttgctatttcactgtatagcttcctggtcaagggcctgcctttgagcaaaagccacagaaggaagaaaagagaaaaagccgggtgtggtggctcatgcctgtaatcccagcactttgggaggctgaggcgggtggatcacttgaggccaggagttcaagaccagcctggccaacatggtgaaaccctgtcactactaaaaatacaaaaaattagctgggcgtggtggtgggcacctgtaatcccagatactcgggaggctgaggcatgagaattgcttgaacccaggaggcagaggttgcagtgagccaggatcacaccactgcaattcagagcaagactctgtctcaataaaaaataaaaaaaaaaagaaagaaaacagaaaacaacaaagaaaaataatggcaaattcacccccatgcagattgtttcttcacattttgaccccttgccacatctacctgttgtcccctctttccccttacttttcagagttcttaactagtttttatcaggagtgtttagttataatcaactggagagatagattgtagtgggctttctccatcttggccctgttttctgttattgttctattttgggtgaaataaagcttttctgcttttttttttaatttttattttttgtttgttttttaaaaagtgaaatagtggaattttagtaattcagctacctaggtcaaacgcactctgaattatagaatataagaaactgttctgttggtttcctatatgtatggcagtgtttgccaaaagatattctgtggatgtgaatctagaggatgttggcaggcattctaggcagagaataataatgccctccaaggaagtttagataacactgcatgctgtgtctccagcttagaaattcacaggatacagtagcatataaaggctctgagaatgcctacaatagagacagacacccagtgtttcccaagttccaaaacttatttgaccacggaactctatttttaattttttttttcttactttttgagacagagtctcgctctgtcgccctggctggagtgcagtggcatgatttcggctcactgcaacctccacctcctgggttcaagtgagcgattctcctccctcagcctcctgagtagctgggactacaggtgcctgccaccaggcctggctaattttttgtgtttttagtagagatgaggtttcgctatgctggccaggctggtctcaaactcttgacctcaaatgatcctcctgcctcggcctaccaaagtgctgagattacaggtgtaagccactgctcctggcccaccgaactctatttttatatatacttgatagccctaacctgtggctaccagtatactctagaaagtgtgacatatgctactatttaatactggtggtttttctttttttctatcaatatatcgttttattttattatttatttatttatttattttttattatactttaagttttagggtacatgtgcacaacgtgcaggtttgttacatatgtatacatgtgccatgttggtgtgctgcacccattaactcttcgtttaacattaggtatatctcctaatgctatccctcccccctcccccaaccccacaacaggccccagtgtgtaatgttccccttcctgtgtccaagtgttctcattgttcaattcccacctatgagtgagaacatgcggtgtttggttttttgtccttgcgatagtttgctgagaatgatggtttccagcttcatccatgtccctgcaaaggacatgaactcatcattttttatggctgcatagtattccattttcttaatccagtctatcattgttggacatttgggttggttccaagtctttgctattgtgaatagtgctgcaataatactggtagtttttctttaaggaatagttaagaatggtttataacaactttgtcaaagcatagtctggctgtgggcttggaattcatttacactagatgtgttttctaaagaattctcttaattgtggcacatccatttgacttaataagacatagaatagtagagcagaagtgcgctttgaagagattatctagaccagtggttggaaaccttttttttgctctattctgcaccaatccttgatcactaatcactttaaaaaataactcaggttccattaggtcagaagttaaaagcaagctttgctattgtagatattatatttcagtgtctacctcatttataaaatcttgttcacttgcagtaaactgtagagtcactacaaattatgatagtattgtacatgtcaagaaataggtgcacagagtctattttaaatagttcaatctttgaaaacattctcatctcccattaaatatcaacaatattgttaacttgggaacactggaaagattaaaagaagggagtgggtttggtacgtaagaagttgctacttgtcctgacaacaagtaaaaatctgaacaaactgaaaaatcaaccattctacttagattcataagagaagtgaggtcacaggagaagctgctgccccacaaattggagagacaggcaaatacagagaatcataactcactggagcagaaacatccgggagaaccagtgcctgggtagggtaacctgaaccgtaattgaaaaattgctggaggctcagtgtgggacaagtctgagaaatataaactgaggaggacccagtcatcaggctccccaccacacttttgtgagttttacctgcaagagctctaccagattctctcagtgattatcccagaaaaatctccttgtgtttccagcagcgggaagggaaaagaaacttttaaaactatactaggttattctgtacttcttgataaggtctaccttcagtagaaactgcttagccagagcctaaagtgctgagattttatagaacctgactgacctggggaagggaaatacacaactccagccccctcatccatttggtcacgcataaaggggtgaggaagaactgagaagtacttgtgaagtctagaggtataggctcactaaaagactcagacctagtcatggaactatagaacgcttcccttcttgaaggcctgtttatagcatttccttttgattaatgtacacaaatcagtagctcttctgtaaaccaacagtgaccaggaggagaatcacatcaagaactcaacctcttttacaatagctgcaaaaaaataacatacttaggaatatacctaatcaaggagtcaaaagacctctacaaggaaaactacaaaacactgctgaaagaaatcatagatgacacgaacaaatggaaacacatcccatgctcatggatgggtagaatcaatattgtgaaaataaccatactgccaaaagcaatctacaaattcaatgcagtccctgtcaaaatacgacctaataccaaaaccaggaaaggacataaccattcctttctcattcttcacagaattagataaaacaattctaaaattcacttggaaccaaaaaagagcccatgtagccaaagcaagactaagcaaaaagaataaatctggaggcatcacactacctgatttcaaactatactatagtgcttatagtcaccaaaacagcatggtactggtacaaaaatagggatatagaccaatggaacagaatagagaacccagaaataaacccaaatacttacagccaactgatctttgataaagcaaacaaaaatataaaagtggggaaaggacacccttttcaacaactagtactgggataattggcaagccacatacaggagaatgaaactggatcctcatctctcaccttatacaaaaatcaactcaatgtggattaaggactttaaacctaagacctgaaactagaaaaattctgggagataacattggaaaaacccttctagacattggcttaggcaaggatttcataaccaagaaccaaagcaaatactacaaaaacaaagataaatagctgggacctaattaaactaaagagcttttgcacagcacaaggaacagttagcagagtaaacagcccacagagtgggagaaaatcttcacaatctatacatctgacaaaggactaatatccagaatctacaatgaactcaaacaaatcaacaagaaaaaaacaaacacaatgaactcaaacaaatcaacaagaaaaaaacaaacaatcccatcaaaaagtgggctaagaacatgaacagacaattctcaaaagaagatatacaaaatagtcaatacacatatgaaaaaatgctcaacacaggaaaaaatgcccgacaaacatgataaaatgatcagagaaatgcaaatcaaaaccacattgtgataccacctcctgcaagaatggccataataaaaaaatcaaaaaacagtagatgctggcatggatatgatgaacagggaacacttctacactgctggtgggaatgtaaactagtacagctgctatggaaaacaatgtggagatttctttttcttttattttttttattatactttaagttttagggtacatgtgctcaacgtgcaggtttgttacatatgtatacatgtgccatgttggtgtgctgcacccattaactcgtcatttaatgttaggtatatctcctaatgctatccctcccgcctccccacactggggcctgttgtggggtggggagatttcttaaagaactaaaagtagaactaccatttgatccagcagtcccactactgggtatctacccagaggaaaataagtcattatttaaaaaagacacttgcacatggatgtttatagcagcacaattcacaattgcaaaattgtggaaccaacccaaatgcccatcactcaacgagtggataaagaaactgtgactgatatatatatgatggaatactatgcagccatataaaggaatgaattaacagcatttgcggtgacttggatgagattggagactgttattctaagcaaagtaactcaggatgaaaaaccaaacatcatatgttctcactgttatgtaagagctaagctatgaggacgcaaatgcataagaatgatgcattggactttggggacttggggggacgagtgggaggggggcaagggatagaagactacaaatatggtgcagtatatactgcttgggtgatgagtgcaccagaatctcacaaatcaccactaaagaacttaggtaaccaaataccacctgtacaatagcttatggaaaaataaaaaaataaaagcaataaaaaaagaaaggctagaaattaatacaatgtccaatcataccacagtggatataaactagaaatcagtaaaaaaaaagaagctggaaaaattcctaaatactttaaggttacataacataattctaaatagcacatggatcaaagaagaaatctcaagagaaattttaaaaatattttgaggctgggcacagtggttcacgtctgtaatccctacactttgggaggctgaggtgggaggattgcttgagcccagaagtttgagacaagcctgggaaacatagggagaccctgtctctacaaaaaaattaaaaaacattagctgggcattgtggcatgcgtctgtagtcccagctactcaagaggctgaggtgggaggatcacctgagcccgggaggtcaaaggctgcagtaagctgtgattgtgtcactgtatttcagcctgagtgacggtgtgagactttctctccctcctccttcgctgtgtgtgtgcacatgtgtgcatgtgtgggtgggtgtaactaaatgaaaatgaaagcccaagttatcaaaatctgtgggatgcagtgaaagcttagaattttatagtattgagtgcatatattagaaaaaagactaaaaatcagtcatctaagcttccaccttaggaaactagaaaaagaacagtttaaatccgtagtaagcagaataaaagagttaatgaaaagtagggcagagatcaatgaaattgataacaggaaatccatagaaataggtaaggaaaccaaaagatgtgtctttgaaaagatgagtaaaattgataattacgttagctatgctaacatagaaaaaaaagcactcagattcctaatattgaaatgaaagaggagacatcactatagctctcatgagcgttaaatgaataataaaataatatgatcaactccctgtttacaaatttgataatttatatgaaatgaattaattccctgaaagacacagtcttccaaaattgacataaaaacaaataggtaatctgaataggcctttatctgttgaagaaattgagtcaataattaattactttccaaaacagcaccaggcccagatgagttactggtgaattctgtcaaacatttaagtaagaaattacaccagttctctacaatctcttccagaagatagaagaagagagaatatttcatcactcattctatgaggccattgttaccttagtactaaactagatgaagacattcaaagaaaaccacagaccaatatcttcatgtttaaccttcaaaaatcaattaatccgtcatatcaataagccaaagaagaaaatcacgtcaatagatgcagaaagggcgtttgagaaaattgaacactctttcgtgataaaaacccttagtaaactatgaatagaggggaacttccttaacttgataaagagtatctacaaaaagcctatagctaacgtcacacacagtgctgagaaatgtgaaactttcccactaaggtcaggaataagacaaagatgtccccactcaccactatgtttcaacattgtattagaactcctagataacacactaagacaaggtatacaaattgagaaggaagaattaaaactgtctttgcttgtagatgacatgattgtagaaaaaaatgaaagcatcaacaaaaaaaacctcctagaactaataaatgattatagcaagtttgccggatacaaggttaatatacttaagtcagttgcttacccatatagcagcaatgaacaagtggaatgtgaaattaaaaacacaataacatggctgggcgcggtggctcacgcctataatcccagcactttagggaggccgaggtgggtggatcatctgaggtcaggagtttgtgaccagcctggccaacatggtgaaactccgtctccactaaaaatacaaaaattagccgggtgtggtggtgggcgcctatagtcctgctactcaggaggctgaggcaggacaatagcttgaacctgggaggcggaggttgcagtgagccgagatcgcgccattgcactccagcctgggtgacagagtgagactccatctcaaaaaacacaataacatttatattagcacctcccccaccaatgaaatacttaggtataaatctaacaaaatatttataagatctatgtgaagaaaactataaaactgattaaagaaatcaaagaactaaataaatggggagagatatttcatgctcatgggtaggaagactattgtgaggatgtcagtcatttcttcccaaattggtctgtaggttcaatgcagtctcaatcaaaatcccagcaagtgattttgtggatatctaccagctgactgtaatgtttatatggacaagcaaaaaccagcatgatactgaagtagaataaagacagaggactaacactaccctacttgaagaattactgtaaaactgcagtcatcacagtggtgtggtgctggcaacagaatggacagctagatccatggaacagaatagagagcccagaaatatataccttcataaatatagtcagctgatcttttacaaaggagcaaagacaatacagtagagaaaagattgtgtcttcaacaaatggggcagaagcaattagacaccatattgcctcccttacccttaaacagtctagacatagatcctatatacttcacaaaaattaactcaaaatggattaaagacctgactgtaaaacacaaaatcttaaaattcacagaatgtaacataggagagaatctagatgatcttgaatttgttgatgactttttagatataataccaaagccatgacccatgaaagaaagaattaatgagctggactttgttaaaattaaaaatttctgctctgtgagagacattgtctggagaatgaaaaaacaagccacagactagagaaaatgtatgcaaaagacatacaaagaactcttgaatctcaacagtaagaaaaaaaacaattagcttaacctgatttttaaaaataaggcatagaccttaacagacatctcaccaaagaaggatatacagatggcatattgtaagtatgtgaaaagatgttacacattgtaagtcatcagagaaatgtgaattataacagtgagacactactacacacctgttagcatggccaaaatccagaacactgacaacacccaatgctggtgagaatgtggagcaataggaacaggaactttcattcattgctgttggaaatggaaaatagtacagccacttcagaaggcagtttggcattcttacgaaactaaacatacttttaccatatataccacttagtatttacacaacagaattgaaaacttaggtctacacaaaaacctgcacccagatgtttatggcagctttacccataattgcccaaacttggaagcaaccaaggtgtccttcagtaggtgaatggataaataaactgtagtacatctagacagtgggataattttcagcactaaaaaggaatgtatatcaagccatgaaaagacagggaggaaccgtaagtgtgtattactgtgtgaaagaagccaatctaaaaaggctacatactgtatgattccaaatctgtgacattctagaaaagacaagtctatggaggcagtaaaagaagcgagaaaaggaacactcagagtgtgaaaacaactgttcacaacattttacctcctttaatcctttcttccttttctaaaatatacatagtcattgtgtcactttacagataatttttgttctgatttttaaaatgcttaactttgtaataaagcatgatattttctcattaaacacttcatagtttactttgagacttttatgaaatgctggacatttcattttccactttttgtttttgtaaacgtaggggtatgcatttgtaaaacctcttaatagacgttgtcatgttgctttccagagagtgagccaattctttttcattaatatttttatgagacataaaaataaaatgacaaagcagagtcctgctttgttgcccaggccggagtacagtggtgtgattatggctcactgcagccttgccttctgggctcaagcaattctgtcacctcagcctcctgagtagttgggactacaggcacacacaccaccacacctggctaattaaaacacacacacacacacacacacacacacacactctctctctctctcacacacacacacacacacacacacacacacacacactcttatggagattggcttggtatgttgcccaggctggtcttttaacttctgggctcaagcgatccttctgtctcggcctcccaaaatgttgggattataggcatgagccacagcacccagtcagtgagcgaattcttttcacagattttatttttaagaagtcccctttatgaggctgttgataagtatactgagatcaatagctaagggttcaaattaagcaaaatagcacatctatcctagtagttaatcactattgtctgtattccttcttgtcatttcttacctgtttgttattcagtgtttcttatttactgtaacccaagtgtgttttattttataatcagaacataaggtgggacagtaacattcatcaaaatatagtataattaatcatcgtttgtggctaatcttgtctcaatagatatgggataaaaccagcctggaatgtttgaaagtgttaacaggacacacaggctctgtcctctgtctgcagtatgatgagcgtgtcattgtaactggctcttcagattctacggtgaggtgagtgatctggcttcattgttcttaacttgtaagccttccctgagaaagtctgagattgacatcctcctctgggagaggcatacacaaacttacatttttacatgctgtatttcaaactacttttattgtagacatgtttgcgcaaattaggcaggaaagctaatttttgttaagggtgttctattcctattgctgttcattgtagagatgacaacatgctttcctgtaagagcatataccaagtattaggctggctttcttcttttggttatgtggtccagagcagagaggagacactcacttccaggagtcactcctggactctttcgccacccctgctggaagcatcgccacccctgcttgaagcatgcttagtatcctctcctggactcagtgcttccgtacccctgcttctgccagagatcatgtctcagcctcagaggcctgagtctttccccctctgccctatgtgaacttgtcctcttaggagatgagggttacagaaaagccgtgatgtggaaatgctgcttccagatccctggatctacaaagcagttgggagaccctggctttgtccataaagcagctgggtaaagaagtggatgcggtgattgatgaggcatcatgacttacccagtttgcagtggataactgatagactcagaggcctgtcagaggtcaacaagaactaagcttggaaccattctcagttcttcagccaacaagcctccttcttcctgtcatctcagactcaatacaaaatctactatctagaggaatcatcttttgccatcagcacgagcctgcaaacaccgtccctaaatacctgactgctaaatatacctaaactcaggcagagccagaattagccaccttttctgaaaccatctcagcacttctcagcaaataaagaaattgcttttaggggccccttttaatcatgtccttaggttcattaagaatagaccctgtcttactccatttgtattgctataaaggaatacccgaggctgggtaatttataaagaaaaggggtgtatttgactcatggttctgcaggctctgcaagaagcatggcaccagcatctacttctgatgagggcttcgagctacttctactcatggcagaaggcaaaggggagccagcatgtgcagatcacatgtgagagagaagcaagagagagggaggaggtgctaggaggctcttttcaacaacctgttctctcaggaactaagagtgaactccctcctatgagaatggcaccaagccattcatgagtgatacaccaccatgacccaaaacatctcctgccaggccccacctccaacattgaggatcaatttcaacatgagatttggtagagtcagacaaactatatccaaaccattgcagacccagacagagctcagataccagaatcatttcctggctgtctccataattaagcatcatgcttttctcttctctcctagagtgtgggatgtgaacacgggtgaagttcttaacacattgatccaccacaatgaggctgtattgcacttacgcttcagcaatggactgatggtgacctgttccaaggaccgctccattgctgtgtgggacatggcttctgcgaccgacatcactttacgccgtgtcctggttggccaccgggctgccgtcaatgtagtagactttgacgacaagtacatcgtgtctgcctctggtgacaggaccatcaaagtaagtatgtctgcagtcataaccctacctgttcctgtcccttttagaacagagacaaagcagaggtggcttataccaacctggtacctggcaagatctttattctcctctgtgcttatgaacccttgaggccatcccactctgtatatctgtagagttgtaggcaaggtaggaggaaaagccatcggtccagaagagagaacagtcttctgtttcatgacatgaaattcttgatcacctttttaaggggaagagtgctaacgtgttgatcatgtattgtgtgttgggagctttacattatggtctcagttaacactcagcacttttaaggtaggtgtggccccattttacacatctggctcagagagtaaaggattgtgttggtgatcatcacagctagttagtggcagagcttagatgttttatttattcacctaattttgaggactcgcagtgcggtggactctgggccggatgctagggatatgatgatgaagaagacatgtccttgccttcaagaagcttagcatgcggtgaagggggaggcagacttgtaacaaggagttgaagtctagggtgattccctaggatatggtaaatgcagtcctgattccaatatctcagctaacttttttgaattttagctttcctatgcttttataacatctttaccgagatatagtttccatgccataagattgaacattttaaagggtgtaattccgtggcctttagtacatttgcagcattctataacattaccattgtctagttccagaacattttcatcgcgctctaaaaccctcacactcattagcagtcagcctgtgtttcttcccagtccctggtgatcactcatctaccttctgtcttgggattggactattctaaacacttcatataattggaagaataccttatgtggccttttatttctcgctgctttcacttagcataatgttttcaaggttcatccatgtgctttgtagcatgtatcatcagctttgtcccttcttttttttaaaagtacagatggggtcttgctttattgcccagactagtcttggactcctgtgctcaagcagtccttggcctcccaaagtgttgggattacaggcatgagccaccacacccagccagtactttgttgcttccagtggctgaataaaatttcattgttcatctgtttattagttgatggacattttagttgtttctatttttttgactattacaaatgatgctgttataaatattagtgtagaagttttcatgtttttaattttcttaggatggtaactctgtgtttagcttttttttccttttgaagacagggtctcactctgtcacccaggctggagtgcagtaacacagtcatggttcgcttcagccttgacctcctgggctcaagcagtcccccagctcagggactcctgaggctcccacctaagcctcccggagtagctgggagtacaggcactaccaggcccggccctttttttttttttttttttttttttgtagagaccaggtctcactttgtcacccaggcttgtgtttagcattttgaggaactgccaaactgttttccaaaggcgctgtaccattttacaatcctgccagtggtatatgagggtttcagcttgctcagaagaacctccttttcataaccagcactggatagcactcttatacctagccccacaaatcacgaagtgtgtagcatcaggctttgcattggatagctgggaagctaaacaactaggatttatatgcggcaacttactcccacagtcacaccaattggtatgagaccagtgcctggaagttgagagggtttgagctttattacaaaatagctgtttcataatatcagcatggaggatttctccatatccttgccaacacttcctattatttgtctcttttattatatctgccctagtgattgtgcagtggtactctgtggttttgctttgcattcccttgttactgatgatgctaaacaacttgttgtatgcttattggccatttgtgtaccttctctggagaaatgtctatttaaatcttttgcccactttaaaaattggtaatttgcctttttattattgagttataagttctttatatattctgggcacaagtcccttatcagatacatgatttgcaaatattttctccctttctgtgagttgtcttttcacttttttgatggtgtcctttgatgcacaaatgattttaattttgatgatgttcaatttatcaagacttgtatagtttcagtgcttatgtgtaggtccttgatccattttgagttaaatttttgtttaaggtatgaggtaggggtccagtgccattcttttacttgtggagatctatttatctatcccattcagctacaaatgcagctggtaagataattcagggcactctggttgctgtgtgtctccttatttgtctaataatatgtttagctgtctatgaacatctaagtcagataccacaaaagaggggattatttattctgcatacatacaattagaagtaatgtgtcaaaacaaatggagctgttccagaaaatatgctggaaaagaggatgatatgaaaggtgagactttttgtttgttttttgagacaaagtcttgctttgtcacccaggctggagtgcagtggcacagacacagctcactgcagcctcaacctgctgggctcaaatgatcctttcacctcagctccctgagtagctgggaccacaggtgcatgctgccatgcccagctaattttattttttgtagagatggggtttcactattttgcccaggctggtctcgaactctttagctcaagcaattctcctgtctcagcctcccaaagtgctaggattaggtgtgagctaccgtacccagctggaagcttttttattacattagctccatggggtttgaaatgtcagctggtgtaaaaacataaaatctggcccaaactctttcctccaggtaaatgagcgtttgaaccattcaggagatgttctctttgtaaagatctcaaagactggagacttcacttccctccgtgtttcattccagtgttattactcagcagccaagaaaattttatgctgtctagtctgccccccagcctcccaactttgagttagaggacaccgtattttataatcacatatttgggtcattatcagaagctctgtctttttaagaaaggtatattgtgagaggactttcctgtgttcattctttaaaatactgttaatttgttatacaggtctggagcacgagcacctgtgaatttgttcgtactctcaatgggcacaagcggggcattgcctgtctccagtacagggatcgcctggttgttagtggatcatcagataataccattaggtgggtagaagttggtgtgctgacagagcaggctgatttttgccacattgttgactcatctcctagttctaatgctcaaaacaactcagggtaaatgggatgtttcagataagaaagctttaggtaacttttagaaatgtatttgggctctgtatactcaagtgggaaaaccgtgtgtgccctgggtgttcttccaagattcccccagtacacaaagttttttaacctcagctccacctgggatcacttaataccagagcacttcagaacaggctagggtgctgcagtgcagcccagctcgctccaatttccctcacctgtgagctcccacctccctacctaacacatgggagtgtactttattttcctctcccaagactgcatctgttcctgccaggtcatttacctctctttttccttcccagcactcggcctccctgctttctaataaatctgactaaccttagacattttgtatcttactaagaacatcccttcaatatctacttcattatcccatgccatttccccactgtctcaacacactctagtggcattacataagtgactaaacttaactttggtttataatcaaattgactaatgtttggtcaaaataaagataggattcaagattattaaaaaaagttttttgttttttaaaggcaggcaagcaaacacatgctagtagctttacataagtgactaaactttggcgtttataattgcctaatgtttggtcaaaataaagattgggtttaagattattaaaacttttttttaaggcaagcaaataacaaaaaagctatttaagtttgctttatcactttaggcttcaagataccataaatttagtttagagcttaaatcttgattctcttatattcatcatgctttgtggtattgcttaatgtttcatcaataaacagttcttaacttcctcattggaattgtcaaggttttacaagatagtaatgtgtattactctccagcttatagaagggaactactttggagtcatagtggcagtactgaatggctttgatcacagattagagatgctatcatcacgggtactaagaagatttgctaagggcagctgtaataaaatccattctttggatgtatcataggaattactggtagagaggctaagaaaaagttatagaattaatttgctcactttattttgtacatgctaactagctatgatttttttctacaaatactgtagaaaatcagtcataataggaaaaaagatctctaactccagaattgttacataaatcatatgcagagaaaaagacttggtgttgtcaatgggtttatatttccaccagaacactgcgtgtacctagtaagtctcccactctgactttgtaaaccgtcaatcccagtattcagcatatagtatcaaggaaggggtatccccaagcctcatcaagagacagccacctcccctgctggtccgccagttctaacctcagtggtccttatggactccactgtgctagaagtgcctggggcggaagcttaaccccctggctgtacgtgatatctcctttcccaccttgtctcatctgtgctctttctcctttactgcctacaatccctgtctccccagaagagtctttcctacaccatttgtctacatggtttttatcaactcagacatcaagagaatgcctaaggattaaatagaattgaagtttcttgtttgttgattttatttaaatagtaatacagacgcatgattaaaaacagtttcaaatcatataaaaggaaatagaataaaaagtaaggcttcttcctaggttagtgcttggaaacacacagatggtataaatgtacacatacagctttatatgtgtggtgtgtactggaagtgagatagaaataaagagctccaagatagtgaaaaattgtatctgtatggaacagatataaaaaacttacggatagtgtgaatcgtgtgtgggaatttgtttcacagaggtctgtttttcattcaaggctctgggatattgaatgtggtgcctgtttaagagtcctagagggacatgaagaattggtccgatgcatccggtttgataacaagaggattgtcagtggggcctatgatgggtatgtctttcagattttcagatgtactgctataactgtatcaagaagaaagagaaatgttatatattaagcaactctgtatgtaccaggtcctatggtaggtttctgtgtaatggtggatggcaggtattattatacctgttgtttaggtgaggacactcaggcccagaaagaagaactaaatcttaccccaaatcacacagagggagagtcactgtggttcctaaacttagctttgaatcatcgctgtcaactccagcaatagcttaggtttcaatagttgatgtgggggtattgacttctttgctttatccctaaattaagccaggctctttgtgtgtgtgtgtgtgtgtgtgttcgttcaacaataagtttcttcttttccctttttttccctttttggtaaattgaacaaaccctctttaaaacacctcactacattttaaatgagcaaatggcaactgtaaatctttccagatgaccttatatatacttcccaaatgggttagttggtctgtttgtactcctattactaacttccagcatttgcttaatttggagaaaggtatccttggaatttcacacagagccctagcttctgtcagcagcacctactcagccctagagagtcccctgatgaatgaatttggtgacataggttatcaagtccggaactgaatttagataacctgaagttgttttcttatctcccttaaaataatatttctttaaaatttcagcaattctgagaatgtgtaggttcttaatttttccaaaatcaagtgtaattggttcagatgatttgtaaaaacataagcatgttccccattagcttttataaataggcagttcagatgcactactttttttcaaggaaatgtttgacagcatataaattgttcacttttccactaatcacatctcattttcctttctaggaaaattaaagtttgggacttgcaagctgctcttgaccctcgagccccagcaagcacattgtgtttgcgcacattggtggtatgtgatctcttgagacgggaattggttccctgtgctggaggatgaccatttgcagatagtcctgtctaggtgtatcacaggaacgcttgtgtgtctcacaagatgccttcagagaatttcagtcttcattttgtttagccaaaaccagagaatatttgatgtttacattactgtgagcactttcctaaggggagacataatgcagcttaagatatgaaggcaggcttcctgatttgtaggtggactggtttcctcatagggcaagcaatatttccttcttgtaggtttggaagatttcttaatatggctatttgtggttatgttttaataacagcacatttttatactatatataaatttttataccatttataagtactgttatatttttgaagagatagtcatttggaaatattggtagatttaaaaaagattttagtagttttatttctgtttcttcacttcttgcatttactagaagatgcagaactgtcttcttgattttaatgggaactcttatattattatttcaccatgaattttgatgctggcagcaatttgaggtagatcctggtcatgttaaaacaaactgtctttctggttctaggttttccagtggatttttagagtgtatcaagaatgggtattatgtattgttgtttacttttataaggccctttttgagatgatctttgaaatattggtagactagagtctaagatacaaagtttaatgaaagaaaaggcctagcaggaaaagaaagaagaacatttgttcttgggatgaaggacacagttcagtgagctctgtacagtcgtttaggaagtctgtttaagtggctgcattttcatcttctgcccagtttctcattgtgagatatcaggggctgtaaagatctcattttattcatgaagttttgtatttcataggaacattctggacgtgtgtttcggctccagtttgatgagtttcagatcatcagcagctcccatgatgacactattttgatttgggatttcttaaatgtgcctcccagtgcccagaatgagacccgttctccctccagaacatacacttacatctctagataacagtctgcactttcacccgtttcaggtgagtactatcctctccccttccaattttgctgattgaattcaccttccctttggggaaattttgtgatttgggttccttggtgatgtgtgaaccaaggtctctcttagacgtgtcaacttttgcagagttcaagtgtaaggctggatctttatagtcacatccatacaaggcttgagttggaatcctgcctattgtgtgggttttcatcttggcagatgatgaacatggttcctgtttttaaaaactgttcctaaatgatttcttaggtcataatcaatttaacaccagtaaaatgtcttgaattttattttggggtacaagaatcttctttttctctttctttcctgtccttcagttcttttattaaaaaaaaaaaaaaaatcaccatctgacaaaacattcaaaatccctctcttccccactaccacaatccacccaccaccatcctttcctcaaggatgaatcagagaagagtatctgttgagagacccctaaaacctattctgcttccatgaaacacaacagatacactgagaagcaaagtcctttcctctggttacaggaacactgaaagtcattataaccattgatgacagaatgttttgattattactaagcgtgttcagtctggaagatgagaagtcttacttggctgtgtcctaggaactgatgacttaggaacagtattgacaactctgtgttctgctgagggccagtgaattctatacacattaaactttgtagattgaataaatgtttacatataaacatactactatggatatatgtatataaagactgttgtgattaataaaatttgtatttatttaaaatcgttacttaattcttagtggtcttttatcattacatattttcctgttcattgaatttcaaaagtataagaaagtccatgtgcagaattaggaatttttttgatggagagattgagaactcttggtacctattcactaagttaccatcttttcagatactctttcatcaagattccaagatccaataaatagaactccaccaggaagtttgtcttacctagaggtcaagaaactatataaccaggggccaaaattaactcactacccgttttttttttttttaattagtctctgcttatccattaagtttttttttttcctgtctccacaggctaagaatagtttttacatttttaaatgcttaaaaaaattaaaagaatttttttcatgacatgcagtaattaaatgaaatttaaattgcagtgttcataaataaacatttgtgctacacagccatgctcattcctttatgtattgtctgtggctgtttttgtgcttcagtggcagagcttagtagttgcaacagagaccttatggcctacaacatctgaaatatttaccatatggccctttcagaaaaagttggctgacttctggtcttgcccctgctccatctattagcggtaaaccaagggtctacatcaggaatggcaaataagtgttttcttcatgccaactcagtttggtcagtagtgactggtgggagtgttgcctttggaaggattctgggaccccacgtggaccccaaaggactggttgtggttggttatgtctgccttgcaggagtgacctgtaagccacttacctatttgctattatgggtctcgagtgtgttcagactgttcctgatcataatcttctgccctgctgctttctttctggatagatgcttcataagtcagttgaaaaatccacgtggcagaattactgtaattattgaatggagctttaaaataggaattacagaggaaggagacaaggatctcttgagtgattgctcctccccctgacctcccctcccaataagcctaagaaaatatagggaaggaggaatggacccaagtaaaaactgcttaaagaggcatatggcaaaattcaagacatccatattatggttttctttttctggtgtattacaatagatgaactgacaacatctatatattacctaaaagtgccctgaacaagattcctttggttgagagatgaagcagtgatcaccaatgctgtttcttattggctgtggtagaaaggaaacttgtgttacttcctccaggccctccctcctacctaccttttttggaaacctcagaacaactgcctagttgtgatcaattataagtcaatggaaaaatcttatctgcttaagctggaggttccctgtatcccagcacaagcagtgagaccacaaatgtgtttgtctcttcaattttattacttttaacaaccttggcagtcaactttatagattttactgctcttttctaatttttttttttttttccctttgagacaatgtcttgctctgtcacccaggctggagtgcagtggtgcaattttggctcactgcaacctccgcctcccaggctcgggtgatcctcttgcctcagccttgcaagtagctggggctacaggcatgtgccatcacacccagctgatttttgtatttttaatggagatggggtttcaccatgttggccaggctggtctcgaactcctgacctcaattgatctgcccgcctcagactcctgaagtgctgggaataaaggagtgagccaccgcgtgcggccccaaatgcttttcatttattgtaacatgaaaaaaattatagccatgtgataccataagatttatgcataataagaaacactaccctaatgatgatttaaccttgcagtaaaatactcacccgtaaaatatcaggtgagagtctctccatgtcagcaaatgcagcagtagatctatctgcggagtcgtttttaaaaaaattagtaacatctaagagctgtatgttgtattatatattcagtagctcaaaatttattgttttttcttactacaagacaatataagatcgttattaggaaatttgaaaaagtagataagccaaaagaagaaagtaaactcctgctcgtggtttaccactaactcctttttatagatcctttcaggctttttaaaatgacgctttataactgtacattttcaaatgtgtttttcttctttattgtgaaatgcttgcatgttagtaatgtatttgtccaaattattcctaattgccaaattatattagattgtttggatatgctctgttgttacatatttatcctccccaacccccagtttttagtgattataaaaaacaatgctatgatcattcttttaacctaatatttgtccaaccctttatcatctttggagggattctggaaatgtctggagggtctgggttaaaaggtatcacgtttgaagactttttttttttttttaattatactttaagttctagggtacatgtgcgtatgtaggtcattttgccctccagaagagttcagtcagtttatgctcccctcagcagcatttgagagtgtccacttctggtcctggggcattaatgtttttgaaataattcaggttcccttaaatatccttaatgggaaaacagtagcaaatgaaattgaatcttaaattcattgagaagacttaagattcttgatctttgtgtaaattgacaactttctgggaaaatcaccttttaaaaaaagcattcaagctttaaaaagtctctcttgcttttttttttttttttgccacctaaggtgactttagactttctggccagtggtttagtgcatcacttattgtgacagtatctgagtgggttttgactttattttgatttagaatagaaaatgtcagcctgcattgtatgtaaaaatgataaatattgtgaatatcagtattctcatgaatattgtttttttgtgtgtgtgtgtacatatttacatacatgatgaatgtagaaattgtgattaaaatgtgtttcagactcaaagccatagtcaaaaaattatggaacattcagtggcctttcccccatactgttgttgttttaccaatgatttacttattaaaaaggaagtaatttctgattactagcattctattttagaaaggctaatttttgcatatttttgtttccttgtgatcgatgagggctctcgtgaggatgtgagactggcctcttgtaggttctgaatgtcataaaagattatgctaaatataaaatcgaatgtgaagcatcttttgttatatgtgtactttttcagagcagtactgagagagtgataggttatagggtcagccctctccttgaatcccctctctgtcacttgttgactctttgaaccaaacacttagcctttctgagccttagttctcttatttgtgaagcaggtgtcataatagtttcttcctcacaggattgttgtgaggttgaaataaatgtgatacctggtatgtagtacactcagaacaacttacagcttctgctgttaatgctaataagttttgcatgtagctgtgtgcagggggtggagtggagtgtgtgtattctcatctaaacggaatgttcacccacactccctttgcttctgtttttctttcctcagggttttctagtcttgaactactggctacgtggctaccaaatgcctaagggagttcgttcacagctgagttatgaagctggaattggttctagacgctgggtagatgcaaagcagcctaactcttcaagtaccgacatttctcacctctgattccggctctcctttgagaaggagaccttagcttccccggcttcaagtagaacagaagcccgtttccttccctcatcagtgaaaaaatctaatgtttcaaatgtaaattgttcatagaaaaggaacatagaatctgttttacagaagtaaatcgaccgtcaagagaagacttggcctctaatttatattgctttgcactttggtttgatattaagaaacagcattcttcttcagtgaaattttgggtgccaaacacctacccagaatgtccagggctttcattttcaaaagttagcattctccttttgaccgtccaagtcattatgaattctgacttgttgtattaggaacatgttggacagtggaaaattttctctggattgttttagtaatatttttgggattatacttcctttctgtaccaatttcttttaatttaaagaactataagtcagttatattatctaccaacaggtaatatagctctttcttttattaactgttctctgtcccccaaccatctcctgatatttggtagagtaacacctttatacgtgtgcttgcctcctaatttaaaatactgtattcgcatgtagatataatgtacataacagtttaacctcaaagttgctggagtcagggccccctgtgcttgagacactaatacagagtgtgttcgcacttagccatgggctgggctcaagaacctgatacctgggttgatgtggattacctagaacccttcctgcagtattcatacagtgtttttattttgttgttgtcattgcgtgtgtgtggtttgtgtgtgtttttaatgagaatcttgttttaaaatgtaatttctaaggtttaacaccaaaatgttttatttgttgtggagtatatattatacaatagagaggtaccttaaacattttttgttcttattctttttctcataagtactcctgagtacaagtggtcacctcccatagtattcatttggcttcgctgtcaaaaatcattattctgtgcagtcgtggccctgggaaggggaaataagaaggccctgttgacgggctgtcttggctctggaattcatgcatcctggccttgccaaggttctggcagggcctgctggtgtgttggagcctgcagggcaggtcaggctggttcagaggcccatgctgaggggtgggtgctctgaagtggagtgaagcctcaagcccatgaatgccaccccagtcatctctggtgtcagctgctgctgtggccccagcaggttctcaaagctcccaagtcctccctacgacacagcccaaatgtgtaaatggcactgttgccctgacagtgcatggaaaggacgttggcatccaattggcactccttctcccttattcaatattaggtttgatttgcccttcgccattgtttccaaagatcaaggaatgtcaataacattttaaaggaccaataaacagcctcctataaagtaaacctcttcccgtggaagcacactctactactaaagggaaggcccctgggctctgatttgtcctttgcattgagaacggtgtggggatcagtgtgtgtgtatgtgatttgtttattgagttggctttgcttttttagtttttcttttaaaaataaaatccttccttcccatgttactaaattaatttatgtttttgagaggttgagtctcaaagtgtaaacaataaacctccattcataaggtggatgttgtaagcttgatggtggttgtgaaagtgatttagctttgaccacttttcatcctacagcttcaatatcaaactggttaggaaagcccagggggaagggagggggcaggggaggaggcaattctgaatgaatgaatggattttttgttgtttttgcatgtttaatatagaagttcccctcgttccttgggagatgatggcctttgaatatgcagacaacctttgaattgtgcctactaaattatagcaggggactttggcacccaaggagttctgactttctgggattataatagtaattcccagccatactctggactttattttgctaaccataactgagcaaatgtaaattactgctatattaatgttttaaagcactgggatagtctaattctaacttgtaattaattatgtttgccaattatctgtttgaaataaatttgtgtctgaacagctattgaaactgttaaattgtacagatattattcatgacagctttgtactgtggaatgtgcttaataaaaaacaaaaaagtttgacttttgtccagtaaattgctaagtaatgtcaataaatcgagtatgggtattatgcagtgcacctaatctggcttcatgcaattgttacttcagctactgattcaaagccaatactcttaataaagtgttgcaatactctgacgttctgttaagaaatttttcaaagaaactgttaagtgctgttaggaattcagtgacatacaattaaaatttatagatctttagaatcatctgttctgtaaaatgagtttgaaggcaaactggttttggcgtgtgagaatgttgtagtagatgatatgattccttgtcttgggcttttgccgaaagctagcttgaacttcaggagttagctgagggctagctaagaactcttgccctgcaaatctgcttcccacacataattaattgcttcacaagttactgtcaacatgaaaatggcctctgagacatcccaagtggctttcaggtgtgagtggatcctccccttcttgaagaagggccatggaggtgtgaggggcagtttcgcagccctctccaccatagcatcagaaatgaatagttttgtgtgtgcaagtgtgtcactggtagagtattgaagcagaaaaagtcgagttagtatctgtaggattctactcagaaattctattcagtaggactgagtagaagctgagtttttttgatagctaggctaaacttcccccattagtcaacccagttggtaatgcggactttttgcatgagattagagtatttctatgtaattgttcccacccgtttttcttgtagaaaacgtttttcaaatgtgtcatgcatgtggttaagagaaccaatttacaaatcacaaaaagataagagtaaaaagtaatttttcctctcccccttaacccccagtccctcaaatgatggttaaccagtttctttcatgtccttcaatagataccctcttttctatacacagcttgctcttccagccggtgaagactctgggagcttgtcttgtagtgctaagatattggggctcctgctggcttgttgcacagagctgaatccaacactttgtaggcactcactcagcatctgtgggatgactgagtatatggccatctcaaggtgtttacctgcccacagataggacgacggaccccatacaccaaatgcactaattcagtaatttaaaaattatattggttaggtgtagccatgtgaaagatttgtagggcaggtcataagtaactttttcttagtgcgtgccaggtaaactggaaagtagaatcctataaatgagattgtacattattttcagctttgtggtcatctgcttatcctttctctaggaattgtttgattttattgctcagagtatgtgagttattactgggctggcctgggagaacctggaaattacaaggccaaagacttgagtggggacagatttaggaacagcttaaacttgatgttctggtgagatctcagtgtgtacaacttaagctgtctctacccttcaccaccaccttcagatccagtggactttgccatttctcgcaggctgtgtttgtacttccaaataccaccaacgcaggggattgggaaggattatttttttaagcatctagctctgttgcccaggttggagtgcagtggtgcagtcatagctcactgcagcctcgaactctaggactcaagggatcctcctgcctcagcctcccaaattgccgagattacaggcttgagccatcacgcccagtgggagggatgttcttagaacaccattgagaccatcctgtgggggccacttctctaccgaatggcagagaggaaagagcctgggctttggggcccagagatctagctcaggattggagccctgccacctaattggcagcaggtcccacgggcaagggcatttattatcctgaacccaaactcctcagctggggagcagagacagtgttttaagattactatggggatgaaatgacatctctaaagtgcctagcacagtgccttgcagcttcaacttagacatttaaacaaagggaacagaatgctcagaggggaggaagggacaggagttagtggaatctggggtgtcgtgctgtcaaataaacgtgctcaggcaaacctgaagcctgtctggacctcttgaggggaaatacaggagctgaccctgaggactggtcccaatgaggacttgagtttgtaatcagggcctggtttgttcagtgggtggaagaaagggagatgggccagtgaataggtttatactgagttatatttgttagttttattattacaaataattataaaggtagtcaacctatcatatccccagctagtatttctgggaagagaatgaggtctaaacatgtcactgtcctcagtgaattgtattgtctccagaggggacgggaaaatttcatgccttcagggtgtgtataggtggtgggtgatggtggggaagaggttggatcatgccagctacagcaagaatgaagataagtgagtgaataaaaaataaagattcgtgggtgccaggctgctggtgagggctttgtgtactctcatccttccagtagccctgcatggtttatgttcttaccgttttatggttgaagatactgaggcttggatctgtctttgggagcggctgaacttagtgttgattctggtctgccttgggggccacagctggcctcttagcgcgctgccctagcatctccctcttcatgctccgtgggcccctggatgcccgcagagtctctctgaagagccaggctcagactgtgtggtcccttggcacccacagaccctctgcccttctcttctcccctccactgatatgtccctggcatatgttcttggtgtgtcttcaacagtgcacaaagtgcgatggagtgcaaggggccggacaggtgcagggggacccgactgtggccggccctgtgggccattctgaggggtgggggctccatcctgggggcaggggcaaccactggctggttttaggctcaggagtgaccaattagaaagctagagttaagattcaggagagagatgctaaggtccagaatagggaacatgaggaggtgagagagggtgttgggagccacggggcttagtgtggagggagctggaggcgctgacaacagcattcatattcagtgcgtgtctcctgggtgccactagatggggctataatggaagaagacacaaggtccctgctctcaggaagcttccgttctagaagaaagaaacagtgcgcagtgattgctgtagtgtccacaaacatgcatttacaagataaattcagatagtgttgattgccgtgaagaggttacactgggcagtggttaggtgtggcctgggggacgttggatccaagatctcaataagcaggcgctggtcatgcactgagctgggacaggatgatgttctaggctgcgggcgtggacacacgccaaggccttgaggtggggatttctggagtgggcaatgggctgcaggggtgtccagctctcccagataagggaattggggttgatccggggggtggaagggggatgcatttggatgtggacattggaggggccccagagaggtttgagtggagcccctgggctgcctagaagagaaggagacaagtggtggtttcagaagaaagagcccagaggaacatctgcatttaggaaaggggcacgggaggacaagcctgtgacaaaggtgggaaggagcagcgggagaggcaggagcgtgatacccagcagtctttgcagggcctgtggacgctctcaggacttggaaactctcttttgcaaacacttgcctccaagctgcctgggcctcctggggaacaatgcctgtccactaatcacaccgcaggacacctaatcccgcttcacacttcttccaagacagcaccacactctcctaacggccagggctctggcagcaataacaaacaggcgcccgggaatagcttctccactccggcccttgcctggcttgtccttgggaacgctccctgcagcccatctgcacaaacagacgggggccaggtctgtgcctcaggaatgaagagataaaagggaccatcggggctttttccaccaaaggcgaaagcattttattgaacgggctgcgagtttttgtttcaggaaatttcatcatgtctccaagaagaggagggggaaaaagagagagagagagagagagagagagagaggtgggcaaggggagaaaaagagagagagagggagagaagttaattggcctcagattttctcactcccttttcatgttggtaacacgaggcagcccaggtcagactcaggtcagcgacgtttgggctctttagtgcccctctgtgaatacctcatttctgtaatagtttttcctttaaaaacagctctgccttctttggcagatggtgacattccattagcatatggaatatttttcaaaacacatccgaaagcatgtctcttacggaggagactgggcaaagcgaacgaatgtctgaaaagtatgttgggagcaactcaacatttaacagaaggcctcactcccgccttcgcccccggcctctccatagtctctcctgggttgttaccgtaaccaaaaggagacaggaggatgttccccaaagcttagtctgttggcttccctgggactgtcccagtatacagggtagctggagggaggctgaacccaggataagaacatgattcttggcctggattggatgttggcaaaccatgtggatgtggcattggggcagtgacggatatcttgcacactgagcacctattatgtgctagacgctgtgggtaacatacattatggtctttcctgctgaaatccatctagcacacagtgggcacatgtcagagcatgtcacccccctgcccagtactccccagtgactgccactgtgcttagaatcaagttcaaactccttgttatggtctgcagtaatctgagccttccctgcttccatgccattttatgtcatgctttcctctctcactcccactccagcgacatgagctttctttccgttctttttttctagctcagggcctttgcacgcactgcatgcatttccccagctatttgcacggctgcttcctcatcattcaggtctcagcccaagtactgcccccaaagaggaggcttctctgaccagacaatctaaattatcccacattcccccctattgcatcctgcgttccacttactctatagtacttaccattactttatttgttgacttgtatttattcaagacacatttattgaaggcctactatgtgctgggtgctaagctaggccgtgacaaaacggacaaatatccctgcctccaggaagcctacgttatgacacagcaaggcggatgaggaacaaatgccatgcttcttgactttccttaccagaaatgtcacctgaagtaccaggaccttgtttgtcttgttcagagaccattttgggaagtggtaatcacagagctcaagaaattgtagttaaacgaagaactgagcccacattttataaacaattgcattgaggcatagacaggaagtggctttcaagattgctccgctagtaaaacagcagagccaggatctgaaccttgctccttctgacgctgaggctggccatccatgccgcctgcccggcccaggcatcttgccaggtgccttccccactacttccttctcctcagcccaatatctaggtcctcccccactccctacatcccagctggcttatcccggggctgttctctagcatcctgctctcagtagggtgacttgctgtctgcaacacgttgggtaacatcctttgactctttgagccccagtttcctcgtcaaaatgagaatatgagccacagtagatctgctaaggcacatacaattctattatcctggcttctgaccaacccctctgtaaattacgttcaataagaggtgataaataagaggttaaaaaataattttgatttctgcagtcccaactgaatagcaatgacccatgtagtctcagctgcttcctcctctcagaccagtattcccagccctccactctgctcactctattgatccagggctagaagtcccattcaactggcttctgcaaagaagggcgtttattggcttgtgtcacacatacccaaggaatgggctggtcgcaggcatggctggatctaggagctccaactgtgtcatcagctcttgggcctcacctccttgcctctctgtctggctctcctttctcacagtttcattctaaagcaggcttgcttccacatggtatccaggtggctgccagcagccccaagagcatgtcctatcctttgagtgtctctggtggagcaaaatctcttcccagcagccgcaagagcatgtcctatcctttgagcatctgtggtggagcaaaatctcttcccagcagccccaaagagtcatgggactaagtgtccttggctcaggtagaatcatgtgcccacccttaaaacccacggaaataatccctggtggtcagggttggggtcgaccccacacaaaccacacgggctgagaatggaagggaggcagatccccagaggattaggattctggggtccaagcaaaaaggggaatggaggctggccagtgtcccctgctgctgccactaggcacgccttttcctgtgggaaatgactacttttgcatgttcgtcaaggcctagctcaaatatcacctcctccctggtccacagagcaggagctaaaagccctcagcccctgaactctttttgagccgttttcactttctctttggtattttagcttttaatgtgcacgagcagaaagggtcaaaatagtctgcctttggggtcagaaaagtttgggtttgaatctcatcgacgctcttcaggggtaaggtgaccaaggacagggcgcggctcctttctaatcagtcctccctcccggacctgctcggagcattcagtgagatgaagtgagcccagccagggtttatggaggacttttgatttcttccatgccaggacccatgttttggtcctctctgtgtcttcagccccagtcgcaggtactaataacgcagatgtgttgaatgaacaaactcctggattccagaactttgggcatgcagtggagtttcccctttcatgatgctcagattctaaagtgagcactgcaggtggaaaaccatagagtccaagatgcttgaaaaacccttaaaatgtggcttcaatacagtacacagtgtgtatggatgggacccagtgcagtgattcctgcacccattgagagtttgagtaccatcaagctggccaagggcaaaaagagaaaagtctacatgcaagcactcagtcatgcaaatgattctgcttttaaactaactattgggagggatagggaagtgagaaggaagagggagacaagaaaagggtaaatcctaaattttaaattgcctgcaagtttcattccattcgcttttttttttttttttttttttgagatggagtttcacttttgttgtccaggctggagtgcagtggcaccatcttggctcactgcaaactccgcctcccaggttcaagcgattctcctgcctcagcctcccaagtagctgggattataggtgtgcaccaccatgcccagctaactgtgtatttttagtagagaccaggtttcaccatgttggtcaggctggccttgaactcctgacctcaagtgatccacccaccttggcctcccaaagtgctgggattacaggcatgagccaccatgcccggccccgttctgctttactatgtagcctttgtcatagctttactatgtgtgaggaagctttgttgtggggagaacaactgtgatcatacacataactaaatggaagagcctgtatagcaggacatgggggctcagtgaacccagtgggatttgaacccaagtcttgctgatagatgcatggttcctggaaagctgtagaggagttctgggcctctgctgcctgtgggacccactggtggcctcaccaaactggctctcaccctcatgccctgagacagcagtcactgagacttaggttctaaaactgcaagtgaaattcaaggggtatacaacatggttcccttttttcaagaatttcaatttttagtttggattcgggggcacatgtgcagatttgttacctgggcatattgcataatggtgaggtttggggtacgactgatcccatcacccaggtactgagctcatacccaataggtggtttttcaacacgtatcccctccctccccccgtctagccatccccagtgtctactcctgccatcttggtgtccatgagtatccaaagatgtggtcctgtggctgctgccccctctgtaactctattggttggagagcagaattcaggaaagcaaagttgaccctggccccctttctgtaagccttggtggcataatttcattacccaggcaagtacataaccttgattaccttcctcatcttgacccccacctcccaaaccccattcagccctgtctagaacttctggatacagcacgtggccttatttttccaggaacaaggttcattgttgtgcttctgcggtgcccaccacatgatttctgggacagccttgtcaaccctctgggtgtgatctcagccagaatgtgtcacgatggcagacatgggatgaaaggaactgggaagaaaggaactgggatgttcaaatggtcctagactccacaggtgccctcagaggcgaaggggcttcctgctgaagcccagacccatcccagcagcatttggacaggactgtcattactactgaggtcccacttttggtgactgtggggttccaaaacggtgcctttccctgggcgaagtcaggctgagctggcactggctcttcgaggagcagccgaaccccaagtttcccgtgctgactcacggaataagagccagggccgtgggccacctgcctggggtctgccctggttgtgccacgaggtcaggaatttgggcaggcttttagctctcagatccctccgtagccggagttcacaaaaacttcgctgcatcactccagtgtcagcttttggtttcttgagcaacttctcctccgccaccaatttgctgattcactcagtctcttcctatttaaatccaaagggacagagcctgatcagctccatgacttgaaactcctgggtggggctttttgttccagcgtcctcataggtcaccaagcagccaatggatgcgctgctcttgagttcaggggacccttttgaccaatcagggggcattccttgttcaagcgcagcctaaagccatttccctccccctgggcctcctgatgggatggtttcccttaggagggcactcaggtgtggctgacaccatcactcacagatcaggacccaaactccgccaggaggctctgctcctccccatccaccccagctccttgctaagctttgacaaggtcagtataactgactgagatccaagggacaaatgcgcccgtgtttcatggctcctggaagtgagagggctcagcaggaaggcattggattcacagagcaacatcatcagctctgcagccaggtctctgactcctactcattaccgcagtgtctactggagtctgacttatctctttttatttttaattttaatattttaattttttgtagagaaaggggtctcgctgtgttgcccaagctgatcttgaactcctggcctaaagcatcctcctgcctcagcctcccaaaacgctgggattacaggcacgagccaccacggccagcccatgacttatctttaaatcccagtaggtagcccaatgcctggcacttggttggccctcaggatacttttcttggagtagccataaataagtgggtgccccagggaggttgggatgagcaatactgagaagtttaaggcacagttctcctgccaaagcggttggtctctttccaccgtcacctggtttccctggatcagctattacatctcattaatatcttatatttcattttctttgtagttcccttgcaatgtttcccaatgtgtgtcctgtgggacaatagttcagtggaatattaattaagtatta

SEQ ID NO: 2719 - DNA, 4639 bp, Homo sapiens
cgtagtcgtggcgctctcgaggccctgccatgagcaagctcttaactcttcaggtctgcacgtcctacgcccaccgtccagtgctactctcagctcggagttcagcttcgggctgccaagagccagcaacctggtgtcagaggctcggtcccacaacgctctgcgggccgcggcgcctgctgggaggtgtagtccccgatctgcgtactgcgttcgccgagggggagggcggagctgccggcggcccgggcgggctggcagctagagtgggtgcgatagccgcctccgcctctgccgcctccgccgtcgcctcctccgcccgggccgttcgctgctgcgcggggagagcgaggcggggccgccggggccgccatggagcccgactcggtgattgaggacaagaccatcgagctcatgttaccgaagtgcatgtttgggattttgttgaagaaagctggatacagtaaacggaaagaatcttggaagatgcttgactgctgtcttttctcagactagtctgaaagggaaaacccccattcattctggattggtggatctgaagtacaaaatattttccagataagtaatggaacatcatctgtgatcgtctccagaaagaggccatcagaaggaaactatcaaaaagaaaaagacttgtgtattaaatattttgaccagtggtctgaatcagatcaagtggaatttgtggaacatcttatttcacgaatgtgtcattatcagcatggacatattaactcttacctgaagcccatgttgcagcgggactttattaccgctttaccagagcaaggcttagatcacatagcagaaaacattctttcgtacctggatgccaggtctctgtgtgcagcagagctggtatgtaaagaatggcagcgagtgatctcagaaggaatgctttggaagaagctgattgaacgaatggtacgcactgatcccctatggaaaggactttcagaaagaagagggtgggatcagtacctgtttaaaaacagacccacagatggccctccaaattcattttataggtcattatacccaaagattatccaggatatagagactatagaatctaactggcggtgtggacgacacaacttgcagaggattcagtgccgctctgaaaatagtaaaggtgtctactgtttacagtacgatgatgaaaaaattatcagtggcctacgagataattctattaagatatgggataaaaccagcctggaatgtttgaaagtgttaacaggacacacaggctctgtcctctgtctgcagtatgatgagcgtgtcattgtaactggctcttcagattctacggtgagagtgtgggatgtgaacacgggtgaagttcttaacacattgatccaccacaatgaggctgtattgcacttacgcttcagcaatggactgatggtgacctgttccaaggaccgctccattgctgtgtgggacatggcttctgcgaccgacatcactttacgccgtgtcctggttggccaccgggctgccgtcaatgtagtagactttgacgacaagtacatcgtgtctgcctctggtgacaggaccatcaaagtctggagcacgagcacctgtgaatttgttcgtactctcaatgggcacaagcggggcattgcctgtctccagtacagggatcgcctggttgttagtggatcatcagataataccattaggctctgggatattgaatgtggtgcctgtttaagagtcctagagggacatgaagaattggtccgatgcatccggtttgataacaagaggattgtcagtggggcctatgatgggaaaattaaagtttgggacttgcaagctgctcttgaccctcgagccccagcaagcacattgtgtttgcgcacattggtggaacattctggacgtgtgtttcggctccagtttgatgagtttcagatcatcagcagctcccatgatgacactattttgatttgggatttcttaaatgtgcctcccagtgcccagaatgagacccgttctccctccagaacatacacttacatctctagataacagtctgcactttcacccgtttcagggttttctagtcttgaactactggctacgtggctaccaaatgcctaagggagttcgttcacagctgagttatgaagctggaattggttctagacgctgggtagatgcaaagcagcctaactcttcaagtaccgacatttctcacctctgattccggctctcctttgagaaggagaccttagcttccccggcttcaagtagaacagaagcccgtttccttccctcatcagtgaaaaaatctaatgtttcaaatgtaaattgttcatagaaaaggaacatagaatctgttttacagaagtaaatcgaccgtcaagagaagacttggcctctaatttatattgctttgcactttggtttgatattaagaaacagcattcttcttcagtgaaattttgggtgccaaacacctacccagaatgtccagggctttcattttcaaaagttagcattctccttttgaccgtccaagtcattatgaattctgacttgttgtattaggaacatgttggacagtggaaaattttctctggattgttttagtaatatttttgggattatacttcctttctgtaccaatttcttttaatttaaagaactataagtcagttatattatctaccaacaggtaatatagctctttcttttattaactgttctctgtcccccaaccatctcctgatatttggtagagtaacacctttatacgtgtgcttgcctcctaatttaaaatactgtattcgcatgtagatataatgtacataacagtttaacctcaaagttgctggagtcagggccccctgtgcttgagacactaatacagagtgtgttcgcacttagccatgggctgggctcaagaacctgatacctgggttgatgtggattacctagaacccttcctgcagtattcatacagtgtttttattttgttgttgtcattgcgtgtgtgtggtttgtgtgtgtttttaatgagaatcttgttttaaaatgtaatttctaaggtttaacaccaaaatgttttatttgttgtggagtatatattatacaatagagaggtaccttaaacattttttgttcttattctttttctcataagtactcctgagtacaagtggtcacctcccatagtattcatttggcttcgctgtcaaaaatcattattctgtgcagtcgtggccctgggaaggggaaataagaaggccctgttgacgggctgtcttggctctggaattcatgcatcctggccttgccaaggttctggcagggcctgctggtgtgttggagcctgcagggcaggtcaggctggttcagaggcccatgctgaggggtgggtgctctgaagtggagtgaagcctcaagcccatgaatgccaccccagtcatctctggtgtcagctgctgctgtggccccagcaggttctcaaagctcccaagtcctccctacgacacagcccaaatgtgtaaatggcactgttgccctgacagtgcatggaaaggacgttggcatccaattggcactccttctcccttattcaatattaggtttgatttgcccttcgccattgtttccaaagatcaaggaatgtcaataacattttaaaggaccaataaacagcctcctataaagtaaacctcttcccgtggaagcacactctactactaaagggaaggcccctgggctctgatttgtcctttgcattgagaacggtgtggggatcagtgtgtgtgtatgtgatttgtttattgagttggctttgcttttttagtttttcttttaaaaataaaatccttccttcccatgttactaaattaatttatgtttttgagaggttgagtctcaaagtgtaaacaataaacctccattcataaggtggatgttgtaagcttgatggtggttgtgaaagtgatttagctttgaccacttttcatcctacagcttcaatatcaaactggttaggaaagcccagggggaagggagggggcaggggaggaggcaattctgaatgaatgaatggattttttgttgtttttgcatgtttaatatagaagttcccctcgttccttgggagatgatggcctttgaatatgcagacaacctttgaattgtgcctactaaattatagcaggggactttggcacccaaggagttctgactttctgggattataatagtaattcccagccatactctggactttattttgctaaccataactgagcaaatgtaaattactgctatattaatgttttaaagcactgggatagtctaattctaacttgtaattaattatgtttgccaattatctgtttgaaataaatttgtgtctgaacagctattgaaactgttaaattgtacagatattattcatgacagctttgtactgtggaatgtgcttaataaaaaacaaaaaagtttgacttttgtccagtaaattgctaagtaatgtcaataaatcgagtatgggtattatgcagtgcacctaatctggcttcatgcaattgttacttcagctactgattcaaagccaatactcttaataaagtgttgcaatactctg

SEQ ID NO: 2720 - protein, 442 aa, Homo sapiens
MCHYQHGHINSYLKPMLQRDFITALPEQGLDHIAENILSYLDARSLCAAELVCKEWQRVISEGMLWKKLIERMVRTDPLWKGLSRGWDQYLFKNRPTDGPPNSFYRSLYPKIIQDIETIESNWRCGRHNLQRIQCRSENSKGVYCLQYDDEKIISGLRDNSIKIWDKTSLECLKVLTGHTGSVLCLQYDERVIVTGSSDSTVRVWDVNTGEVLNTLIHHNEAVLHLRFSNGLMVTCSKDRSIAVWDMASATDITLRRVLVGHRAAVNVVDFDDKYIVSASGDRTIKVWSTSTCEFVRTLNGHKRGIACLQYRDRLVVSGSSDNTIRLWDIECGACLRVLEGHEELVRCIRFDNKRIVSGAYDGKIKVWDLQAALDPRAPASTLCLRTLVEHSGRVFRLQFDEFQIISSSHDDTILIWDFLNVPPSAQNETRSPSRTYTYISR

SEQ ID NO: 2721 - DNA, 4060 bp, Homo sapiens
ataagtaatggaacatcatctgtgatcgtctccagaaagaggccatcagaaggaaactatcaaaaagaaaaagacttgtgtattaaatattttgaccagtggtctgaatcagatcaagtggaatttgtggaacatcttatttcacgaatgtgtcattatcagcatggacatattaactcttacctgaagcccatgttgcagcgggactttattaccgctttaccagagcaaggcttagatcacatagcagaaaacattctttcgtacctggatgccaggtctctgtgtgcagcagagctggtatgtaaagaatggcagcgagtgatctcagaaggaatgctttggaagaagctgattgaacgaatggtacgcactgatcccctatggaaaggactttcagaaagaagagggtgggatcagtacctgtttaaaaacagacccacagatggccctccaaattcattttataggtcattatacccaaagattatccaggatatagagactatagaatctaactggcggtgtggacgacacaacttgcagaggattcagtgccgctctgaaaatagtaaaggtgtctactgtttacagtacgatgatgaaaaaattatcagtggcctacgagataattctattaagatatgggataaaaccagcctggaatgtttgaaagtgttaacaggacacacaggctctgtcctctgtctgcagtatgatgagcgtgtcattgtaactggctcttcagattctacggtgagagtgtgggatgtgaacacgggtgaagttcttaacacattgatccaccacaatgaggctgtattgcacttacgcttcagcaatggactgatggtgacctgttccaaggaccgctccattgctgtgtgggacatggcttctgcgaccgacatcactttacgccgtgtcctggttggccaccgggctgccgtcaatgtagtagactttgacgacaagtacatcgtgtctgcctctggtgacaggaccatcaaagtctggagcacgagcacctgtgaatttgttcgtactctcaatgggcacaagcggggcattgcctgtctccagtacagggatcgcctggttgttagtggatcatcagataataccattaggctctgggatattgaatgtggtgcctgtttaagagtcctagagggacatgaagaattggtccgatgcatccggtttgataacaagaggattgtcagtggggcctatgatgggaaaattaaagtttgggacttgcaagctgctcttgaccctcgagccccagcaagcacattgtgtttgcgcacattggtggaacattctggacgtgtgtttcggctccagtttgatgagtttcagatcatcagcagctcccatgatgacactattttgatttgggatttcttaaatgtgcctcccagtgcccagaatgagacccgttctccctccagaacatacacttacatctctagataacagtctgcactttcacccgtttcagggttttctagtcttgaactactggctacgtggctaccaaatgcctaagggagttcgttcacagctgagttatgaagctggaattggttctagacgctgggtagatgcaaagcagcctaactcttcaagtaccgacatttctcacctctgattccggctctcctttgagaaggagaccttagcttccccggcttcaagtagaacagaagcccgtttccttccctcatcagtgaaaaaatctaatgtttcaaatgtaaattgttcatagaaaaggaacatagaatctgttttacagaagtaaatcgaccgtcaagagaagacttggcctctaatttatattgctttgcactttggtttgatattaagaaacagcattcttcttcagtgaaattttgggtgccaaacacctacccagaatgtccagggctttcattttcaaaagttagcattctccttttgaccgtccaagtcattatgaattctgacttgttgtattaggaacatgttggacagtggaaaattttctctggattgttttagtaatatttttgggattatacttcctttctgtaccaatttcttttaatttaaagaactataagtcagttatattatctaccaacaggtaatatagctctttcttttattaactgttctctgtcccccaaccatctcctgatatttggtagagtaacacctttatacgtgtgcttgcctcctaatttaaaatactgtattcgcatgtagatataatgtacataacagtttaacctcaaagttgctggagtcagggccccctgtgcttgagacactaatacagagtgtgttcgcacttagccatgggctgggctcaagaacctgatacctgggttgatgtggattacctagaacccttcctgcagtattcatacagtgtttttattttgttgttgtcattgcgtgtgtgtggtttgtgtgtgtttttaatgagaatcttgttttaaaatgtaatttctaaggtttaacaccaaaatgttttatttgttgtggagtatatattatacaatagagaggtaccttaaacattttttgttcttattctttttctcataagtactcctgagtacaagtggtcacctcccatagtattcatttggcttcgctgtcaaaaatcattattctgtgcagtcgtggccctgggaaggggaaataagaaggccctgttgacgggctgtcttggctctggaattcatgcatcctggccttgccaaggttctggcagggcctgctggtgtgttggagcctgcagggcaggtcaggctggttcagaggcccatgctgaggggtgggtgctctgaagtggagtgaagcctcaagcccatgaatgccaccccagtcatctctggtgtcagctgctgctgtggccccagcaggttctcaaagctcccaagtcctccctacgacacagcccaaatgtgtaaatggcactgttgccctgacagtgcatggaaaggacgttggcatccaattggcactccttctcccttattcaatattaggtttgatttgcccttcgccattgtttccaaagatcaaggaatgtcaataacattttaaaggaccaataaacagcctcctataaagtaaacctcttcccgtggaagcacactctactactaaagggaaggcccctgggctctgatttgtcctttgcattgagaacggtgtggggatcagtgtgtgtgtatgtgatttgtttattgagttggctttgcttttttagtttttcttttaaaaataaaatccttccttcccatgttactaaattaatttatgtttttgagaggttgagtctcaaagtgtaaacaataaacctccattcataaggtggatgttgtaagcttgatggtggttgtgaaagtgatttagctttgaccacttttcatcctacagcttcaatatcaaactggttaggaaagcccagggggaagggagggggcaggggaggaggcaattctgaatgaatgaatggattttttgttgtttttgcatgtttaatatagaagttcccctcgttccttgggagatgatggcctttgaatatgcagacaacctttgaattgtgcctactaaattatagcaggggactttggcacccaaggagttctgactttctgggattataatagtaattcccagccatactctggactttattttgctaaccataactgagcaaatgtaaattactgctatattaatgttttaaagcactgggatagtctaattctaacttgtaattaattatgtttgccaattatctgtttgaaataaatttgtgtctgaacagctattgaaactgttaaattgtacagatattattcatgacagctttgtactgtggaatgtgcttaataaaaaacaaaaaagtttgacttttgtccagtaaattgctaagtaatgtcaataaatcgagtatgggtattatgcagtgcacctaatctggcttcatgcaattgttacttcagctactgattcaaagccaatactcttaataaagtgttgcaatactctg

SEQ ID NO: 2722 - protein, 442 aa, Homo sapiens; identical to SEQ ID NO: 2720

SEQ ID NO: 2723 - DNA, 402905 bp, Mus musculus
  misc_feature (1)...(402905): n = A, C, G or T/U
catgctaaatgcccctgtgagtacagggggaccccagtacacatcagctttacaaagagtggcaggtgattgtaaactccatttggggatctatcagctcccgccactagggacaggagcttgatgaactctgccctggctcttcttgcttcttgcccatgagtgacatgccatgcctgctaactcctcatttgctgaggcaaatcacagttcttctccacttacagaggacccaggctatcccaacctggaaatgggggaagtagtattctgcgagaagagaaagacctaggattttggtggctatccctaatgactgtcatggtgagaaagaagaggaaaaggaaaaggaagagaaggaatgttagaaaggggaggggggagaggagggagaaatagaatagatcccaagttgccaaaaagtcagtgggtcgtggcattagtatgagccaaatttccagtcaagggtaataaaatctcatcagccatgctactaaacccctgagcacacgacttcaatgcaggtagagtcgcccacgtctctttctccatacgagagcatcccaagaaaaagaaacaagtacacacgaatttagctcgatccagcctgcggtggaatctctagaaatggatcatgggccagcagaaccggaagcacactgctctcccctgtggattgtcctgccttcttctctgaggagaaactacagagctatgacatggttctactgctcatctgcctttctagagcacggaaggtctaactggagcaggctgcaaagttcatattcgacaaacttaacacaggagtagttctttcatgagtcattctggaaagagacactgaattttaaaatattgtcttttagagacatgtctaacagcctgcctggcctgtgttccgacaaccctgatttgtttctcttacttgggtgccaccatttgcatgcacacatttgcttagcttaatcccaaagcttttaatgtgttagctgtgacaatgtgggttttttttttttttgagtggggaaaaactcagactagctcagaatctcccataattgaaaaaaaaaaaaaacagaattttgtactctccagagtaagaaacatttttatagtctccctttaaatctttcctggcaaaagtctacaaaggaagggaagggcaagaggcaaaacctactgatttactgtttagttctctcttgccctctccgccccttaaatgtttttttttttttaaatagaatatcagggtaatataaacactcagactatcgtaaagtaaacatgtcccattacgtaactcatgtccacaatgaaaatgaagatataaccacaaggtagtttcataataaattctatgtagctagtagattcattttgtttggtgtgttagttggtgactatcagtaattacgattttcgagctgtgagcccagtgctcacaaatgctgcatttgtgctggttgcagcgtggagcagtacatcgggtatgtagcatccacgtctctcctttgtcccttacagtaaactgacttttaagaataaggaggttggggagctggagcaatggctcactggttaaaagcacttgctgctcttgcaaaggacctaggtttggttctcagcacccacatgacagctgtctgtaacttcagtttcagggtatctgccttctgtgtcaggaggcatggttatggtgtatatacatacatgcaggtaagatgtgaatacacataaaatagaaataaatttaaaatatttttaatttaaaaaaaagatgaaggaaggatgactggcttggctagggtcccttgggtagagagtggtgtaatatgctttgttagcaatccttgcgtgcgatatgctgtaatatgctgtgtgcgatatactgtaatttgctgtgtgttatatgttgtaatatgctgtgtgtcatgtgttgtaatatgttgtgtgtgatacgctgcaatgtgctgtgtgttatatgtgctataatgtgctgtgtgcgatacactgtaatatgctctgtgataggctgtaatgtgctgtgtgttatatgctgtaatatgctgtgtgcaatacactgtaatattctatgtgtgatagactgtaatatgctgtgtgcaatacactgtaatgagctatgtgtgatagactgtaatatgctgtgtgagcaaacaaggtgcttgataatagcagtcctcttcctgtctccgttctccagagcaatgggtttacatgaatgctgactctgagccttgtctggccacatggcctgaggccatagagctgatgaagttggcaagacatagagctgctaaaggtgtgttctggcatcagatagactaacctgggctcatgaccttggctgggcactttagcccctctaacaatggcttcttcatgtaaataataataataataataataataataataataataataataataataaatagtcaaggcttggtatgtaggatgattaagtaagactgccttatgcttagcataaaacattggatcagagactccctcacacacgctcagcaataagttctagattgggttgatgttggaagaacaattttcgacattattgaggagttgcttgatcagggagggaagcgagactgtatttctgacagtgtgaactgagccttaggggaagctgaggaaaggtacccatgggctgtcttggagagagaggttcatttaggcaaccttggagattgaaccctgacgggtgggtagtccagaagtgttcaaggtgtgcctgggaaaatgaagaacttattaaccgaataaagaaatgttgagtgtgaaccagcattgggaatttataggctggggacctgcaaagtctccttctcgagcggcagtaccgcaagggagctaggggatcgcgaggtggcgctgtgactccaccttggaagacaattctggccagcaagtagcctgcactatggaatccgctcaggacttctttcttggtcgcgctggtcggcttggttgggtctttgtagcagccaagcaaatcaacagcgataaggggaatgaacacacaagcaaatctcccggaagcggtctctttttggacgccgcatcaataatcagaaactgtccgcgaggaaccattaagagcgcggaactgtccagcagggaccgttgcgctctcagttcgggtaatttgtgggtggaaattacacctggtctgcagggagctgagctgggcgcccacccccggcctgtggccatgccctgcgctcctccagcaggctccctcccacccgtaaggccaagggacctgcagtctcaccgctgcccttgacacctcgatttccacgcagcctgctgctttcgcctagctggactttgattcttaggatgtctttgcggcagttaacacacacaagtgcgggctcagactcgcgtgtacgatcttgctcggtacccaagttctgtgcttgcacactgtactcacataaactatgtcttcacgtgactctcatgcacactcgagatagaggtgcacctgtgcaccccttgggcccgcactgaagcacgcgcgctcacacggagccaagaatgcactgttcagaccctcaaataatgtagctgaggctcgctgattgaaaacccgtgtctgcattcacaccacaggcactttaaacaaagctaccaataaggaccaggaagcgcacagcgccaccgcgcaaatacccagaaagctgcccccaaaaaaggagcacacagtttttctcacttgggtatcctgaacccacctctcgaatgcgcttttcctttcttaactttcctttagggaaacaggcccttttctctcttaaatctttatagcccccccccccaactccctgcttttttttttctttcttccatctcagtttgttttaaaacttaagcagtgttaacttataaactgctggagagctcccttctaaaacccttggataccccaccccacctcctatgtggagaaagccagctttagtctcctaggcagataagcaaaattctcaaagtggggtaccagctgaactccacccctgggcggcaccagcctagagttctttttctggaacaccaccagctattttctctcaactcagaattacgtcgggttttagctatccgtgctcagaccaagactgaaccatgtccccccaacccacaattaaaacacatgctcagctgttctgatttctggcctgtagtggacatcgtggacatcggacatcatagcaaagtcctgtacttaaggtcgtttcattaggcaagcttagaccttagctgggactgggagaggacgtgacacagctagggctggagctggcacgtccctggggagtcctgtctgggaaggagaggggaaaggcacccacttacattacagcgcaaacttgttttcaaataatcatattcgttaagattttcctgaaactacactctcctgacttctgtgtggtttgtcctcaccgtgacaagcgccctctctctctttcactctgctccccttatctccctcccccgctatgtgtaaccaggactcagtgcacccaagaattctagtggtgttgaatagcccttagctgcctctgccgggtggaggtttgactccaaggttaagagcactggtccctgagacaatgtcttggtaactttattagcggtgtggcaggaacaagatttcattcgcttccgcttctcttaaaaaccctccgtttcctcacctgtacaatgggagtggactgtagtcgcgattgagtaatttcatgtccggtaaacctagcaacaaatgggatctatttattgtctgggacgatcccgggggaaacccgagagaggcctcagctcgttctgagaggggacagttttgtggaaccgcaccgcgcctggtcctacccacgttgactgcagtctctgcgacagagccttagagattgtttaatcgttctctacctcctgcgagtggctgtcaccctcttcttcagttttctagttggttccaagaaaaggagggttatcccagggacagagactggatgagcaaaggagggacttttccggagcgccgcgaggtcgcaagcccggatcagagtccggatttccggtggcgttctggcctgcggctcccacgctccccacagaggtgggtgaatgccacccggggacagaccagggtttagtgggcgcgtgggtcccagtgttcggcagtcccaacacgcatccgtggtatcttcccatcgccctcgcccttgcctggctgcaccccgctttcccaggactccaggtcgctacagactctaccgggttcccttgatagtggcctggcttcggcctgtcccagtcacacatctcagacgtctagtggcccgcaactccccagaagctctcagagggcctttgagcttaggcgctttgtcgcccacttccagttctacccagcactggatgaagagcccgttgtcccactggggtcgcagctacctctggcaagaaagctaaaaaaggtgagggggcagttccccgactgttgggtggggggtcctcaaaaagagaaaagtagaacacgcttcaggacaagtcccaagcctgcctcctgggggcagacaagcaaaagccatcccctcttttcttgggacattccttctgatcccagttccactcaattcaggggggtctttctttttactgaaaggcaagcaggggagcataattttacctgagcccctagaagttattgcatcattttatatgccccatgaaagggggtctgggtctacagaagttcgagatggcctgggtgccactggttgggcttgaagagcacagggggagggaattcttgggccctagcctcaacttcctccagcactgggggacctgagaagctgggcaaccccacttggtagtgtggaccctctgagaacctatccatgaccaccaccccatctctccagccacagctgaagaatctgccagaagttcgacaggaaaacatcattctagaagaaacatattcctttacagtggctccttccctgtctctttgtttggggagaaggcaagaatttttaaatgtctttaaatatagattcctaggtaccaatgccagaggctctggtcctgcagctgtgaaggaggcccaggtatctgaatgttcacacacacacacacacacacacacacacacacacacannnnnnnnnnnnnnnnnnnnnnnnnnnnnnnnnnnnnnnnnnnnnnnnnnnnnnnnnnnnnnnnnnnnnnnnnnnnnnnnnnnnnnnnnnnnnnnnnnnnnnnnnnnnnnnnnnnnnnnnnnnnnnnnnnnnnnnnnnnnnnnnnnnnnnnnnnnnnnnnnnnnnnnnnnnnnnnnnnnnnnnnnnnnnnnnnnnnnnnnnnnnnnnnnnnnnnnnnnnnnnnnnnnnnnnnnnnnnnnnnnnnnnnnnnnnnnnnnnnnnnnnnnnnnnnnnnnnnnnnnnnnnnnnnnnnnnnnnnnnnnnnnnnnnnnnnnnnnnncacttccttttggcttccttatacttaaacatttattattggatgcagaagccacgttaaaaggcaattcacccagatgaaaatctacaaatgcactttgcttaatgaaagtgaaatatgcccactatcccaggtgaggtgttggctgcctgtcaagccaaagggaattagggctatccaaagattcttgcctccctctctttaccaccatcactgccttctcctcctcctcccctttctctcctcctcttcttcctcctcctctggcttatggatataaaaattgcttcctttttagttaatttctggagaattgggctgctatagctgtcattctctgttccagtttctcttttctggatagtgggtttcatgtgctgactgacaccaggatcctttgtagccgacctccgacctcctctggaggactatgttctttgtgactcttgttaaccacaggcctcaatgtgactgtgtttctcctcattcgggcaatgatcctttcttgactgtgtgcatcactggaacatctaccccactacattcaacttttaatgttttggcttgattactgaaaagtggagactcaagcagttaagaagagttaagcctaagtcttaagctagggcttcctgggacccattgtagaagggtggccaatgcttcctgatgcccctaccttgaagggtcaccactgaacttaaggaaggggcttattctgtgtactcctgacgttaagaggatcctgggtctgggacatcagcacagcttggagctttgaaaaagtttaaagaggcccagcttcaattgtgcatttaaaatctatagagatggagaatgttctggtgtctaccagcatataactcatctttttacacacacacacacacacacacacacacacacacacacacacacacacagcacctactgtgtactagaaactctagtatatgctatgaggatcctggtggatcagatgatctctgctgagatggcttggaggagatggcattaattatgggaccagaaagaaatgtcccagcacatctgtagtctagataaatagtctgggagctatagtagataaagttatgtctgaagatagtggccatgcattcaacctgtagtcttggaatacacccacccactctttcatcacaaaggggctccactttcctccctggacagacccagcaaccagaatgcttgctggcctcaattgttccattcaacagggatgtgtgttccttcccgtcactgactgcaatacattttataaatcaaagggccaaggaagaccagcagaaaagggaatctggatttcaggcaaagaatttccccccaaggagtccttggcagccttggctgcatccaggatgtcctctaagagtaatgatacatttaccacgagcttattaaacgctgcaaccattttttttttaaatgatggggtaggcatattacccataaacctccactcatttcctccttagccataacacaaaggtcaataggcctgagatgggagacaagttaccctcttctccctccgtttcttcctgtcttccttcctccccttacattcttccaccttatccacttcctcttctccccgtttccctcccaacctctcatctctcttctctacatcccagtctctctccctatggctgtgatggaagttggttcaagcccccttcccctttaacagaaagaactttgtgtgccaaataaccaactaatcagagaaggcaacacccttgctgcagttgttaaagaaaaataaagctactttgcggagcaggagaagggactgaggatctgaagatatttagagtcgcaggctgcatagccccagagactcattcactcttagggacttctggagagtagtgaccgagtgaaaaccgcgcccaacagcattcgtgtctgggttagcaccagagttagaggcatttcagaagcctgctgaagactgagtctagaatgcccattcccttgcggtctactaaagtcgtattggttggggctttaggtttctctacctctcctgacacggagataatgtcttccgagtgccctcaagtctcgatctcgcgcacataaagttcatcccgccacccttgtttcagagtgaagagctggacacctgggatgggcatcctgccttttctgcctggtcagtccttttttcctccacgtttgcccccgaagtcccaggacaggcaagcaagggactaggcgtctgcccaaagagaacgcagtcagtacgcctccgtcgcgctcagggctcggaagggatgcttaagaactgccatggtgcataccccttcgactcaggatacctccatctccttccctctgccccctctctcgctctctaaggccacgctccttccagtttagacgctagagctcagagatcccttgctcgccactttgccgggaactttggcggctcccctgcgccacaaggagaaggatgttaatgagggagtgtggccaggctctgtgaacaagccagctcgggagctgcgattggctgtgataaggcggaaggatgacgttatgcaaagaaggggcgtgtctaggctgcgagggccccgcctccttccctttggggttagtgtgcctgtgtttagctctggggagagtcaaactggattccacagggagagcctgcaaatcacttctattttagcaaggagaaaacagaatctccatccagcagggtccacccctctctttctccctctcctctctttttctatctctttccctccccccttcctctttccctctctctccccttccccccccccctccggtgtatctgtctacagcaaccagcgtcctcatctacacgcacggaaaggaaagaaacatctttggttgagagaggaggaggaaaaaagagagagaaaaaaacttgcctggttgtggaaaatgacacttcaagtagccaagccggcttcgagagtcgtatctattgtttcttaaattgtcatcagggtggttttttttcttcctgcttcttcaagtgaaggtaccgctacaaaaggaaactccagcccctcctgttctccaacggcctgtgattactacaaaaagaaaaaaaaaaaggcaaaaaaaaaaaaaaaagcaaaaaaaaaaaaaaaaaaaaaaaaggaaaaaaaaagcacccaaactcaaaaccaaccaaccaaacaacccccaacagccaggcatatatctctgttttttcttaattttggtcttttcgttggattttccctttctttttttttcccctcgcccccctccttgttatcgctcagttttgagcgaaggtttacatttttaaaaattttgcttttcagcccgccttgatgtagcgcgagtctcatcgactcaaaaaaaaaaaaaaaaaaatctgtggttggcgtttttttttttttttcctttttttttttttcaaatattttcaaaggggaggagatttttccacaagaaaaggttgttttcatgtttgggatccaggaaagcatccaacggagtggaagcagtatgaaggaagagccgctgggcagcggcatgaacgcggtgcggacgtggatgcagggcgccggggtgctggacgccaacacagcggcgcagaggtgggtaccgctgggggaccgtggaggagaggccaccggctagcgggagagcccggagacggcggcgcggctacccggggcctggccacgcgagtgcgtctgccgctgcgctgcgctcgccgcccgagctccgcgctcctcggctgcgcagcactcgtcgccgggtggccagagatcagcgagctgctggagggagccgagcccaagctttgccggcactttccgcagccccatctgcgagtgttttcgttttgttttaacccagaagaggcgtctctgcagctcggtgttggatagctgcgcttttctgaccgcttgttttcttttctgtgtggttatatttttcccttttcctctccttctcttcgcttcctttcccctttatttcgcttcagttctttcctttttcttcttccctcttttcttttttcctacttaattttcttctctccccctttcttcctttctattttctaccttctttaattctttcctttccccctatctttcctttcccttttctaccttctttaattttttcttgtccttctccactcttttccccccttctttctcagtttcactcttcgtttttctcttctctttcctcacctggctctctcccccgtttctctctctctctctctctctctctctctctctctctctctctctctctccatttttcttcttggagtctcctcttatttctcctatctggttctttactctctcctctctccacttcttagccttcagtttttctcagtctgcctgtagaatagtgatttccaactttaattttcacatctcctaaaagccaccctcatccactgtcaccttggccttccccagtccctctcccactctccagatcctacactgagtgatttggaggccatgctcttggagaccaacttgaggaacttccctggacacacccagtgccctgtccaggggctcctagtcccaagtgagaaatggtaccttgcccttttcattgctggccaccacctgggcttcggggaaaactttgtgggcccaggctccattagacataaagggtgcagaaggggaatggggagtagttccatctttccatttttggggggaagggctagggacaactgtcctatactgtttccatccccatgagcacagggttgggagtggttggtagtgagagtgaattgggtaactaggctagaagcgaaagtgtgtgtgtgtgtgtgtgtgtgtgtgtgtgtgtgtgtgtgtgttgtccgatagtgtccggcagtttgggctgtcattgtggtgcccccgggcatcctattctccagtcccccgcggatcttctcagccaagaagccttggccctttggttttctggaatgtgtgaggaggatttctcagaatggcaaaactttggcaagacaggtcttttatttaaaaaaaaaattaaccaaacaacaacagtcacttacaacagtaaaacaagacgccccagttctctttcccatggcgatcgatcatttctaatagccgcgagtcccaatcagggacccttctccgcttgcttgccgtttgtgtagaaaattagcgtgctgaggtcgggtaccatcagctggccgaggctagggagtttcctggagggtggctgaggcagcgaacaacctagcatgccttcatgcatttccacctgcccacttacttgcgagatttggaggcgtagtcggagcctattcccgcgccctggccttcgaagtagtaaattgcgcactttctctttaaccccgtctcatttcacccacggtcacgtttcctctccacgcagcgcgtttcaagtggagtaaagattgtagcgtttcatctcacacccaaaacccaaacaaaacttccacacctctgagttctgatgacccgctgtctctggaaggggaggacagggacatgagtggcatttgtccggttcgtcagccgctcttgagctcctgatgggtcatggaaggagcccaggggatgttttgggagcagagaaggtgggtgttgggggggttcgctcgcgtgtcctgggtgacagggggatgcgggacacagtctggcttagccatctaactctgcgtctttggtcgcagcggggtgggtctggcccgggctcactttgagaagcagccgccttctaacctgcggaaatccaacttcttccacttcgtcctggccctctacgacagacagggccagcccgtggagattgagaggactgcctttgtggggttcgtggagaaggaaaaagtaagtgggcgcagcgcagtccctagtagtcccgggctcagaaagcaggcccaggcgccttggaagccgcctcccgtgtgggcaaaggtttgctcacactcctgtgagagtccccccccccttcccgcccccagctacttcccgccctggacgaatccaggctcctgggactcaaggtcctgcttcagaaagtgagcacggagcccccagggctggagagattccaggcaaaaaacgagcggaaccctacttgagtctagccttgggagcctgcagagtgcttgctctgaactatcagatcaggaatgcttgccccagatggcccaggctgcagtccttaggctctgggaagagtctcacccatgtgcacctcacagaaatttctggaatggtagagagaaagcagtttgggatgagggtggagaaaagattaagtttgccacagtttctgttactactggggttgactggctttacaggatgggggggggtccccatttgggaaaagttgccttgaagttggtgggtgcactcgctcatggagacctctctcctcgtttcttgtgtctttgggccttgctgcaaaccaggaagccaacagcgaaaagaccaataatgggatccactaccggctccagctcctctacagcaatggtgaggctcctgtcgggtcggtgccagcaccctggggctccgggtcagggcaaggggctcacggagctccaggtggacgaaacccccccagcgaagctcagccgtcagccaccctccaggtgaacaggcctctccgaaatttcattctaggaagtttctcacctgaggaggcagagggcggcttggtcagcccagggctgaccagaggccacttggccctgacaagaccacttggttgtcctctttcccccacttcttgaggcctgtgttgcttggccaaaattccaggtcgcttggctcctcggtttttttgaggggtggggagggtgggctggggagaggctgggagtggaggagctcctgatggatccaggcggcttcagaagggctctagcctgggaagggagagtggccaggttggggggcggggtccccacctcttttctagctccagtgcttggaggaggctggcttctaaggggagcatttgaactaggcccgcaaatcctttctggattctgggaaggagcgtcctggctcgcccctttctggacagcaggagttccccttggccttggacccttttgcgttgtttttgtttgttgctattgttatgtgtattgtggagttcttttttctttcagggcttatcccctctctcttaattttccttcctccctccacccccagggatacggacagaacaggatttctatgtgcgcctcatcgactccatgacaaaacaagtaagtttcttagaattccacgactctcgggtcaccaaatttgctgcagttcaaaaaccggttgagccactgagagatgactgggacccaaactttcaaagtcagggtgatcctggcaaagtgggagcagcgcaggctccccagatcatttctgctcgaggctcactgcctccttgggaaagccaggcctggtgattaaaacctgggggtgctgagtgaaggaaaaaggactgaacttcccctggcttggccaaggagccctaagggaagcgaaaggagcccgggagacaaccccctcccgggaggcagaatagactgaactaactagccaggccttctctaaggcccaggcctgaggaattggggggtaagaggcaattcaagggatggagctgatggaatttgcaaataaactccccacagattttttttttaaggcgatggtattggaaggtagtgttggaagtgggagcctacagttgttcaagagtattttgcaaaaaaaccctcctgctttggcctccaagtttggctgcgagccagacagcaagagctagctaaggctttctgtcttaaagggacatggactgcattttcttaagcttgccagcacacggtgtcaggcagtatacattaaggttgagttatgttttaaaagatacaattatgagcggagttggaagtaaggcttgacattttaatgaggcgcaggagggatatttttttttcatctatcctcttcttaattttaagaaaaaagtatagtttcagaatgaagtagctggttagctagttgaagtaacagaaacaaaaaagacagctttattgagaggatgaaagaattcaaaacaaaaagaaaagttatcatctattgtgcagcaagtagcagtgtagtgcagggttaagatgtgtttgtttgattgtcattttaaatattccttttaaaacaagaagaggtgttcttccttcactgggttagaaagtttggaattagggtgtccatgcacaattaaaaatagatttagatctgcctggctaacatgtgcaaaatacatattaataagctgttgggagtttgagatcttagcaagaagcatttaataacagctcatgttgataatcatgttcatatttattgtgacacaaataaatcatatggaattatggatatgaagtatgtttttaaagtgataagtgtctaaagaaattgatatcatgttatttcccttaagtattttcatctctggaagtttgtgtttatttcttagttgacagctcagagtaaattcccatttattgttctaattacagttattttcttcaattcttttgattgctacatagaataattttctttcctttggacattgaatttttaattttttttcttgctgagcagaagcacaaaagacttgatttagtgggtttttaatgttttctgatatcaaaacgaaatatatattaggtggaattttgtttttcaaaaacagtttttgatatgatgggtatcatttcttgtccttctagtcagagaggaatgaaaacagggaaggcagggggagaagaatgaaccctaacccctactcctcatgtattcatcaggatttactttcaaagggaaaaacatgcacaccaacaaccagacagggccaatgtggttctctaacactgaccactgaaatgcaggccgagctatgaaaagctctattccaaggagcataaaattggtacatgtttggagagattgtttccatttgatttaaatcttcccaaaactttaattcctacctccctaaacaaatagtgctactaagaattgatttttaaaaaatcaacaaactctctcatacaagaacagtagaagaattttttaaaatataaagcaatacggcaaatattttattaacagggccatagagccttcttttaaaaaaagctacagttgaaggtatcttttgctgtttgatagcatcataaattctatggggagggagagagggaaatggttcatttaaagaaaaataacaggtataagaaagtcatttggcatacattactaaaagtttaagttatagatacacgtagctatttagtctagtcaggagtcatctgaaaaaaacaaaaaacaaaaaacaaaaacaacacaaaaaaaaaccccaaacaattatctaagttggtagaaaagtatcaagacaaaaaatgttttaagatgtacccgtttgctttcagagtgattgggtaacctcccgttctataactttcactttgaaaggcaatctgtgttcattatccagttgcttgttgtttgatagcatgctgctaaagttttggaagtagttaccttcttatggacttagttaatatcatacactccaaaacagtagatagagacaccagaagccttattttcttcgctgcagagtcatgttcatgttcagcttcagaagtgatctccctgtagtttgaaattattttatgccacttaatgctcactctgacttgaactttctaaaagtgttggttctgtgtggttctatacagcagcccgtttaaccagaaggagtgaccaaggctggctgacaaagtggtaacattgccttctgtggagtgctttctgatgcgtttcagattttgatattcagagtgtggagcagactataactgtcaatgtctaagaacaccagagctggtggagggaatccctggccaccgtgagatcttgtctccgttgtttggtgaccctagccctttccatagtagacatgtgcctttgagcatgtgatgtcatacccttgactcacaagctggggttgacatttcgatggaatcgtcagccagtcacatgcaaaagtagctgggctgcagctgcacaggtcgttcctcattttgagtgcatctagcagtaacactgagacccagacagaattgtactcaatcaaccaagatgtctaaggatgacagtgtttcacaccttcctaaagtgtctcattagactcttctgaggaaggattcctaattttgggccctaccaggtacaatggaatctcattttaggagtgactgtagaaggctctgaggcccattctcctatccctcctttgtaaaacacagggtataaaatataaaaatttgaaaaacaaaacaaaacaacaaacaaatcaaaaccccatttaactagaaaagaaatgtctcgcttttgagaagggttgttcaaaaccaagtttagctggcctaaaaatagattgtttttgtgtcgttgctgtttttggtattctatcagtgagcatgcaagaacccttaggatcccaaagtttatggctaatgcatccagaaacagtgttaactgtagaaatgctcatggacccagttggggaagcctgaggcttaatctgtctcacttcaggtttgcatgagtgatttgagatgtgatatactctgtgggtcattcatcaacaaatctatctttatgtagttaataaacacaaaactagctcaatttcttagactcgttttcttgaagagtaagtttttcaagtgatacttagtaaggaaagaaaacccaatctcatgtcccctgctcccaaaacaaagtgttttgcctttatttcatctatttatttttgagaagggcaaacagaagtcacatcatgtttgtatgtataggtttaatggtagggtgggtggaggatgggtgtggaatggtgttgatacaatgggggcgcagggacagttaaagtgaaggttgtcagatttgtttcctagcttgctttctttatatatttactctggtgtttgcagtccttaaagttattgctttaactctctgtcacgcccattgattgtttcgttatatcctaccgtggctgcataggtttgattaactactctttcagctcactggtagagaaacactaatttttggcatatctataagttcctaaggaatttaccaggccagcaaagaggctctttcatatacccagggagccaaacaagagaggacagagcaggtttatgtcagggctatatttcaacagctttctgtctcctttggtaacatgtcaaaaatgcaggtgatttaaatttccttgcacatagaggaatgaagaagtttggaatttttatgcatgatcaggacctgtgtttgggaaaatgtaaactcatcacagtggaaaatgtgttgtttggagtctgggggtgaaaacaaagctgatggttttggagagcttgccggagccagatggcctagtacttccccagtctggcggcccaactgctccctcctggataatatacagccatttgttcggggatatttacgctagagctgtttccatgtgaatgtttgaacagcattaaaaacgaacatattagtcgggatgcatttatcgaactcgtatggctgtaccaacagcctgctatctgtgtgtttcttgctggggatgaagacggtttggatgtggacatgcgtgaattgttgacataggttttggagcagggaagattgggttttagctacaaattaaaatatatatgaatttagaatcgaattaatgggaataatggttgcacccaactcaaaggtctgctgtgaaaataaatagatccataactgtgaaggccttagaacagtgattgacatatattaagcatataataagttagctatttttgtgatcttattgttattgcctgactgagttgacaaagtcaattctgtctactaacgtactaaatgcagtaactatccaagtagaatatcatttattgcttctaggaaaaaatgtcatatggaattatttgaaatatttagtccccacccagccccaaggcatttgaataatagaagggcttttagatcttcaagacagaagagatgcaacagaaagtcccctgcatggggacgtgcttgccttttagttagggctgatgtaactgagcagcatagtgaatatgatatcgtgcctaactcagttctgaaaacgggcctgcttagctgctgagctgaaattacatctttgcaatttgttcgccagtagccaagctgctacttgaggcaaaatgagttttgattttactctactattaatgttagatttgctgtttgacacaattgtttatgaaatgtcagatttgtggtgttttctttggcatggcttaatttttaactagggttctttcacctactggaaactggactatattatgtagcactttttttttttaatgaaaggcagtggaagagggtgggtgaatgtagtaattactgtgcggtgtgtttatactatagacattattattggctcgcttcttagtaatttgctatcactgatagttttatttagaaggtactcctcttttggttgaagaaggcagtttttatatttatggccctttctctgaggtgacaaatagattttgctttttgttttgttttcagaaatagtatcattttcaaggttattgtttctatttatgtgggaaattcaagtttcttttacctctcctcttccttcttcttcccttcctttttattgcaaatcaggacaaattcctaatgagaaaaatgcatatgctcattgctcccttgaatgtggtgtgggacaggagttaaaactatcagaaaagtaaacaaaggcaagcaagctcaactctctgaacttctgtgggcatcccattgaagtaagatcccggtgtgtgctcagagtcattttctttctttctttctttttttcctttttcttttgctgtgcagtcttttttcccgaagtaagtttcagtgaacttttaagcctcagcaacattttcaaaaaaactaaggatgaactatgcttcaaagatgacttttaaaacagcagtaaccgggacaagcatgatacagggattgactgattttcaaagacttgcacacgttgactttaagcatttaaaacaaatggagttttctcttccgacagtaagacctgttgttcttggagattatgaaagttttaacacccatgttttttcatcttttgttaatcatatatataaaacaatacggttcaaaaaaaaaaaaaaaacccaatctgaaatcaagggaggatcagcaagaacgtgcattcgtttctgcctgcttgttattttctggtagaggctgacattcagagagagaggagctactgacctatcagaaagtcaggtctccaaataggaccggtttggacaacgtatcccagtagcaccagtttttgaaagttgcagtgaagttacttctgtttattctttcacatttcttcctgtccaagcatccctactgccttgaggcatttgtttgcccttggcaggattaatgtaaacagtattttccacttgatactgtgtaccttttgtttcgatggttataaagctcaacttgattcatcctcgattgattaattccaataatgcgtttttataatttctctccctctgcctaccattgtagcagcagctcccccatcctcacttctgataagcacattgatttatttaagccagtgttgtctttgtcgcgttctcagacagaccaccttcctcccaatgagcagacacatgatttactatggaggatgacaatgagcgttcttctcagggctccattgtctgtatcctaaaccagctgtctattaaaatggtctcacttaaaatagtcaaggctgtttatatgcccttgggatctcccagctgatccaacttcaaccaccgtgcctcaaaccccacagaagcatacatttaaattagtgagacaagctgaagccccctgtcccccaaaattggtattagaagatgcctatccttggtgggtgcagggtggggggaggttagcgtcaggatttgctcaactgtgagccagtcttgctgtgcgtgctaaatgtacaccgtagaaacgcttttagtagagaaagctggaggggaaagttccaggcaatagggaaaaaaggccaaagtgtgtcttaatgtcactgtggttctggggctacccaaataaatctatcatatctgcctgtacctggtcccatctgaatattaatctctcgacaaatatgtgctgtgtttgtatgtgcatgcatgcatgtgtgttttaataagtttaataagtcttttcagtgataagaaaactggttagaggctggaaggagttctgcctttgaattgcacaggaaagcttgctcccttaatgtgagtgcagtttactctagggacaggaattttatccttgctatcccatggtagactcccactctcttctactgcagaattttccagaagcaggtacctctttttctgaccctgtgccttgagaactcttcttattctatccaggcacagggaggggaaaggcagagggagagggaaggcagaaacctcagattccagatctccccagagttcttaattatttctgagtaaatccgaactcttggtttcatttttctatgcttgatttggagaaagattctctgttttgactccaccgccagaagcaaagtggtagctcggtatttggtaaagagatgcattatggagggactgggcctttaacaagtgatgttcagttaccaaggagaaaacacaggacttctgggagtccctgtcatccattgcctgggggagtcctcagtggatttgccttgaagcttattattaactggatattatcatggcctcattcatttcaactagcagccttggtaataatgatgtttatcccatctagaaagttccaaacggagatcttatgtaattgatatgcctgccacgccctccccataacattgtttcttctctcctgccacctccctgtaccagcatagaagattttttagacctggaaactgactaatcgattattattattactattactattactattattattattattattattattattattattttagtttagcaaggcaaacactgaagctgacacagaggttatgtagagttttaggagaacatagagctgatttagtgataataggagttagcagaaatgcgtcatttgaattttttagcactagacttgagatccaatcagtaatttactgtgttttctttcttcctttcttgaatttttaaaaaaaaaacagtgatggcagaaaatagaagagacacatacatgtttttaaaaagtattaaaattatttattatttagattgtgtgctcgagtgcacacgcatgctcatatatgtgtgagggctcctgaatgctgcagtgtatgtgtggaggtcaaaggacaattgttggttctttcctttcacagtgttaattgatctcaaggctttttggcagacatctttaccttctgagccattccacttgcatcaatttttggttttcagaatatttttaattaatgcattttcttgaataaagcaacttttagggcatttgaagaagccttttaagaatattggcaaaagggccagtgagaaggtttagacggtaaaggggcttgctgagcaagcctggagacctgagttcagttctcatctccacatgatggaaagagagagaaccaactcctgaaatttgttctttgatcttatacacaccacacaccacacacacacacacacacacacacacacacacacacaaacactcacaacacacaaacactcacaacacacacacactcacaacacacaatggcattagccctcccaatttgataaacaaatataataagaataaaggaagagttatgtgttcacactaagactagtgacgaaagatttgacacatcaaaggactttaacacggtgcaagttattgccccagagcacagtgataagatgtaaccttatattgtgagaagctagcctgtggtcactggtagatggtgagcatcactctaacagaatgagtcagagtatatgctgttcctaaacctgtggataaggagaacctggttcggagggaattcagcatcgctctgtgctgttgtcccaccttgaagtctaagactttcatatgagctggagaaccagaatagaacccaaacggaaggatattctacaaagtaactgtcctgtatttgcaacaatgtcaatgccatgaaccacaacgactggaggatattcggaatgaaaggagacatgacagctgagcgcggtgattagcacaggattttctttcgctgtaaaggacattattaggtaattggtaaatctcaataaggtctggagattagattattctattgtatcaatgctaattttctgatttagataattgtgctgcgattatgcatgaaaaagccttgttttcaggaaatgcatgcagagatattgaggataaatctgcaatttgctaaaaagtgatttagggggaaaaagaaaaataggaagcaaatttagtaaaatgcaggcgtttgaggaatctgggcaatgaatatccatcctgggcctctaagcatgttctttcaaccattttagaagtctacagttgaagtaaaaacaatttatttatttttaaaatacaaggttatgatgagctagccataaaaggtaggtagttttgatagaccaatgttagggatgtgtgcttttctttttttccttcattttaatttgttgtaaagttagctttgctctgtgtctagatactgtaaactgtaatcaggtcatgacccagggatctgtctacactgggtcttaagtcacggtggttctgtctccaagttcaaaaccatggtgcatgagaatgaccagttaggcacagaagtccttttatgaaccacataataataagaataacctctggttaatttaaatagtttttgtcactaagaaactgagggttctgtgaatgtgtgaaagtaattttattaacaatttgaagctgtgttatattagtattatgcagtgatacagtgttaagtgagttaaatgtatgctgatgcagaagcccagtctaccaatagtgttgtgtgtctctttggctgggacagtgacctgtaggtccatgagcaagcttgaggttttggggaacttggtgggtgtcccaaagcaaaatgtgattgtgttgcaaaaaggaaaagagagcaaagcgcccgtggctggcggttgagggaatccagattttgagagtgagatgtaattctctgcttaaggagctgactctgtgatttcacccccccacacagcatatgctggcaagggttcccttctgggcgggtgtacaccctgcaaaagcgcttgctctcagcctctcggtaggaagagggggtttcccctgatggaatcgcttcagaaatgactttgacgatgcatagacatccagctttccccatacccatttcctgctactttccagtagaacacgctgggagcagtgcggaagcaaatgtacgtggctggccgatcaaacgcacatggcctctctccatttgaaatacaaaatattgcaacctcttcagccttctggatctcccctctttattgattagacttatttttattctgtattgaaaagagaattatggttgtcttgacaacagatgcctatcacatgctttggtccaaagatgtgcataatgaggtggctgatagggcagagaggatcagatcccattccactcaatttgggctgatcctgaccaatgtgtcctgaaataatcagcccagtgaggctttttgctcctaaaagttaattggcccccagcaggggcgaggcagtgaagaacgggattgttatacataaccctctgctacttgtttctatttttagctaaaaacatgcctttactttcaggccatagtgtatgaaggccaagacaagaaccctgaaatgtgccgagtattgctcacacacgagatcatgtgcaggtaagaaatttcctctctctttctctctctgaagtaaagatgaatttggatctcaagtctaggtgaaatcagttccattggggggtggggaatatgtttattttgcgtttggtaaatggtctggaagaattatcagacacatttggtaatttggtcaaggatcatgtcggttctcagttgtttattacatttcatcttgggagacattagtttgcgttttttggtacctcactgttcatggccacagagcagcaacctccctcttccttcgcagtggagtgacatagagtataatttcctttttggtgacatttgcactcatctgcatgcttagtaaaatatgagttctcttgaagtcagcagaggcttctgttgggggcaacttgaaagtcatacttcctcctttgagttctgcttactataacaccccatacctgagcctaaactcatctctgtctctttctgtctctgtctctctctgtctcttcttttctcctgtagatggtcttttagtaatcctgttcatatctgagcatgaagctaatatttcttgggggtggtttgctttggggttttgggggaaggaaaatgaaaaggagaccacaaaaggtctaataattcatgttcctcacagatgaatctctttctgctgtgatcatgctgaagtgtcatctgagaccacagtgccccttggtggcctcagccaggcctatgcagcagagggataagggcagccttttaacttacactcttattccttgtaaaataacccagcattttgctctcaacatctcccaagtaattagataaagcagggagatgccacacttgacatcagaggagagttcctaattgctttgttagctgagcagcctctctctggcacaatgtgtgtttggctggtgaatgtcactgaccagtctacatgggtcttcagctgccttctcagcatgggaagcccttaccggccactcatggactcttggggcaaacaatcttacaactctacaggtggaaaaagactcaaaagtgtgttgtgttttccgagtgacatcccaaacattaacatttgtatctataaaaattctgctttttttctttttagaaatacttctgatttatagttctaagatatataagcgcttcacacattttcacttcagtgatttataaaacctgttaattattctaaaaaccaggttgtttttttttttcctccagacttaagacagtagtggaacactcctaaacagggtggaatttcttcatcagtagaacgagttagttttaccctgtgtgtatgacctggatataatctggctgagtggcacctttttagaaggaaaggagcaagccccggtttaaaaaatgtaacctaagtaaatcgtaacctcgtctgtgttactgttcccccaaccacagctctatcattttagccttctacaattaacacgccattagactgccctctccatgtagagctgcgtgtggctgtagcagaacaggaaacaggaagatggatttcaggaacaggccaagcactagctatacatcatcgatttgcatttcgtatctgcatatgtttggattatgctggagagaattctattcctgaactacttagagatatattatgcctctcatgcgcagggcccccctctattaatgcagtttatattttccttgtttttaaaattcattggtccaaagtgctttattatgctggttggtgtgctttactgctcgcgttctctctatttttcagaaacataaaaatagcaaaaaataaaattctcaagccatggaaggcaaatgacgctgtttgtaccgagtggctaagagggaaagccatattccaaatgtcatcttgctaatgttacagattactgctctctccggctgcctatagatgtggaaggggtactgtttgtttacaggctaccatgaccccattacacaaacctgtcatctattgtgtggctaacagtcttttaaattgcaaatctgatgctctttagggggctttaggaaaaaaaaaattctcactttccataccatcctatttctcttgatttcttgcctgttgtaagtggaagttgggatgtgctgaatttgcaccaggggtgcaaatgcagcctcaattataagcataaaattagaatctgttcaccattaatcagcctggctaattgctatgcaccaccattagccatatggtgtgaaagacagcttgctctccccaagataaaatttcttcattgcagacatgaaatagtgaaggccctggattttaaaatagcttgttttagatatttaatttctaaacaactttctgcagtgctttctgtcaaagctaacggcacaataaaactttgcgttgatgtcacaaaagctgtatgtttatagtacactggctatgatgaaggagacagaatttcgatccacaagaaagggcttggtgcgttctgttcattacaggcaaatggaagggaaaaggaaacgataagcaagggacagtcctgtctcaggtgctgtaaattaagaagaagggggaggagaaggagagagagagaaaaaaaacattgtgttttgtggagaaggtgaccccattgtgtgacatggctaaagaaattaccatcattagtttataattgttgacactgagagaaaaactctctttgatttgaagatgcagagcacttctgcctttggtgacttagaatatcacaccagtcatttatggttgtgaagttctacagataatatggctctatgaatcctttcatttatttttttaagagtgggattctataaggggtttgcttatatgagtaccctaacttctgtgtttcaatgcaaatgaaaactggggactcagcttagtagggggacttgatacccagctctccagcagacttcaggcggcaggagttcttcatttccagtacccagggagatggcaggccagaggcacctatctaaggaaggtgcttgcttgcttgcttgcttgcttgcttgcttgctttatttatttatttaacataagtacactgtagctgacttcagacgcaccagaagagagagtcagatctcattatggatggttgtgaaccaccatgtggttgctgggatttgaactcatgacctttggaagagcagttgttgctcttaaccattgagccatctctctaacccccaggttcttgcttattttattttgcaaaagaaccttgaaactctcaaggctagcctgcttatgtgatagggtgggtttttgtgttttttccttacttgtttgcaggtttagtctgattgcctccactcagttatgtgtggctttcccagggaagcacctctggccattggcccaagtcataaccccttataagttgtccagggtaccgggtgcttttaactccataggacaccctgcctttgcaatgacacctactctctgtttttattcagccaagccctttaaaaggcaggaagtgactcagtggactccaggcttcagctgtcccatttgtgaaatggggttttaaatgttatctcctagggtggtagtgaaggttaaacgctatagtccctataaattcttaccttgatgcttggcagagtcagaatggaaatactgttatgacttgaagcagtattaatagaagcagtagtagagaactcatctgtgcctggccaagtttggtactttttggctctaagtagctgatggtaagaaagcattgaagggaggtttggtgtctatcaaacctggatgtacctggttccctacagttgtggtgatgatgtatctttattgttagtaccttctatgtgcaaagccttgtggaatttagagtaaggaaatttcatgccatagtgggaaagcttgaagatggaagctttgagcagctaatgagacgtcactgggcaaagggtttgatgtgatggtgggtaaaggactctgaggatagagaggagggaggaaatatttgtaggtgagtcatatcagtgtgtgtgtgtgtgtgtgtgtgtgtgtgtgtgtgagagagagagagagagagagagagagagagagagagagagagagagagagagaagatgggagagggattttagaggccacctaaagaagtgtttgtggtctaagcagggttgctctgtgaaggtttacagcagagcagtcttgtggcctggagctggcgagagggacttggtgaaagataaccagcttcaaactctgcttctcaaaggcaagaactgaggctctgtggaagatgagtttgagaattcagaataagaagagaggactcaatgattccattcttgagaggaatgctcatattgaataagaaggtcacactgtcgaattagaaagaactttgagtatatagggttccaagaatgaaaggaaggggggcaggtcaaggtggagaaatcaaccacaggaattttagggccaatgagacatggatgggcacaaagagaaaaagccccaggtcactggtgactcacgaagtagagtcatgtaggcaccctaagtctaatctcaggtttttttgttttttgttttttggtttttttttttttgaggcagggtttctctgtgtagccctggctgtcctggaactcactctgtagaccaggctggcctcgaactcagaaatctgcctgcctctgcctcccaagtgctgggattaaaggcctgcgccacccctgtccggctttaatctcagtttttataggcccacatggcatgaagtactggctactcttacagtaagaatattgattgggagagaaatgaactctagataaaggaaagaaaactacacaatgcttacaaagatggagcgagtcaatcaggagaaaagagtgccaggtattaaccccagcagtacacaaggccatgagtgcccagtcaaggagacaacaggattcagcacttgaaggttgagtgttctgaagacaggcaaccttaggtgtgagaggatggcagaggccagtggagtctatgtagcagattccttcagaacttatctccttcacaggtattaaccagagtgccctggtaatttacatagctcattctgtagccacttaggatgaatagggcaggaatcgtaatttctactgggatgctcagtttagcagggagtggttgcacttctctgtaattcctgcacctgggaggcagaggcagaggcagaggcagaggcagaggcagaggcagaggcagaggcagaggcagaggcagaggcagaggcagaggcagaggcagaggcagaggcagaggcagaggcagaggcagaggcagaggcagaggcagaggcagaggcagaggcagaggcagaggcagaggcatctctgtaagattgagctagcctgtgttggatagtgagttctgacccaatcagagctatgtaacaagactttttttcctatatattttattattcattcattcattcattcattcattcattcagtttctatcaagtccccctccctcttttcctcccagtcccaccctcacaaccccttccctccattacccactctccttctcctcagttcttaattgttcccacccaaacggcccatgtctccagtggcaagaggctctacttacagtgcttgagatgaggatctgcagactccaaggctagggagcattcagatgtttcctgctctgatttatgagcttgtgagtcagctcgctagaaatctgccacctgtgttagacgttaagcgagggactcctaaatctgcctttccccgcagtgtgcagtggagatacatggacctgctggtgaaaaggttgctgttcaagtctccagtacacatagcccacaccaggtgtggggggacctactgctgtgactggccacatggctgtcctgtcatttgggttgcagattaaaaagggatgcaaagcaggcacctgcctgttttttttttggggggggggtggatcttgatcttgggcaaatcaaatcagggaaatccaagtcctctcagtagctgcctgctgtaggaaacatgtgccgagcccatgcaggcacagatggcaggagactgagagatgctatgtgagtggatgggggcttcaggcatgcccactctgtttgctttgaccaacatggtttcttttcctggtaagtgcttcaatggtatcatttatggggttgcttcagtataagccctcttctgcctagacattagggattttgttctttcagctcgtcccttccagttaatgcctcccatcttggatatagcagagttcagtgcccatctctccttgtttaactttagtggacagaagtgaatcaggtctgactgaggtggaagaattatcacagtagatagtcataggtttgaagggcagctccagtcattcgtttgtttattttagtcattttatttttattattttttattcactttacatccagatgatccccctcccagtcctcctttagcagtccctctccccccttttcctctgagaggatagagtccccccagtatgctcccccaatatcaagtccctgcagggctagctttatcctctcccactgaggccagacaaggtagcctatttaggggaatgtagtccacagacaggcagcagctttagggatagcccccactgcagttgttgggggaataccatgaagagtgagctacatgtctgctacatatgtagaggcctaggccctgtccttgtatgctctttagttggtggtttagtctctgagagcccctaaggatccaggttagttgactattgttcttcctgtgcagttcccatcccctgcctgaaggacagttctttgctctgcttggctctgggaagctactggttagtggatctcatctcagctttgagactggagttttgttcctaggaacccacgtggtagaaaggaagactcaactcttgcaggttgtcctctgatctccacatgtacgcagaggtgtatgtgcacctacacacagagataaataaataagcaaagatgtagagaaaagtgtaataaaactataaataaatcgtccttctgcctgagatcggcttttatttctcttagtagggaagtgtccttgagacacaaagcagaacaccaggaagaacagaagtgagggtgcccctccctctatccaccgtctcctctaggcttttctagattaatctttaatgttcttaggaatttattcacaagtcaacttttgaaatcctacttcttttagttgcctttgctggggctggggggggggcggcgctaagagtttatgtatctgtctttgtaaaagtcaagcatgaaggatagataataaaattagacaacgaataaatgtgtagttgaatgtggaagtacgaagagaccaggcagaagctacagagctttggggtggccaagcactgaagaactttgttaagcagtggagatttaagtgaattgtgggagtacaccaaacttatgaacatttctctctctcttctcttccttctccttcactcactcttccagaagtggattcatactgtccgtaccactttgtaacttgatttcttaattcatactataatgtagacttcttccatgaactatgtcaactgtaaccttcattctttttagtgtacagaattccatgaatataggtgtacatacacacctttgcacttccagctacatccccacatgtattgcatgtgcacacatgtctctgcaatctttgtcaattttcactgatagggggaaaatacatgttggaaactaattaagagaggaaggatttcctttggctcatttttcaaagtgttcagtagaaggtccctgtctgtttctgggactgtggtggagagaagctgatcatggctcatggcaaggtaccaccctaagcacatgcctcagagacatacttcctccagttagcatctcaaaaacacctctagaagctccaaaaatagtgatccagcctgagacatagacttcctaggagcctgtgaggggcattgcatggccacatcttaacttgctctatatctcagggggatgatattgtaggtattggtgtgtttcagggaatgccaactatatggtgtggcaatgtgacccaaaatacagaaacctgtttaagctagttttaacattttgtatatacctttctttctgtgtgtagtgacttctatcatttcctttttctgttttcttgactgtgtctattttatttccattctgtatttttcacatgcctatgtctgagcaccttggggtcacagcagatagacctagtttaatttctcttaccatcagggcatctgtgctgtggagatgaggactatacataagctgaaatacgtctctgaggccaagaatgacatgtggaggaggcgcttttgtgtgggggctgggatagagtacagaatgcatgtccagagagtcagctttactatttttttaatctgtgtgtctccccagttcagcatatttattcataaagttgtccattaacattcacccactcattcaatcatttgttcactgaatcatttaatcctgagttctgatagtctagcttaattaagctttatatatgccatggacagtttctatgttcatggcacatacgaattagcagaatggggatgtggaatggtgaaaattcccaaccaaaatgcctgaaaacatacataacaggttgaacttcattgtaggaactgtctaagagaaaaacagcccaatttagactaagggtgaagtgtcaggtaagccaggggagctacactgacttctaagaggcaagggaaagtggctgaagagggaagggcaggaagagctgcccataagaggcttgcctggacctgaggtctgatggagcatgtcgtgttggagggatcacaacaggcccatgagggttgagcttggcaagctggcaagaaagggtggcaggtcagtggcctggcactgtgccatgccatggatttattcatagtgcagtgggaagctgttcaaaggtcttagacaacgaaatggcatggtcccctggacactgcaaacagatcagggagatgggacagatctattagatggagtcaaagtggagacagcaagatcaagggggaggctttgtggtactcccagaaataaataaaagtggctctgttgaagatagtgatgatgggtagggagagaagccatagactcaagggatgggcccttacccatagttagcatcaagtaagctggaggagttcccgaggacatttcacccaggaaggactgcagtgagggtagacccaccaagggtctctctctctctctctctctctctctctgtgtgtgtgtgtgtgtgtgtgtgtgtgtgtgtgtgagacattagaatgtatgtgttaaggcaggagaaaagtatgtattttacttacagtatggagtggagtccagctgctgagtaaccttccagcctttctcattgatcaagcatggttttccacagtatagtcccgggaggagagcagccatggggcaaaatgttacttacagttgtacttcagatgcacagtttttggctgagggtgggtattttctcaaatcatgacagtttcagctgggggttatatatctcaggcagaatccctaagtttaacccctaatactgtagcattaaagtgggcgcacacctataatcacacccagcactgaggggttggaggggggaggatcagaatttcaggacttatccttagctacatagcaaccttgaggtcactcttggatacataagactctgtcttgaaagagaaaaaaatacatgattttttatccacctttttgaaacaccttgggtttcttttttttttttttaaaacctggcagtcttagggtcataacaaactaggatgtgtgtaataggacttgatttggatgttcttcctgtgtcctaatgtttatagtcagggttgtgctagccagtggatccattgtccctaattctttcaggtgctggccaccaaagccaggggactgagaacagactcttcactttttctgttcaccttctccattctttgcattattgtggattgttatctttaatctcaagacaacgttcaaaagcaaacaaaacagtcactgtgctgggatttttcatagtcccagggttgtggttgaaggaagtgccacccatcaaaaagagaataaaaaaaaaaaaagaatccatttaatacagaatgactggggaggggatcactcatcggtatcattgacgccttccacacaattagtgtgctcttgagggaagaatgtttgatccacccacgaccctgaatattctcattggctagatgtaagaagacggtgcttcacattgaactctgccaatacttgtagtgaaggagagaccccatcttagattgtatgcctgcttctgggagggcccctctccctctcctgtcctctggacagggggaggttaagcctggccattaacccctaagtgacccaaatagagttttctgtccctaggatccgttgattgccaggtatggctttgtggtaattctagcatttgcaacctagcaatccgaaccttctgtctgcttcaatgatgattttacattgtaatggttggtgctaaatcctttctgctctttctccatagccgctgttgtgacaagaaaagctgtggcaaccgaaatgagactccctcagatccagtgataattgacaggtagggaccactcttctttcactggcgtcttagtcctcattataatgaaacacctgctttgtgtcgctcacaggcgagcgttggggacgcatggggctgaagtttgcctgttggtcctgacttacactgcgccggccgccgagagattgtgattttggggaaagccatatggaatgtcctttggaggcccttttctcggatggctctggttttgtgtcggacgagtgcccataaagtaatatatatgcgtgcgttcactcctcactctctgtggctcagtcctcatgccgtaccaggaagcttcagaaataaaataataatagttagtgatttatgaaatgcggttgggtgcttataaatatttaacttttatttgaaaaatgtttgaatcattatcacttttagctacagtaattctgttggacgtaatccatctacattttaaggttttatttatgcataaaagcagtttaaagagatctgtgaacgacgattttcctactgttatttccgggcttgattgcagctcccacagtactgtaagttgattaatttatcctgcttgtcttaattattgtgtttttaaacagatccatattactaatcttacatgaccgagtaaatcactgtagagcaatacatctgtttcagtctgccagggcagttttgagttggtgtgcacatattatgcagtggcatcccaaatattcattttacattttaattattgaaattcattgtatggaaacatgtatgataaaccactcgttacatagcattactcattggaagttaaatggcctggaagctttatagagactgtcagttgtcagctaggaaaagaactagcgtcatctactcactggggctgtgtgtgtgtgtgtgtgtgtgtgtgtgtgtgtgtgtgtgtgtgtgtgtgtatgagtcttcattcaaataaggcagattccttcattgaggaaatctgcaaccaaatgagcgtccctttctgagctttggcaatgctgtcttaggcagcagcaagacaaagatgtgacgggagcaatctgtcaaattctttatgtttttaacttttggtttatcccttttcagataaagaaaccaaggcttctagtttgttcatcttagtttctatcaaaatagtgttggttatgccctcttcaagttcttagctcaacatttatctccaagtagccttgccaaagttttcactttattccagtcagaatattcatgaaagaagtcatgaaaatatatgtatatatttgatgtggcaataatgtcttgatcccaagttaaaagtggcaaaagttcgacgtacagtgatgttgtctggtatccactgtgaggatggtgtgctcatctgtgagagcagaaatggcattcatacattgtattttctgctacgttgctgtcatttgtgtatgcctttcagaacacggctttctttttgaagccagtatttcttactcttgcattaaaaagtaaacatctcatcaaagagccagcctgaacaccccccaaactttgaactcatgaggagtctgtggtgtctaatcgtctttttcgatttacgtgatgacaagggcctactgtgtcacctgccatgaaaacaacttttgcttgtgaatgggttaagctttaaagttcttcattgggttttaagctgcgactctgatgcaggaggctgataggactgtggtttgaataacatctgattttgacctgttcctgtgggttgcgatggcaggagaaacttgactcagcagcgctgtaattagcccgccccatgtttttgaaacaggattgtgttacctggattgcattagtgtggcttctattgtcgcccgccttgcatctgtcccagtagggtacttaaaaccgttttcttggctgggggagttcaaacaatttaggcaaaaataagtctgcactttatgctgttggtggttttggagatattattcatgacatctatatgacagctatacttttcatcccccccgacccccacccctgttttggttagacaaagtaaaagccctatacagctaattttatttctttaaggaaagaacactttaaaaatggctgagacatcctggatgtgtttaagtcccaatatacattgatttgatggtgtttgccattctctggcaacgagaccagttgattggtagacaacgagaccagttgataggcagagctcccagtcggccatttttattggtatgtgagttctcaaagttatttgcctcttcattttgccaaagattaaaaaaaaaaaaaaccatccacttttgtccctgcctatatgtgaagtttccccttctgaaagcaaggcatgaaacatgctagaatgtcggcacggaaagactccaaaattgctgtaaagggatggggggatatgatggtaacagtgtttggatttcagtttccaatttcattctgtgttgctgattgtatgatatctgttatgtgcttaggggttgatttgctttcagatttatggatacgagtgtctgagcctgtggtacccagtagcaacagtcaggtttttcttttctttttctttctttcttttctttttctttctttcttttctttttaaataatatgcatactgtatgcaacctaaggcagaggtatgggctgtggttaggagttaccatagctttaacacacagccacctcttttcaaaaactagtaagtttgagttccctccgcttgaccttcagaatttagaagaaccctgctattttttttatcagtcaaaagactttttagcagtgattattcaggaaagctatttatagtgtagatggaagaggctttctggtcacagagaagtggtgcagggccaggcatttctgtgttaaaacttgtctacgttatttgttgccagtgatttgaagacctccatttggcaaattgtgtgtgtgtgtgtgtgtgtgtgtgtgtgtgtgtgtgtgtgtgtgtatgtgtgtgtgagcgtgtgtaatgaaattaacaaaaccagcagtaagacagacaagtttctatttccttccagtggcatgcaacaaagtaagaaaatatgacccaaattacttttttttcagtcatgacaatttgtcaaaatgcttattggaaaattgctgtgtggtgtagaagggggcatctggaggcgactgttaggttacatttctgttcaatgccaaatagcttgattaagaatcataaaaccccagcctgtgcccaatgatccaggtatttgggctgtgcagacatgggaaaagtcaaatgtgttatgttcaatagctgatgaacaggaactaacaacagcaaatttcattatctttgagataaagggctatgtgaggtaattattgttaaagtaaaaaagcaaaaaaatgacttccagttattgaattaaggtggggattgatttaacattcacgcacgaactcagatttgaatttaaaaggtttgcaataaaactcctgtttggaaattgaatacattgtagttttattactacagtggatatccctgtgtcctaaccttctcccttggagttatcttagttcaataaataaaacctcattagactattcccatttcaacgagtttattaaattttgcaggagtaattagcataagctgtgctaatttttctggaagactaatgagggaggttcttaattaggtttactttgtaggaatcagaagagaggataaaagaggacaaaagtcacatagggtcctctgaattgggaacccactttctcagaatccacacaacaacttctgtttatctatggaagcttcattatgtgccctttaactgtacagattgaaagtaaagacttttattctgtatttagtttgaattagaacccttccttagctaagagaaaaattattttcctagactgtcttggagtggtgagatggatgaatacagatggccttacaaaaacatctctttcttcaaattttaccatagagttcctttcacatggagtgctgatgcttctggctagactacctagggacagtgtgtcagttaaaatccagtcctttcgggaatatggataatatggtttaaataacctgcaaatcttgagtcccccagagctagtatttaaaactgagactttttttttaaaggcccatcagcacacatactattctaaatgacttgcgtttactggttgccacagtcttaccttgtctgtctttcccacttggaagaatcttggcttccatgcttagagctaagagagacagaccacagcgacatgaagaggatatatgacttttgggatacaaaatcccagcctgtttggaattgttcgtgccacacttatccaaagctctcctaaaaagaagaaaaatgtagtattcttctacatctaggtcatttaggtaatatcaactggcttcgcaatgattataatgtaaaatggaatagtcagccaggaaataggtagaatgctcattttatctgccataggtcactcaaatagaagatcttggccatgttcagatagaaatttttattgaaggtctatgttttaatctgagaggtcagggtgctgaggtcagacttgtaggagagcattgttaggtcaccatcaagttagcttcttgaataagttgtgaacatcagcctgactgggaaaggacagtgacatgtagactcaggtcacttgtaggcagtgtttaccattggacatgtgtgagagaatttattcccttgaatttctgaagtcatatgggatcttctagcaaatacccccgatctgtcttatcatttatggtaaatcctcaaatccatgcaaaatgctgtctgtctctgtctaataacaatgaagtccttcacttagatcatttctcaacccgcgggtctcgattccattggtggggagtctggtgcccctttcacaagggttgcgtaagaccatcagaaaacacagatatttacattatgcttcacaacaatagccaaattacagtagtaattttattgaagtagcaatgacgtaattttatggttgggggtcaccacaacacaaggaactaaagggttgcagcattaggaaggttgagaaccaatgccttgggtgaacatgaagatatgctcccaaatgagacgcttagccaggttcatggcttcagtttactgctctttcaagccgtatcttcctcttcattctgtcatttggaagggccaacgagtgagcagagaatttcagcacagcatgcaagctgctgcgtaggtcaccaagaaccagaggtgcaaatgcatttctcggagttctgagaaaccttccatgccactcaattccgtaactcttgactgttcagttaaaactgaaggaagaggacttcattctccaaagctgccctaggcaggataattgctgtccttctggctgctctgagaggcttagaccttttcacagtggagagtcagcatgggtacggagcatgaatttacagttgttctctagccctagtgcatttaaagatttgttttctcagtgggaattcacatgtgattattagcagtgagacttatgtgagcaaatatcattctcaattttacatttgtcacatggtagcattctgaggatgagctgagccctgaacacttgggcatggtttgctactgtgataaaaaaaaaatcactaatacaataagctaatagcagtctagattccatttactaccagctattctcaaatacacaaccaggatacattaaaatgcatctcaaatatgctgacagtagatcataatgcaaagtacttttacaggtgttacactatagtagacactgtctaataagcaacagtggttttcctgtaaaggaaaccatggcacaacttccaagaaatgtgttcagcagagcttcagggcatcggcaagtgtgtgtgtgtgtgtgtgtgtgtacgcgcgcaacacacttttatctttgcatttcatgtcatcattaagtttgtttctgtaaccgtttgggacaatgcaggaaagctctgcagtctcatgtgggctagtgttgtagcagttactgggcaatgatagttcatgagtataataaacatgttcttactttccaataggttgctttgagttgaaaacaagcaaagcaaagcccctgtaaggatggcttcatgggtacaaattctcattccatgctactaccagcacgtggctaaactctctaattaaaaaaaaatctggccagatataaataccccaccccacccccccaaaagaaaacccacttagacgttccagactaaagagacggtattttgatcattttaatttgcatgagatgttatctaaaatagactaccaattctttcttccctttccctcctccagcctccccacctcccctatccatctctttataagccatgtaaccatacactgttcaggacagtataaaagtgactcctattgcaaccaacgaaatatggtgaacagtgcaggtttgtttctggttgcgagctgtctttccaagtgtgggtagatgatgataaatctcccttgcaaactatttctccagttacaagcttttgtccagaagcaaatgagggttttaatgttacagtacttgttataatagaattttaattgccttaattctggtaaagtataaaggagagaaagggagagaaagacacacacacacacacacacacacacacacacacacaagagagagagagagagagagagagagagagagagagagagagagagagagagagagagagaattcttcatggaaagggaaaccttcaaacaaaacaacagaaagcccaattacattttcatttgagggggtcacttgtgcaaaaagatttagtttatgcaattgattaggtggaaacaagccttttcattccatcattccatctttctcagctggacctcaccatcagcagggacacggtgatatttagtgttttggtagcttgtatttttaagggtaaaatgcccagttccaatcgcgagcatgccctcctttcaaatccacttgtaacaacttcactagactggctggcaaattagctagctcgatcccacacaataacctccagaatggtcctcaataactacagcatcccactaactgtttgaagcacaatagtttcataacataacaaaaaaaaaaaaaaccataatggtgttaggcaacacatctttaacaagatattgtctgtgcttttgccgtgtgctacgggagctgcctctcactcggtgagcttttgattcctctcaataagattatttcaaatactctaatccggaatcattgacatgaatacaaaggcatagtgacatctaagatgcctcttagccttgcgttggctcttgttcccatgccttttcttccctttttacctgactaaaagcttatggacacttgggctctgtctctcaggagcagcctggggggttcctcatgaaatataaagaaggaaaaagactgacaggggctggataagctacagagtgaagagctatagattaaaagtgagtgccagtaggtaaaccctcctctgcacactcaagccttctctcctgttttctttaacgctttaagtgccaggggaaggggaagagagaagagaattaaatgaagtgtgtggcagctggcctttaaattggaacatgatcactgcatctattgtacgggacgtggataagattgttaaattttcatccagacatgtgatgacggtggttttgggaaaaagtaaagcccttgtaatcaatatcaagttgtttttttttaaaagccattctctgttcagctgaccaaacattgattctttgtgtagagatgggtattgtgtgagcgagaagcactcctctgtagggagtagacatgggggtgtggggttcatgatgctatgatgctatgtggtcagggaggaagtctttcttgtagcccaggagttgaaggtcatcaaagtagagtgatgaaatggattaaactatggcatcggtttttatgacttcataggatagtcataggccctgctggatctgtgaatacttatgtggggtagagggcccatgtagacactggagacttaccaaagaagtgttagtcctgtagacaccttttctcgacctttcctgagcagttatgattaaccaaagctctctctcttctccaatggtggatctgacaactactttgctgtcaacttattattgttcaatacttaagtactgagggctttctcactttaaaaaccacgtttcttatttattaatattttggtctgttagtaatgtcgcaacataattaaaaaatagttttaatagactcttaactgatgtgttccgccccccccccccaatggacagttagtttgaagaactctagattgccattaggtttgatgacacacacatgcacaggcctacacacacagagacacagacacacagagacacagacacacacacacacagacacacacacacacagagatacacacacacacagacacacatacacctcaaagacaaaaaaaaaaaaaagaagaagaaggcagcagaaagtgagcatcctatttaactatcagaaagttctctggaaaaggaagttggtcaaatactcactcaatgatctttgaaagcattaccaacagtttaggaaaccttctggtgttttcttaaagctagattctaatctctgctgcatgctgtacgtcacagactaacttcaaacagcttgattgctttttcatgtgtttccaggtaagggtttgagacatctgtatgttctcatagagaccaacctatgagcatactacagcaaagtaaacgaaatccttggtcactgtaaatttaattgctgcgtcccacccatagctacagcataatgcttaccaatctgaacgctgtaaggtgtgctgcttcggttctcagcttcagttttggcctcaccatccatcattacccagtgaggcggtttccagtacctcccagcttgaggtatttttatttcaattttcttcgtacccacacttcattccctcacgtatttctctaaacacagtcacctagccagtttcctagttactgtcacactagcttgtggggttggaaatgaaagtaataccccagagagaaatctaatgaacgtgcagtgcaatggcaaagacaaagtctttgaagccaccttgcagacaggtcaaattcttcatggctacttagtatcttttgcctcaaggacctcagtgctccaatcttcaaaatgggaacattcatcttcattgtggattaccgctggaagcctcactactttcctggtattgcacaatggatgtagagtgtgtgtctgacacgtgcaaatgttctgagttcagtcctctctctctctctctctcacccacccacacccacccacccacacaccacacatatgcacatatgattatgtttttttttattacaaaaatataacataacaaacacttgggttgggacttcccacagtcttaaaatcagattttgaaaactgagcctaatatattttaagtcacatatccctaatgtaagaagcaccatgcttttttttttcccctcacaagatgagctaccttgctaagctaatcatggcagctgtgccttcttagacaagaacccacttattgctttttccttccatagctatttattgggcttctactgtttgccgcatactgtgttcaggattgtccagaaaaactgcaaagagagacatagattcaaagtaaatgccttttaaaccaacaaggctcctggaatctgggctctttttcagtgtctcagactgttgaggagtgctatgttgaaatactaagtaaatattattgatttccctttgttctttgagacaatgtctcttatagccgaggctggcctcgaacttgtgactcttcagattttctcccaagtgttggggttataggcacatgctgctgtacccaactatattgactttaaaaaaagaaaaagaagaacacaatataagattagaactaagctgcgcaagaaagatccctccaggctgaactcaactcatccccaatggtactgaacttgggaaaactctatggttttcttatactcctctgacgtagtccacaatttggttaagactataggctaaatcagactgaatctcagcgcagctagcagcacaggacactaggcagttcaattgtcccaagccctatattttaagatgtatcagcacagttcttggcacataacacctagaatgatgtttcaaatacaagctggaatgaagagactgctaagactctttgctatggaattcgaaccccagcgtttagtggtagtgccgaacacaacgtagggcagatatacctcagttctgttaacgatgacagcatgcttaaaggtccccagccatagctcagtacctggctcacgttcagtagaagcctagtgtatgattttgtgaaatgaaagggactgagaagcagtgttgttgagtgtgatggtctcagctctgcctgaggacaggcctgttgcaaccacacactctaaagcaaggtggtcgtgccattaaagaatgacaagaaacagaaagtgcaggataaaatattaaatttgtttcggtaaaaaaatgttaatcttcacactattaccatgcaaatctcctcgttgcctaactgtttaattgatcaagtaaatcacagagcagacacataagtgagaactcccgctgctgatgctctcacagagcacgttgtaaggagtgtactctgtgaagcactttgtctattgcacacactaacttgtatgaaaggcaataatgcatgtatgctttagatagtgtttgtgggtgtatacgtggaaggtttcttataaaggcaagttacctatgtcccagtactatcaaatgtgaaatcagtattacagttgcctgtgtttaagcatactaacacggcactgttgtgatggaagggttaataaattcttccttgttctctccttctctaccccacccacaagttcctcctgtcctccatcccaatcctatcatgtgcctggttgacgctgaaagaagggcttgaagttgcccatggggcatcccttttctcagcctcctctgaggtctcctgggcagatgggcacttgccttctcttcttgggactcaaaacccagtcaggtacaccaggttcagcagcatagcttctctgtctgacctgagggctggtgaggagggagacagagctatctcacatctaataggatgcatctctgtggctgtaggggccgcctacagcaggaagttctcccttatttccatgataagttgtcattcatgagagcaatgtgctgaactaatcaggttaattgagaggcccggaatcctcattgagcctatctccccttcctgttaaaggcagcgagcacagacggaggcttacaggatccttgctttcccgatggcttgtaagatctgtaggcaggcagagaatggaggcacactgctcaatgcctttagagctctgtgaacatagattctttttgtgggacagcagaaccttaaagaaatagcaacccctttgaagatggagagatcgagtcaattcaagtctctgatactgcttttgtttgttaacatttaatctcatcatttcagagaagccaagaaagactgacgggggggggggggggctccattcaggagaggctccatagatattttatttaagatcgaaacttaaaacaaaacaaacaccccannnnnnnnnnnnnnnnnnnnnnnnnnnnnnnnnnnnnnnnnnnnnnnnnnnnnnnnnnnnnnnnnnnnnnnnnnnnnnnnnnnnnnnnnnnnnnnnnnnnnnnnnnnnnnnnnnnnnnnnnnnnnnnnnnnnnnnnnnnnnnnnnnnnnnnnnnnnnnnnnnnnnnnnnnnnnnnnnnnnnnnnnnnnnnnnnnnnnnnnnnnnnnnnnnnnnnnnnnnnnnnnnnnnnnnnnnnnnnnnnnnnnnnnnnnnnnnnnnnnnnnnnnnnnnnnnnnnnnnnnnnnnnnnnnnnnnnnnnnnnnnnnnnnnnnnnnnnnnnnnnnnnnnnnnnnnnnnnnnnnnnnnnnnnnnnnnnnnnnnnnnnnnnnnnnnnnnnnnnnnnnnnnnnnnnnnnnnnnnnnnnnnnnnnnnnnnnnnnnnnnnnnnnnnnnnnnnnnnnnnnnnnnnnnnnnnnnnnnnnnnnnnnnnnnnnnnnnnnnnnnnnnnnnnnnnnnnnnnnnnnnnnnnnnnnnnnnnnnnnnnnnnnnnnnnnnnnnnnnnnnnnnnnnnnnnnnnnnnnnnnnnnnnnnnnnnnnnnnnnnnnnnnnnnnnnnnnnnnnnnnnnnnnnnnnnnnnnnnnnnnnnnnnnnnnnnnnnnnnnnnnnnnnnnnnnnnnnnnnnnnnnnnnnnnnnnnnnnnnnnnnnnnnnnnnnnnnnnnnnnnnnnnnnnnnnnnnnnnnnnnnnnnnnnnnnnnnnnnnnnnnnnnnnnnnnnnnnnnnnnnnnnnnnnnnnnnnnnnnnnnnnnnnnnnnnnnnnnnnnnnnnnnnnnnnnnnnnnnnnnnnnnnnnnnnnnnnnnnnnnnnnnnnnnnnnnnnnnnnnnnnnnnnnnnnnnnnnnnnnnnnnnnnnnnnnnnnnnnnnnnnnnnnnnnnnnnnnnnnnnnnnnnnnnnnnnnnnnnnnnnnnnnnnnnnnnnnnnnnnnnnnnnnnnnnnnnnnnnnnnnnnnnnnnnnnnnnnnnnnnnnnnnnnnnnnnnnnnnnnnnnnnnnnnnnnnnnnnnnnnnnnnnnnnnnnnnnnnnnnnnnnnnnnnnnnnnnnnnnnnnnnnnnnnnnnnnnnnnnnnnnnnnnnnnnnnnnnnnnnnnnnnnnnnnnnnnnnnnnnnnnnnnnnnnnnnnnnnnnnnnnnnnnnnnnnnnnnnnnnnnnnnnnnnnnnnnnnnnnnnnnnnnnnnnnnnnnnnnnnnnnnnnnnnnnnnnnnnnnnnnnnnnnnnnnnnnnnnnnnnnnnnnnnnnnnnnnnnnnnnnnnnnnnnnnnnnnnnnnnnnnnnnnnnnnnnnnnnnnnnnnnnnnnnnnnnnnnnnnnnnnnnnnnnnnnnnnnnnnnnnnnnnnnnnnnnnnnnnnnnnnnnnnnnnnnnnnnnnnnnnnnnnnnnnnnnnnnnnnnnnnnnnnnnnnnnnnnnnnnnnnnnnnnnnnnnnnnnnnnnnnnnnnnnnnnnnnnnnnnnnnnnnnnnnnnnnnnnnnnnnnnnnnnnnnnnnnnnnnnnnnnnnnnnnnnnnnnnnnnnnnnnnnnnnnnnnnnnnnnnnnnnnnnnnnnnnnnnnnnnnnnnnnnnnnnnnnnnnnnnnnnnnnnnnnnnnnnnnnnnnnnnnnnnnnnnnnnnnnnnnnnnnnnnnnnnnnnnnnnnnnnnnnnnnnnnnnnnnnnnnnnnnnnnnnnnnnnnnnnnnnnnnnnnnnnnnnnnnnnnnnnnnnnnnnnnnnnnnnnnnnnnnnnnnnnnnnnnnnnnnnnnnnnnnnnnnnnnnnnnnnnnnnnnnnnnnnnnnnnnnnnnnnnnnnnnnnnnnnnnnnnnnnnnnnnnnnnnnnnnnnnnnnnnnnnnnnnnnnnnnnnnnnnnnnnnnnnnnnnnnnnnnnnnnnnnnnnnnnnnnnnnnnnnnnnnnnnnnnnnnnnnnnnnnnnnnnnnnnnnnnnnnnnnnnnnnnnnnnnnnnnnnnnnnnnnnnnnnnnnnnnnnnnnnnnnnnnnnnnnnnnnnnnnnnnnnnnnnnnnnnnnnnnnnnnnnnnnnnnnnnnnnnnnnnnnnnnnnnnnnnnnnnnnnnnnnnnnnnnnnnnnnnnnnnnnnnnnnnnnnnnnnnnnnnnnnnnnnnnnnnnnnnnnnnnnnnnnnnnnnnnnnnnnnnnnnnnnnnnnnnnnnnnnnnnnnnnnnnnnnnnnnnnnnnnnnnnnnnnnnnnnnnnnnnnnnnnnnnnnnnnnnnnnnnnnnnnnnnnnnnnnnnnnnnnnnnnnnnnnnnnnnnnnnnnnnnnnnnnnnnnnnnnnnnnnnnnnnnnnnnnnnnnnnnnnnnnnnnnnnnnnnnnnnnnnnnnnnnnnnnnnnnnnnnnnnnnnnnnnnnnnnnnnnnnnnnnnnnnnnnnnnnnnnnnnnnnnnnnnnnnnnnnnnnnnnnnnnnnnnnnnnnnnnnnnnnnnnnnnnnnnnnnnnnnnnnnnnnnnnnnnnnnnnnnnnnnnnnnnnnnnnnnnnnnnnnnnnnnnnnnnnnnnnnnnnnnnnnnnnnnnnnnnnnnnnnnnnnnnnnnnnnnnnnnnnnnnnnnnnnnnnnnnnnnnnnnnnnnnnnnnnnnnnnnnnnnnnnnnnnnnnnnnnnnnnnnnnnnnnnnnnnnnnnnnnnnnnnnnnnnnnnnnnnnnnnnnnnnnnnnnnnnnnnnnnnnnnnnnnnnnnnnnnnnnnnnnnnnnnnnnnnnnnnnnnnnnnnnnnnnnnnnnnnnnnnnnnnnnnnnnnnnnnnnnnnnnnnnnnnnnnnnnnnnnnnnnnnnnnnnnnnnnnnnnnnnnnnnnnnnnnnnnnnnnnnnnnnnnnnnnnnnnnnnnnnnnnnnnnnnnnnnnnnnnnnnnnnnnnnnnnnnnnnnnnnnnnnnnnnnnnnnnnnnnnnnnnnnnnnnnnnnnnnnnnnnnnnnnnnnnnnnnnnnnnnnnnnnnnnnnnnnnnnnnnnnnnnnnnnnnnnnnnnnnnnnnnnnnnnnnnnnnnnnnnnnnnnnnnnnnnnnnnnnnnnnnnnnnnnnnnnnnnnnnnnnnnnnnnnnnnnnnnnnnnnnnnnnnnnnnnnnnnnnnnnnnnnnnnnnnnnnnnnnnnnnnnnnnnnnnnnnnnnnnnnnnnnnnnnnnnnnnnnnnnnnnnnnnnnnnnnnnnnnnnnnnnnnnnnnnnnnnnnnnnnnnnnnnnnnnnnnnnnnnnnnnnnnnnnnnnnnnnnnnnnnnnnnnnnnnnnnnnnnnnnnnnnnnnnnnnnnnnnnnnnnnnnnnnnnnnnnnnnnnnnnnnnnnnnnnnnnnnnnnnnnnnnnnnnnnnnnnnnnnnnnnnnnnnnnnnnnnnnnnnnnnnnnnnnnnnnnnnnnnnnnnnnnnnnnnnnnnnnnnnnnnnnnnnnnnnnnnnnnnnnnnnnnnnnnnnnnnnnnnnnnnnnnnnnnnnnnnnnnnnnnnnnnnnnnnnnnnnnnnnnnnnnnnnnnnnnnnnnnnnnnnnnnnnnnnnnnnnnnnnnnnnnnnnnnnnnnnnnnnnnnnnnnnnnnnnnnnnnnnnnnnnnnnnnnnnnnnnnnnnnnnnnnnnnnnnnnnnnnnnnnnnnnnnnnnnnnnnnnnnnnnnnnnnnnnnnnnnnnnnnnnnnnnnnnnnnnnnnnnnnnnnnnnnnnnnnnnnnnnnnnnnnnnnnnnnnnnnnnnnnnnnnnnnnnnnnnnnnnnnnnnnnnnnnnnnnnnnnnnnnnnnnnnnnnnnnnnnnnnnnnnnnnnnnnnnnnnnnnnnnnnnnnnnnnnnnnnnnnnnnnnnnnnnnnnnnnnnnnnnnnnnnnnnnnnnnnnnnnnnnnnnnnnnnnnnnnnnnnnnnnnnnnnnnnnnnnnnnnnnnnnnnnnnnnnnnnnnnnnnnnnnnnnnnnnnnnnnnnnnnnnnnnnnnnnnnnnnnnnnnnnnnnnnnnnnnnnnnnnnnnnnnnnnnnnnnnnnnnnnnnnnnnnnnnnnnnnnnnnnnnnnnnnnnnnnnnnnnnnnnnnnnnnnnnnnnnnnnnnnnnnnnnnnnnnnnnnnnnnnnnnnnnnnnnnnnnnnnnnnnnnnnnnnnnnnnnnnnnnnnnnnnnnnnnnnnnnnnnnnnnnnnnnnnnnnnnnnnnnnnnnnnnnnnnnnnnnnnnnnnnnnnnnnnnnnnnnnnnnnnnnnnnnnnnnnnnnnnnnnnnnnnnnnnnnnnnnnnnnnnnnnnnnnnnnnnnnnnnnnnnnnnnnnnnnnnnnnnnnnnnnnnnnnnnnnnnnnnnnnnnnnnnnnnnnnnnnnnnnnnnnnnnnnnnnnnnnnnnnnnnnnnnnnnnnnnnnnnnnnnnnnnnnnnnnnnnnnnnnnnnnnnnnnnnnnnnnnnnnnnnnnnnnnnnnnnnnnnnnnnnnnnnnnnnnnnnnnnnnnnnnnnnnnnnnnnnnnnnnnnnnnnnnnnnnnnnnnnnnnnnnnnnnnnnnnnnnnnnnnnnnnnnnnnnnnnnnnnnnnnnnnnnnnnnnnnnnnnnnnnnnnnnnnnnnnnnnnnnnnnnnnnnnnnnnnnnnnnnnnnnnnnnnnnnnnnnnnnnnnnnnnnnnnnnnnnnnnnnnnnnnnnnnnnnnnnnnnnnnnnnnnnnnnnnnnnnnnnnnnnnnnnnnnnnnnnnnnatcacgacactcttctgtctcgctataaaaactaacatttccattttctgagtgctgcctagaatacattcatttaggcaaatttccaccctttgctggcgtaattgctattcctttttgttggtcattgctcccctgggcttccctcaaacatggtcagaggtgccctagactttttaaagattgaagaaaggccacatggccctgcataatttgactgagacagctgtgcagtgggttgtctcatttaaattacaaccacaaaaagagatgtgccagccatcatagacacaaagctaagggcaggaacatgaaacccgggttcctaaacctgcccggggctgctgtcagaggtaagcagccttcttagcagggtctcaggaaccactgaggagatagctaacttcccctcttgtgccccccaaacaattatccctccctcaggcttctcctgaaggcttgtccccttaaactcctagggagaaggatgtgtttcgatagtaattccagccaggcatagttgacagaggtaggagcttgcagaaatccactggagagttagggagaagtataaaggtgtttacaaggacatctcattgtggctgggatttagggaagccctttactaaacactgaacccaggagctgcagactgagtctctgggagactcatttgatggggcaatcctgcctttaacacaggctctgttaccaagtttcacaggtgtgtttgcacattggctgtttttctctatctttcagaattaggagtcccacagtcggtttcttttctacatttaactcttttatttatcctcctctccaaaattaggacacgtgctgaaatgcctgtattggcatgctgtctctcttattttggggaaagtttttcttatgtatttcttcccgtttagtgacctctaaatataatttactcttgttactttactctgtttcctagcctagttcttaaaaaaacaaaacaaaacaaaacaaaacaaaacaaaaaaaacctatttctcatatatgcttctaaagtcagtctctccccagtatttttattttgttacaatacatgtgtcttttgaaacaaatgtagcaagtttcccaaaaaagttcacagcagtgctctgtctttttatgggcaagtatagcttgagccagtgtgggtaggtgtcgttcacatctgtggaaatacatgattgtggcatgacttttgtattttggataaagccaaagagtgcattttaggactaaggttgagggtgggcaaagttatacatggtgggttacaaaacaaaaagacatgtaagttgaatggggatttatttcgaagaagagaatggtgggtgggttagccagagcagagggacttctgtgagcagactctgttagatacatgtgtgaaagtgtccaaaactaaatgaacgtaaaaactaagtccacgtaatcaacaaatatgtaaactatatctgtgagagcatcctattaataaattggatggaaatgtaaaagcacgattaatggaagatagagatggtttgtctccatagaggaaacaaaacaaaacaaaacaaaacatgagataaaccgaacatggacaaactgcttgtgttgggctgtgaatgtaactactgcagctcagatctgcagggatggaggccccaggagcaggaacaccccttttctcacccccctgctccatgactctcagtagtggctttgtgggacctcatgaattacttcttacagttgaggctctttggtgccgagtgcgctgtgggcagcggagcccagagccgggcagtcggtgtttgtgctgttgttagcgacacgtagcgagttcctcctgaacggaaaggccccggctccagtttgtcgccagtgaaagcggagtcgcacagcaaatgtggagctgagccgagcagcctgggggtgggggactagcctgcaaaggggaggggcccagcgccaccgggtatttgtttagaggtggggatgggcagagtaatagaggttagggcgcacgcaaagaaaacagctggaggggagctaggaacccatgctatgactgacctcctaaatgccacccccaaccaattacatctcactactggttggaatatttgcaggaaaaaaaaaaaggtaccctttgtagtgtggttttctttcccaggatatcctgagcctgtctctgggtgggtttttccgtgggtgagttggttaggagatatctcctatgcctttaagaggtaaaaacacgtacaaatgcaaatgcagagactttaacacttcccccccttcctaacattcatataattgctgttaagccacattgaaaaccctggggcccggtgttcaccagggtaaagttacatttcacaagcagaaaattgactcaccacttaggaaaattggctaccaattatgtgtcaaaggctctaaagtcagagctcagaattttctttttgctagaatgtggtattaaaaagggcacagacaagccagccctggcccctgtgccctctcgggacctgtgggacctgctgactttccttgcaaggtttctgggccccagcaaggaagaagggctcctgacccctaacccagggccaaacccaacagccggaagatgtcactagttagaagtgaacacacacacacacacacacacctgttaaaatgatgcccctggctccttgtgagaggcctctcttagcctggcactgtccagacgcctttggctgtaattgaggctcattaggccaagagaagagagggaaaagagagggcatctgagggccacactgtcaggggacatttgctgcctctactgacagggtcacaatgtgtccacaccatgtgcagggctacttctagagactcgttggttccttttgttgagggatcagttcctatccaaatcccaggcaagagacaggggaagggacagagagaggggcatggaggaatagatggagggaggggtgggatgggatgggggagacctaaaggagaaaagagagacagatacaaatccacagagatttgtagagtcagagcaatggagagagcaagagagaggagtggaagggagggatgagaggaagggagagagggagggaaggagagagggagggaaagagagagaagagattggaagagagagagaagataggagcagggtggaagggagcttgcagactctgaagggtgagagaatatttttatgtaacccccaccacctctcccttttctcctgcatccgctttcttgacaaagtatgggctttcttcccaggcctgttttctgttcctgtcacagcgccttcacccctggctttatttttaatgcctagatattaagccttatttattgcttcacattctgcctctagagggagagaaagagaacgcatcaggacatggcaaactggggaaatctgctgggctgtatgggagaaagtttttcaggacagccaggatgtcaaatcatattggcgattaccccagataagcctccctcctaacaacaggatgcaatatttagtggtttgagtgagaaaaaccagcctcattttgccttctgggaaatcttctgctagctatttctgttcaattcttaactttggacaatttccagagttctccagaaccaactaccttaaatcttcttttctttctgatttcgattttctctttttatcttacattattactttattgattgaacgagggnnnnnnnnnnnnnnnnnnnnttttacttttctctacctacttccgtcaattcattcctccatccttcattctgtccttccttccttcctttcctccttccctccattcctccttccatacctccatccctccatccatcagtcctgcctccccctcttccctttcttccttccttccctccctccctccccctttctttctctcttccttccttccttccttccttccttccttccttccttccttccttccttccttctttgtctctttccttctttctttttggctttcttgctttttttttttttttttgacagagaaggttgttttgtctaagggatggcattttggggcttgagtttctaatatctgatttcagctttgttctggcattttggctggagtcaagggaagaaagcatccacaattcgctcaatgtttcattcactctggagtctttattgggctaaagacttggtgtttccgcttatttgccaggacgcagaggtatgtttttctgatcacaacataaacaccttgattggcttttgccctcctctgagcgatatctccctgtgcatctgaaagatattttttttgtcagttttgaggatctcacaggctccctcaagtgccgcttaattagaggtcttctatccactaagtattttcttaaatgtataattgattgtgcaaggaaggaagagcggcaggagaggaaatcatacatcacttcattattaatggcaatgtctaaataaaatagactttgtcatgctaatggatgacagagcatgtttaatgttaagtcaggatatttcgttttcttttctgttctgaggccagtcttaggaagttttaagtagcgctgaacacatcgatagacgtgatctagtagagtgagttgtgaatgaggacaggggccaaatcaacgtgcaaagtctgcaaggggaaggtatgggaaaatgaagaagttggaaagccgcatacatcagctccattttactccttgtgaagaggtgggatttttacctggatttcatttagaaggggtgtagtgagtgcttacatgcctcttgctgaagcattccccagatgttcttgctgaacagaagtgccctgctcttgcagaacagaatggccctgcccctcacccagagagccttctagatgtttttggtgggagttctttagaacagtgctttttggatcctgaaatggctggttccagtagcacaagtctatgttagtttgaagtttcaccaaagtagcctttctgtagggactgagatggtggcaatctctgtgggaacaaaaccatgaggtgagtggagaagagtaaggaaagataagagaaaagtaagagggcgaagacaatgggtgtaggatgttattgatggtaatattgaggcagcaggtgttggatcccatcaagattcctccagagtcaagtgatacatacctcccagagttgtgatctgattttgtacatgtgcatatatgcacacatgtgcacacacatgttcaatcatttggaggccagagtttgatgtcagatatcattccctatgtctcccgaccttatgttttgagacaaggtcttttattaaacctggagttcaccactttagctagattgcttggagagcaagcctccgggactcgggacttgggcatctctctccctagctaagattttgggcatgtgcggccacacctaacggattttttttttaacttgagtgctgaggattaaactcagatcctcacgcttacacagtaagaatctcactgacggaaccatctagacagctctcggaatcacgttctcaaaggacaggaagctagatacttatctcctggttcctgccctctgttgctggagggttaatctctgggtaaccagagccagactgttccaaggggtccttcagagttggcatggcatagaagagagccttcttacgatgggatgtgacaaaagtcagaggtgtgtcctggtgaggaggttctagacacgactcttgcagaaactgagtgtgaagatccagaggaagtggaccagagcaactgaagcccaatagcccacccttagttttaaactgagtgttccctgtgtgcgtggaagtggttttgcttacttccttgtcaagcccatcaaggaatgtgtgcactcatgtataatgagtcctggaggtggctactgaaggactagacactgctcatctttgtctaagtgtgtttgtgtgtttaggtgagttgttgtaactttgctttgggaaattgaggaccaatatatagaaaacatgggacctagctcctgtcaggaccaggagttacaaaggtttatgagaaatggtaaaccttgggtggctctgttagctgtgggatgtttatgcttcatcaagaaacaagggtcagaaatcaggttttgatggggggatttgggagaaatatgcaggtaaggttttgggaagagtatcctgcagaggaggaagtagtggcccatggatatgtggcagctgatggaaaaggcgtaaggccagcatgtaagggcccagaaggactctcagttcagggttttctgttgtagggagtaattatttttcatgaaatggggtccataaggatccgcgttgatgagctcactgactgaatatgagctctcatttctacttctcagacactgtcatcttcctgtggtacagttttctctgtccctttggtggtagaatactgaggaagatcccagctactgtctcttatccctcatctatagccacaccagatgccctttcaccctcttccctttgagtctcatgtctatctccagtcttctggacttccatcatctcttcctatcaggggctagagttagtcagagagggccattccgattctcattggactgcactgtcctctagactaaagtctgccaccagctgttcttgccccactgctctgattgaatacttaagaaagaccacttgagggagaaatgacttatcttaactcagggtttcagggttttagcttacagtcccttggttcttattttgtgtgccagtgatgtgttagtatactatgaccttctgacaatgaaggaggaggtgggggaaagtccgaggaaggggaccagggagagggagaaaggggtactcctaacaatctactttccaagtgccccacttttcagctgggcctgcaaagtttccagcctttaacaaaatgcactattttggtgacactcaccagctggggtccaagccttcaagacaagaaccactttatatccaaaccacaacaaacagattcttattattcttaggataagagccaagttgcttattctcacacagttcccattgcttctgtcaggcatgtccattctgtcttttgtaagtgcacgtcatccgccagagtctagcctcctcccttagattctcagccattccttcattgctatccccatctgagttaaggttttgtcagaggatgctagaagcttctgtagcaaggggctgtggacattagttccctggacactgcaatgacaggcactcagaaaacatctgcgaactaaatgattaattagtgaaagaggacatggcttgcagtcccccaggcttgatgtcccatcctttggtgtgtttagagtcagcttgtgctgattcatgagaaccaatggagtctcttcccggctctgttcaagtgatatgatactggaaggttgaactgagccatgatatgagtattgacaccatgaaaactggcaaaaaactatggagcagagctccttcttcacattttagcaaaagaacccaggttattggttagtgatatctatgagatatcttgtctttcagacttccctgccagtgaagtcttggctattgagtgtttagagttagaaactacatcattttcaggctctgaatttttttcctgaagcagaatatgtaattcaggaatcatttattctagaaaaacaaccacgtcaactaataattgggtctccagtgatgttctttctcttctcttctcttctcttctcttctcttctcttctcttctcttctcttctcttctcttctcttctcttctcttctcttctcttctcttctcttctcttctcctctcctctcctctccatctccatctcatatcatctccatcatcatctcgatatcatgatccatataatatacatctcctcggctctacctcgaatatacatgacagactcttactcttgatactaacggaatctatagctgaccatacgacatagcaaaagaaggggagagaaacaaggacaaaggagannnnnnnnnnnnnnnnnnnngtagttcatcactccctccctccctccctccctccttccttccttccatttgttctttcctttctctcttcttccttccttccttcctttctttctttctttctttctttctttctttctttctttcttcctttctttcatgtgggtacagatgtcaaccttggatatggttcctcagaactaaccaccttgttgttttgagattcagtctttttctgggacgtggggtttgcttattagggaagtatggggggagcaagcttcaggtatctgtctgtctgtctctgtctatcagcactgggattataagcacagaccaccaggcctaccttctaacaagggattctagctcagatcttcatgactgcatggcaagctgttcatcaactgagattatctctctagcccacacttttatacattttactgttataaatcacatttgtcatgatggataaattgatatgcttaatttaataacataattccataataaagctagtgagcttaatagaagatcattgaaagcctttgggagagatttattgctcatattcctgtgtgacagaggtatttcttgccctcatgagtgaatgcatacatacctatgcaaacaaagatctaaactataagatgtgttagatggtgggatggagtgtcattggtgcccacatcaggaactggttgattctatcttgaataaaaaagaaactaatatttgaattttcctaggcaggctataaggagagctgtagggaacagaactcaaaggcaaagagactaagttcagaagttacatgagagcagtgacccaggataatggtttcttggtcagtagtaatgatggtcatagagccaagtgtccagggcacaattggatatgctgtagacagggaagggagatgagagtcacggtggaaatcctgggtcattttctcaactgtctccttttatggtgggcagatggaagaaatgaaatgatgtaaacatacttcttaatgttaatgtaatcttgattaatcttgataggactttatgacaaattgatcttaagatgcagtagttccaatagaaactggattgtgggctgcacaatttgatttcaccaaacagctctggacttgtattccatctcattgctcccaggtttcattactgtcattgtctgcaaaggaattccgtttctatctcagtcactcattaagtaccttaaaattatgcatgtaggaaattctcagggataacgtatgcaaatcagaagcatccctgaccccagccctaaacagacatctctgtttgttacattgggggaggggttcagatcacttcttttaggtaatgaaattgtagcctcacactttgaatgcagctaggaatctttcccccctttcttttaaagataaggagaaagaacagtaaagatattttcattttgaatcagaaatggtatgtaaaagagagagatgaagggatgggagtaactatataaaagatttttcttttttggtcttggcaaaacctggtagttcccatcagttcaacttggctaagagaagcttctagataagaattcttgagacttaagtcttctccacattaaaaaacaaaaaaacccacagcagtaagaaattacaaatgacatagtcttgaatgccaaaaacctaacctttgatggtggcttttcagaagttaaataatcaaacatagtttcttctccccctttattttctgttcaagaggattactttataaagcatatcttgttttataataaaatagaggaaaacataaacaaaacacactcaaatatttatacaattattcaaaagattaaatgtatttcttaaggttcaaaggttatttaatattttccctttcttttgggcctttgtttttagttctggtacatttatttttcactgtggttttgtttataaaacccaattcctccactgtccttaagaaaatcactttagaaataagcaaatacaaatgagcgagagaggagatgtgtacgtgtacgtgtgagataaagcaatcatttgggggctaacaaggtggcttggtgagcaaagtgtctgccactgagcttcatattctgatcgctagtcctccaccacggaggacagggccatgatggaaggagagaaccaattttggcaagttgtaatttgactgccacacatttactgtagcatacatacatgtatgtgcatgtgcatacactaaataggtaagtgtaaagcaagttaaaatatgtttgggtctggaaaagatggagcagtagatactggcaagcatgaagactgcagttcagatggctaacatctgcctaagttctggatggacatggtgtctcacgtataatctcactgcttgaactatagagacagggaatcctggaggtgagctgcctagatagactagccatgtgagtgagttctgggttcaagtgagagacacaacctcactggataatgtggagaacagtcacagaaggcacatgaagtcagagctgcctcaaaatgcccatctgtgtatgtatccccaacacacacatacaaacacaaatacatgcacacacacaccacccatatgcaaaacacctttgtaataactatattctttatattacagtattagtccacaccagatgctcccaaataactgacagactatgaataataatgctacttattagccgagcatggtgacgcacgcctttaatcccagcacttggaaggcagaggcaggcggatttctgaggtcgaggccagcctggtctacagagtcagatccaggacagccaggactatacagagaaaccctgtctcgaaaaaccaacataataataataataataataataataataataataataataataataatgctacttattggatctataggcaaaaatatcagatctgtatttgggagaaataattttttgcttattttaaaaaattgtatggatactctacggcaatgatcatattcctgaacatgttccttccattcagttaagctgaaaatagagagaaacaattagtttatgtgttaaacatgcaaggaatttttatcacgtgtctgggtagcatgacttctgttaacttccctcctattacgtatcggccaggatttccctgtgatgcagatcaaagttttcctagtttggcttgtttaactatatcaatgtctattacccagctagtagtttctgggagattaaaacaacaataaggccaagtatgacacctccattagcatagggctcatcggaagtctgtcatctcccaatactcttcccaatatagtaatttcttagctgattactaaatgaaagatgggctcatacatccaccacaccaagactgtcattagctcccatttatggtgagctaaatttctcttagcaaacattaatgggcattcaatgtagttagacattctggataatagataatttcttcacatggtatatgtgaatatcatttcaaacacaacaccagtcttatgatcaatatagttttattaaacaattatgtgttgtatcaagcccctggggaattgtataacatgatcctttctctccaggaacttttcacctaatgtcatttttcggtgattcagaggataccttggtgacttgctgtgaattagggtcataattatgactatcatttatcattgtacggtgactgcacaagtgctggttaatagaagattcaggatgatagaatgccggataaatcacacccctcttcctggagtggtagctcagtgagccaaagcaggagccagcaatagatgctgatatcacttccatctgcaagccctcctgacggacgaagtgccccgagacgtttatggctttgttgctgccattgagacctttggcaggcagagccctgaacttatttctgtctttctcactttttgttagctatttccagctgcttgttttttttttttttatctgctttgagatgtttaaaagaaatacacaatgggaatctgaatcgtgattgttatcagacctggctaacataggaagatggtgatagcaatttgggatttccaggccttgtattttgtgtagaattagaccaggggtacctttgaaacacagggactcatttgctcattcattcattcactcactcactcactgagaacttactatgggatggacagagactgatacactgtgcacagacttagactctagtcggggaaagagttgtgggaagagtctagtgaacagtgctgaaactacggttgtgttcatggctgtgaggaaagcaaagacagatgacatgggtgtacataccaggggagaattgattgcctaccattcaggaagtacagcctgaagggaatgatggtcaaactgagaacaagagctctaggtcaatagtctctatagagaatgcagcaactctgtaggaggaccatagtccatgaggtcagacggacgatagttccgcacttccggtgctgctggttatttccatgaatttgtacatgtatcttctgatatttgaaacttgatttttcttcttacacttatttgcaaataggagaaatcaatattcttctatctggatctctgtgtttgtctttctgtgcctgcctctctctctctctctctctctctctctctctctctctctctgtgtgtgtgtgtgtgtgtgtatgtgtgtgtgtgtgcatggatgtggagggtagaggttgccattatatgttttccttagttattcttaaccctatttttttgagacaagatctctcaatgaacttggagtcttttaattagaataggctctccaggaagtcccaggaatcccccagtctccgccttctcagtactgggattacaagtgcgtgatgatgaaagactaatttcttttacttgaattctaaatatccagactcatggaccctcatgcctctgtggcagacaagcgttttactgtctgaggagtttctcaagctgtctattgtattattctgtgcttttgaaacattacatttatcaaatgcttgttcggtgagatagttggtgcatattggtcatgattatcaagtcatttgtggtgggctttttcctttccaaagatatttaagaggactttagagatagcacaacctgcagcaggtgcctcaaacctccctgaagtgacaccccatttaacccttcattgtcttactttgaatatctggtaaataggagctgtcctatgagccacactagaaagttgttagaacccattagtgttgtgtctacctcaagaactttgaccattttaaaaaagatttatttattttatgtatatgagtgtactgtctctctcttcagacataccagagaagggcatcagatcccattacaaatgggtgtgagccaccatgtggttgctgggaattgaacttaggacctttgaaagagcaaccaatgctcttaactgctgatccatttctccagcccaagaactttgacttttaactaacatatcagcaaatgcagtgtctatggcaaaattctgtctagaagacaggtttttttttaagcaagccataagccaaaatagtgatattctaagcctcaatatatataatttttgttgctgggtaactgagaaaacaaacacacacagacatagagagtagtcccccacccctacccctttgggaaaatagcgatatgtctgattacttagaggaagttgacggttttccagccagaatgacatttgggatatttgaattggtcaatcatggttctaggtaagtagaccacagtagggttaacctttagacacgcaggagaggatctgctgggggcttagttaccacgggcaggctagcctctggtttggctgttccctttataggctatgcacctgagatgtgtttaatttgcacctctgggcatcagtgttaatcctgacctcaaaactgcatggatggaacgatctctgtggtcacaggggctctcagacttaggctaggcccagactccgaggtcaggaaagtgtctgctttcaggtacccaccctgtccatcacacagggtactgtctctgactctctgggctggcactggcaccaaacctgtttgcatgggaaaaagttcccctgcaactgcacagcagttttgtggtggctgagggctctaatgggggacattctgcagtcagagaactctcattcacactgtggcacactcttttctccctctttctctctctttccgatagatcagtagtctgtggttccctccacctcagccatgtaagcaaaaatgaagttaaacattgcccttaccctaagtctccacaacagtggggctgaagagtgccaaccacaagcagcatttagtgtggtaaataaaagtgaacggactctctgaacatcttataggaagccgtctttaaaatgaggcccaggaggtgagagctagtttgttgacaggctatggatttctctggaaatacctaattgttcttcctggtacacaccctctgttcatcacatggagttaggggtgtaagcaggttgtcagcctctttatgcaggtgtgtgaatatctattgtaaattatggaaatttcaaggtgttttaaaaaaatattctctccatctgttttgtaacttgcattattcttggctttccttcatggaagtgactacaactcaggaagaaaatattgttcagagaaatgagatataaaaaataaccactcggaatccatatgtgacacaggtaatctttgtatttatttatttttaaaaaacagcaagtatatcaatgtctttttaaaaaacatagtactctctaagatttatgcttcataaaaaaatcctatgtgtctgagaatctatactttgtattgtgtatattgcaccatattaaaaattaccaatcagctttttcttgtggcatttgctatatttttatacaggaatgagagatgcttcagtcagagtcttcagaaataatattagcttattaaagcattaaggacggcttaaacgcagatcctatgactgtggctatatgtaagtgtaaggttaggtaccacactgcgatgtgaactgtgacttagagctctgccaaggcgttgcctctgtattttcctttgaataagatgacagttcccctggagatatggaacacagaatctgtttctaagcagctaccataaaatctgtttattggaatctcttgtctacatccaaccacctgtctaaaagcataaattcacatgttaagaagggtctcttctcccctatacaagcagatgccacccccactcatgtcagagaaagccatgtgctctgcagcaggagaatagcttcctatgctgtgaaaggtatgggggtctgatttacagtctgtgttgcttttaatggacatacatacctgcagcagccacagagccccaaactgaaagacgttaaaataaaacacttcacagtatagtatattgcctgcttgttagttaaaagcactaccagggaagacgttttagttaaatttggcagtgttaaaaatgcatgcggaatatcttcgctgtcctttctccttcctttggtcttgttctctgtatttcctgaggattctctacctgcctgcagggacttgctgcctggcaacccctagggcacagaggctggacaatctctgtggctggaaatgaaactcaaatgaaagattaaaggagttctgcagggttttgagagagaatgctgacaaatcagcctgtgaagaaagaagaagaaaaaaaaggctaccagtttcttgagactagacatctggacagtgcagccattttggaggtggccagagtggatggaaagtagaaagtagatcacactttcaagctctgtgtgctgggactcaaaagcctgtgcagaattgtttattaaatattcaagtgtttcctctttctgactctcccttggctacagagagagtcagtttacagcatctttagagtccagctctagagctctatagtctgggtccctgtgttgacaggtgagggccagttcagtgttggctgttattttgtggtagctgtgtctccgccagagcccagagctctgtagttaggaacatggacgtccgtgaaggttcctagatccatggcctttaggggaggcttcagttgacatgacaattccaattgccacatgatagcaaatggttaatattgcaggtgtacagagaacagtttggggtataaccttaagactatgtccagtatcgctttccctctgcttcctccatcttttaaaggtatctcagtaaatattttaggatcaactggatacatcatggatctatggtctccattattaaaagtactgggctgtgctcattcaagattttgtgctttctctctttatcttctgtgtccaactcctgctcttggttgatcacaaatcagatccaaaagaatattttaaagctattctaagagctcatgagatgacatgacattgatgtgtagtaggagttggcttttagtttcatggtaaattgacttttcatatttaaataatttttttcctgaaatgagggaacttcaaataagaaaattgcttcgtttagcaacttgttttctggtttttttcttaatgtatgaaatgacacaaaaatgagatctaacaaaatatctcaaataactgtacctaggacaacctatgaaaatcccactttgcagcatttgtagagaaatgtaatgtgcacaaaaggatgcagaagtttacatagtagttttattttaactagtatgatctagcaacctggcatgccggaaaaaaaaagtaactttctgaaaatgctttttctgagcatggaagtaatattgaaaaatgaccgaggtaatcacttgtgtatagattctaaaaggagaagaaaggggagaaaatttatggtttaatgcatagagttatacaagggtgtgagtgatttcctattctatgggacctggtagaaggggtctgtgctgcaaaggaattaccaggactggcttgtgagcgagtgctacaggcatcctggccagatcatctctaccagggacttgttctgttttggttgtggggttagctgatcaagtaaatggatttctgttttagtcctttggggtgggatggggggacggggtggggggagactcttttggctgttaaattccagtttttcaaggaagcaaacatcccgtgtggaacttctcggacatccaggcaaacacactgccatgactcacataatgtttattttgtatgaagtaacctgtaaggtttacaaataagggtctggagaagagagaacttgcccacagtcctacaccaggggcatcagagaatctttctccccaatggcatccctctcctggtgccaggcaggtggattcctgaacatcaaatcaaaggacccgttaaaagagttgctaagtgtctttgtgctgtcatatgaggcagcaccctgcccccactgaaaatccctggagagagagagagagagagagagagagagagagagagagagagagagatattaagtctttttcctatatcctccatgttaatcaagaatgggtcagcagagaagacacgattgagataaacaatgcacaactagtatgtctgcaacaacaaagaacagaaacaaatgagaaacatgatcaggaactcttccctcctaatagtcctagagccttggctgccagcttttcctgtcacatagcactgcccagaagcctggatgagggcatttgtgcagaaacagttctggccaataggctcagactgcaatccctatcctttggcagacctgtggatggctgatgtagcacatgggaggtaacagaggtcttccttgctgaagaagctggaggggggtctagataagcttctagacacaagaaaatggtatctgcaggtgccagctcacccccagagagataacggagccactagccataattctggactgacttaatctgatctctaacttcattctttcagttttcttttctaccccccccccccaaatccatctctcatcaccttgtccccatgaagtcaataactcccccaagaccttgtcctttatgacagggtcaaggaataaatagaatgggacagtgccacgccctccaccactgcagtgaaggaagaggtcttccatttttggtttgtataggagatagaggtgaggagtgaagctacaaggacctttaagtctgtgtatacaagaacctgggaatggcagtaactggaagtttaacgccaactcccaacatcctttagtttctctgctaataaaacaggactgaaaagtcactgcttctctacccatataacacactctggaatctgattaaagagcattggcagccagcattgctcattacacacagacagctgatgtcaccctcatgcacagggaaagcagaagcttagagatgctgcagccacttagccagagtctgcagctagtgtaggtggaaggaaggaccatacttggtgttgggttaactgaattctatcacctaggtaacgcaccgctgtcctatgcttcctccctcagatatagtccaacacctttcactactgtgagttatgactgtttctgcggatacttcagttgcttagtctccagaattgtcaggtttacttttttgttgcttttgttttttttttttttttttttttttttttttgacactttctccttatagttgctttggttactttatagttatttctaactgctgttccgtttggcagaagtcaaagttaagagttttggtgattgttaccagcttgtggttgttgatggcagttgagtcctttctgattattgtttgtgtgtgtgtgtgtgtgtgtgtgtgtgtgtgtgtgtgtgttataaagaaataaggctagtaactcagctggctcattctcattaccctggttctccatctcttatagcttcaaagaggcaataatataattaggacataagaacagagactcccgatagcttctgattttgtttggattttccagtgggaaatgttttcaactattgctgtttccttatccgttccgggatagcttgatggtgagccagctattatggagtggtccttgtctttacgggggtggggagggggaggagggtagcacagtctcctgaatccgctaggtaggcaggaacctggggcagcctgcacgtgtgccctgctctttaatgttattacctgggactcctccttgagtcccagggtggattggaatccaacgctgaggccaaaagtgaaagggaagccagaacaaagaaatcttcgggggcagggggcggggctttcttagcaggggagtggggagacggtgaaggcgcttgtagtttgccagcctagtatgtgcaaagcgttggtacaggcaagatggagttaattcaataaaataaatataaaatactctctcttctgtcaggcctgctagaaggaggtcaagggtcgctgagcggcttcactggagcactaatcgatttgctgtctaggtggcctgctggggtttcaagcgggagagggattgagaggagcgccggcccaatttccataattgctcactgcctttagtgtacaaccttttatgaaacacaaaaaatatatcatggaattgtattgattagccattgggctgaataattcacttagtatttattacctgaccccaagaggttaaataaatccactatctaacttgggtttgtgagaaatattacttattcattgagatgtgggctgattattgcacaataggcctgcatctttgtttcttgatttcacaatcaagattaatcctttttgcattgggggggggcaagatttgtttgtttgttttgttttttgtttttgtttttaagaaggagaaaatgcacattttcagagctccccaaataaactcaatatcaaatcacattttgaagcacatttttttttcagtgatgaattttagtcacctaggtcaaatttcagaaatgttctcctaagacttatggatactgatggactaaaggcataagctctgctatcattccaaacacccccattttataataaggaacccaatggtggtgacactgagcccatattcatcacacaggtttttgggggaaagccttatctttcccataagaaacactgataaattaactgccccaagaaacaagcaaatatcaggggttgagaggtagaaagagacttccggtctcaatgataaattcgccatgaacattgcacaaaacagaacaataatttcaagtaacttggaaatccgacgggattgaatctgcagggcacttgaagcatttgtaaactttgggggcgatcattaattatttactggccactggcatttgcacatttctgccgctcagactggatgctaaatctgttttgatgtgcgatatacccagtcacaagtacatgacattcaaatctaattatgttctcagttgccacgagctctctctctctgttgagatacaaccgtccctctgaagaaaaccaaaacaaaaccaagcacgttttttaacttttctgtaaagctttcctctagtttcctgttggcgtcctccagaatcccagagcattgttttcgaagtttaatggaatttgttgtggggtcaagaaaggaagcttttctcccttcccctctccaataagggaaatgtttaaagaaaagaaaaacagcaagcctttgagtgcagtgctaactttatgtctgttgatcgtttagcatttctgtatccaggatctagccttcctagggagggtaggaaaagctggggttctggcgtttgagctcatagtagcttttcctgtggtgtgcattggctgggatggctataaagcagggtaatgcgcgcagagcttcctaaggcgtgttcgggtacaccccacttcccgtttaccgtgtggctgcttgtgcggatttgggcactgcatctgagtgtcgtgtgtcacgtgacactgatttgttgatcgccactttggaaattttcaggtctgggttttgatgcttggcctctttatttagtttgggagtaggggcagatgtgggagggtggaggggtagaggaggcggggactgagctctttcccttttactttgtgtgtaatgtttagatcttgccttctcttctgcctgtgtggggctggattaaatggaggacgtagttaacacaaggacctgagagctcttgatggcctcttgagataattcggttgtaagcattgagcaaaacgcgcattgtccggatagactcatttcaagtgctaatcgagaacgttacattttttacagaagcctgggtcataatactgtgggtggcaattccaaaataaatattagtgagatagatgccttacagggaggagggagggggagggagggaggaggaaggagggagggaagagacagactctggatcaggcttccatggaattcatctataatttaacctgggctccgacataaagcatgggagtgcttctacttaatgagtataatactacatagataagagactaaaaacacagccctggtttgagccagcattgggctaacagtctagaaaatccagtgaagtgcttaccaagacatcagtggtatgtcttgatttctaaatataattgttttgagtagatgtgagaaattccttcccgtgaagtggatgggagagaaggaggctggatatcgagactggaaggatttggacttgagtcctggatatgatgtagacctggggagactgataagcttagcctgttccttaaatgtgtgcattgtggaagataattcggtcccataatagctatgtaagtattttgtagtcagcctttgccacacacattgttttttgactggacactttctcaagactcttgatggatcataaccagatctacaaacatcagagaatcttagaatgcgttgttcaagtaaccctaaggggaaaatgtagtttgatgattgaaaaataccctcccccaatttaccattaacatatcttgcaagaggggagcatagtggcagattttcaaattgcacccagaaaagatggccgttttgtttttcttttaactaaaagtggccaagatttcccaactattctatttttacagaaatcttaaaggtttcattgctgggtcagatttaaggcctgtgtgggaaccggcgacttctgccagaggctcagcgccatccctgctgtgttgcggtttccgcgtatttttacattccacgcattgctgaactgagccctaaatcactggtgcttcgcgcgagtttgcgaccttttaggcttgggcttcgggactgaatgcattattttaaaaacgagatgtttttcttgccgtggagccgcagctactgagtctccctcctccccttctcagggctccacccgtcacttccccccggttgaagtcaaaggtaaactttatatagcacaggaaacatttgggactgctaataaacaaatgttagaaacgaagggctttaattgttgggtgcacatgcgcgtttagcataataaagccagttgcgattgggtgcaaggaaagagtttcttactcctcctcccaagtgtctagattacctaagagcagatgtatggccgcctggattctggacacgttcctagagaagactgtgtagtcatttataacggtggcaccctgttatccattcttacagcttcagccctctttctgtcccccatattcttaatcactttcccgtaggccttgggccgcaccggtcacagctatcagttccacgcccacgatgtgcatgcccacgatgtgcatgctggtcttcagaaatttcagttctccacaagctctctagaccctctttattctcaggggagttgttcagtgcgctcggagcatctcgctagccacccctcctgtcctccaagctttttgtgcttcttcacaccacacagactctttctttcttcccaagtacactcagtacctgccttccattctgtctccctgcccttccgtggtgtttttccatagtgaggaacctctgagggtctgtacaattgcatccttctgcctgcggccttccctgagcccatctggcattcggctttccaacccctctctcttggatttaatttatgaccagatttaaattaaaaatatatctacatgttaaaaaaaagttactgtttcttctaggtcagcttattggctagatgttgatatataaagataaatgaaaatgcatgggtctatgaccattatggatcaattttaaatctcaaggaaaaaaagttttaaaagcatgttacagaaaaaggaaaaaaaaaaagaaaatagaaaaacaacccatacattcatttttaacatttcaatgaagttataaggggctggaaggatggctcaatggttaggaaggcatattgcttacacacacacacacacacacacacagaggcaattaaaactaaaataaaatgtttaaaatagttatgatagtataattctaatctttgttttaaatttttgtatatgcatatatgtatgtgtaatatatgtgcatatatatatttatagttattcttccatgtctctatgtagcccatattattttggatagtacattattttgctgttgtttaaaatgctgtttttttcacttttagtaatacttgtagatagtaaacactttattgttcatatatatagtgaaataggaaacattcatgtttacagttatttttgtaatttcaatcatttctttatgagaatgtgtttctcaaagacatcaagcagtgtgactttggcttggaaacttggaagttggcttgaaatagaatacataagacagaattgtgctttttgtcctgagggtaggggaccgcagtatctgaaagagaatgagccccttacgttcctatacttgagtacttggctcccagttggtggattatttggaaaaggaaatagaaaaacaacccaactatgcctagcacgttgcactttgattaattaataggcatggccttgttggaagagttgtgtccctggatgtaggctttgagatttcaaaagcccgtgtcattttatagtgttctcttttccttgttgtggtagttgtgggacacattagaatgtaagcttccagctactgcttaaaggccatgtctgtctgcctgcctgccaccaggctcccaaccatgatgtgcatggactcgaacccaaataaactcttgcttctagaagttgccttggtcatggtatcttctcaattatagaaaagtcactaagacggggacccagagcccagtctctacttctagctctataattacatttcgagaacttctgcacttggtttccactgatctcctctctattaggaacgtaatcattttactactagtctggtgggaattttgttgttgtttgagacaaagtcttgttgtgtagctcgggctggcctcaagtttcagactgtgtcaccttctcaggtaccacactcagctctaaccaggcttaaaactttagacagtagccgccaaagataatgcctctcatgtattattccaggattctgattttcccccctttatttatttgtttttctttttggcaaaacagactgctgaagattttcttttcacagaaccctggctgagttccgtgaagttagagagccctgggttcccactctgtgtgtcagatattttgagagtgctttatttgggtgatagagtaattcttgtgactgattgctgttttccttgcccagtcctcatcaagttccagcgtctatgtttctgtcagtccatctgtgtttctgtctccaaccccacccctgccccctaacatccactagtctcagcctcactttctttttgatactctgtacctgttcttgcctcagaaacttactgtttcttcttttagggatttccctatagaacagtcttggcttgctcattctggttcaccctgcccctgcccccgctccccacaaataacttcttcttggagaagcctttaaaatttccccctctctctgtctctttctgtctctttttgcctctttctctattctctcccctgtctcgtgtgtgtgtgtgtgtggggggggtgggtgggtgtgtgtgtacatgtgccttggcatatatgtagaaaacagaagataacattggagagtatattttctccttctgtttttacatgggttctggggtttgaactcaggtcaccagatttgctagacaagcatctatacttctgagccatctttccagccaagagaatcctttcttgttaactcctccttctgcccatccaaccagccctttatttatcttttaacagatgtttatctcattcacagcagatgccaggcactgttcttgacgcagggatacagcagtgagtgaaactgatgaggtctctgtgcctacgtgaaatatctaattctcgctcgttacattcttgactaatgatatatatcctcactgccacctgcagaatggcagttccatctctcgctctgccattccccgccagcttcacattccccacaacaatgtgtgcagactgaatagagaccactcctttccctcaggaccgtatcaccgtgcttttttgaagtcttcgtagcctgtcttcagaaccttagacttagtcaaatagtctctgtgcgttgggtttttctctttctgccttgtcaccaggttccaggagagaatgaaatgaagggcaatcctctctccctcatccatggcccacgcttccctcttcccgttgggtcactcagtaggcttgacccagaggacttctgtcagaagtcctgcacagatctagcccagctcccattagtgttaatgaggatgatgttccctcaactagagccagctgggagtttcagaccttatctccacacttcaaatagaaaaactgaggaaagtagggagcagttgcacagagttccgacttcaacctgtttttaataatagaaactcgcgtttgccaagcccatgtcatttcctcccccaccccagccctgtaggctctattaggaaagggaatggactaaaagttcgttctttcaaaggagagtaaacagaaggtccatatgaactgggaaccttggacatgacaatcttgcttacactatgacaaactcaggagtttcagagccccacatggagggcggtcagctggggtctacagtgctgggcaactgttgtgagaaagctggaagctttaggaacagaaggtcagtactccttttagcccatcaggtattttttgagtgcctgccagatgctaggcacagtgctgagttattggaaagtcaccatgacaaagagctgacattttgggacagtcaaatctgagggtcacctgggtgtgagtcatcccggtcaaatgaagaatccaggctcagcaagaagcagttgctgggggcaggtggtggagaatttgtttgtacaacaagatctctttgggtttcttctcctcctaaggtatgggaaacagacatggaggtgtgagaaagaacaacaggaagtcacgagtgagcatggactattgaatgaggttctgggaaagcctatgtcagggcaagcctaaaccggtctgcaaatgagctgtgttctggaaggctgaacaagtggttttgcagcggtggcttaaatagaggtgggaattttatctaggaaacaatggggcccccggcctggtcgaggataaagcagagatgaatgagaagagaaatgtaactcttctctgaaagtgtttgagtcttcatttataaaccaccatgttgtccatgcatctaccaataataagcaatgacagaggcgagtcttcatttataaaccaccatgttgtccatgcatctaccaataataagcaatgacagaagcgagtcaaatgagaaaaaaaaagtcaggccacatagacagtgaccctgctggccctgcggaaatgctgtgcaaaccctcttcctgtttcctagtggaggtgggcagatggatgggaggcagctgtgagacagtcaccaatagtccacatagatgcctaagccaggaaaaccaatggggcaggattaattctggacatggagaacccaaatcacgtaagatagaccctccatcttgttccttaatacgtttttcagtttgctatattactttcagtgggactttatatggggtacaaaaacaatatccattatcttctcagagcatagaggcacagggagaggggcaagatgggaggaatctaaatggttagaatattagtcaataagtagtccttagctggtctatggggccatttgatttttagtttctaaaagcactgactagtgtcatggagtagatgctagtatctcagattgtattttgcttggggaaagaaaagttggatcagagaccattcctggtgctctgacttggatagtgtggtgaagaacagtgcattcagcttcaagatggagcatatgtgttagtgagcgaaatctgttgatattttgggatgaggagagcaagggtggtcagctaggactctgtgggctgtcagatcagggtttccattgttggtggcaggcaattgctatttttacccagacagttgttaactgttgtttgcttggtttgttggcattggttagttttctgtcgcgtagcctcttccttctcttatggtgtcaagtgttcaggatcgactcagctcttccaaagcatgtatttcctgatttggggatatttgtattcaatctgatattttttgtccctaagtctaatttttagggaaactagtcttcatttacacagaagactgttaaagcaaaggacatactaaatctgcctgtagaatttgactttgtgacctttcggagtggcaaatgtcagagactgagcccctgagcggggtgaaataataaacaccaggctgtaagatctagcttgacgggtatcatctgaaatcacttccccgaatttattagagttaatcaatccaggctgaaaagcagagcgaaggaacctctcctaccatgttctatctcattcacacttacagcagacaacagaagttggggggggggcgtttgcttccctgttgtagtttgtgttcccaaatggatgctcctgggatgtcacttgaaaggtgataaaatgcccaagaagaaaatcacctagctgtttcccttgaattgctcttgggctcccccacccccactcccactgccgctctctttctaatagtgagacttattcctcttattcttatgtgtatgctggcattggccaaagttatcaggaatcacatctcatttaaacatccagacagacctgtagagatacattaaggagatgacccattgaaaacgaactacctatggaaaaatcgtacagggttcaggctggagcagctgctggtgacctctgagattggaaataaaaagggtaccattagttccacgtcctttctcagagtgaatgttgcagagtgatggagggtgttaagctgtcaaataccagcaagggttaataaggttaaagaagaaataaaagctggtcaacaataaaacagtgaggataaatcatctccaataaataaagcatgtcacgtcatgtatacactgtgtgggaaaaaacaaaaatcataattcacatatacgggcacaagtttaaagaattctttggtggaacatctccagattatattcttgggcatcttatatgcacatttagacacctcatctatctttttgcctctctggaagtcatttagttgtctttctggttggagaatcctctaacatcaatggataaatgtgaaatataggaagagaagagccagagcaggatggatagcacctgatgtcagagaaagggtgctataaaccaccacacgctggaggtggaggtggaggtggtggaggtggaggtgattcactctctgtacccgatgacctctgccctggaaagggaggtcagatagttgccttctgtgtggcctgactcttcctgattgaccaaggaaacgcagaactttggtggccaaaggatcctgcacattatctggcctatgtatatgcttccttctaacaagcccatgatcccgatggcacggggcataaataatgtcatgccaccagacactcatcacagtgcagcctttggaatgggactctcatagatacgatggctcttgtcacctgtcttaacattgtaagcatgatcttccaactcagctctagagtttgtgctcacgtgtagtgaatgtgaccattcctgctttagacctcacttctgatgattcacgtctccttccaagttcgggagctgcggcaagtacttccgattagtgcctgctctcacttacaaacgattctacccagtgtgcacagtgtgcacagatgtttgtgcttttaaaaggatcccattcttatttccacagtcaagttactatcaccttgagatgagatgtagctcatttggtgaaatgctagcctggcaggcattcataaagacctgggttggatcacaaatgctgtataaacagaatgtgatggagcgcgcctaaactgtgctcatgagcatgagaaggtcaaaatcacccttgttatggacagagtttgagggcagcctgggatacacaagaccctgtctcacaatgagcaatcaatcaatcaaagcaagcaatccaaaagtcactatgactctactgaacgacatgagcttgtctcaggactgcgaactcagttttgtcctttggtctgtgccatgcttttgacctcacttcatgtttggggactgcttttggaaatagccaaacactagaagctaaacagattgttggtggaattttctctgtggcgttagattattgagttctgatttttttataattattattactttttcgcttggctttgatttttataacgcttttcaaatacatagaaagcaataattgtaaccgtagaaaagttgcattgtctctgaaaaggttaggttgctgtaggcatgttgtttaaacattattctccgtgtacagctccagcttgtccacattaacgtagatatcacatttgtgaaggtgaggttcctattcttaaagagttttccagtgggtaatgggaagactatggattgcatcttggggatctctttgtttgaatctgtgaaaatgtgggaattccagaactggccttttagcatgtataaggattctggggtcagagcactgtactaagggtggcttgtttaaggtctgcagagctggcctttgatcctgctgccttccagccagtcttcatccacgggtcgcctttcctaagttgagtaatgacagaaataagatgaagaaagaatgttgatcccaaagagacaaaaccatgaactattaaaagacacaaaagtaggaaggggcagcttgggaagggggtcagccggagtgaggaaagggcaggaggggaagggcaagagagggttggggagagaagaagttcaaaatgcaccatggatgcgtataaaaaggccccagtgaaacccactgtgtatatataagtacatcaccccctcccctccttcccctccctctaaccccttccatatgcctctttgctatggctcatttttttaaaaattatttttgtgtgtgtttgcataaatatataactgtagcctgctcagtctgtttagtgtcacttgtgtgtgtgctttcaggactgagcacttgatactggataaccagtgagggagctcatccctagggcagacagcttctggtcccaggagtcctcagttccctgtagttcttggtcttccggtgttggccccatgagatttcctccttccatgtgagcacatctatactttaacttaattggggggtggggactgaagagatggctcagcagttaagagcattgctgctcttccagaggacccaggttcaattcccagcacccacatggcagctcacagctatctgtaactctagttccaggaggtccaacactcttatacagatatgcatacaggcaaaacaaaacaaaacaaaaagctctgatgtaagatagatagatagatagatagatagatagatcttttcttttaaaggtttttgtggagctggagaaatggcttagtagttaagactgtacaccattctcctttcctggccactgtagacactctattctcatgtatcccagcccacctcatatacatgtagccaaaaataaaatcataataaaaaagtagttttatttagactccaagtactgattaccttttacatgactgaccaggctcccctctatgtcatgattttcacagatagcagcacatatctgactatcctttcaggatgtgtctgacttttatatattgaacagagtaggtgatatggaacttgatcattagaagttttcttttgtaagggaaaaggtaagtaacatataaactaaatcacattgttgtagatgtcccagaactgctcaaggtgtgtaaaataagagactggatcatctatatcacatgctttccctttcaaggctcaagggaagaaggaatgaaagtaccagaagctgggctggagagatggctcagtgggtaagagcacttactgctcttctgaagtcctgagttcaaatcccagcaaccatgtggtagctcacaaccaccagtaacgagatctgtcataatgactacatgtacaaggccctcgcaagctccagccatacggagtccagagtggagcagcgaggtagccaccaagccctccttggggagctattggcaaccgaagggagaagggcgatgagcttccatagtcccctcccctccataggtcgaccaagttttagtggagtgctacacacccaagaacaaatgggcagtactaactggattcggtgggtttaaaaaagtcacaaaattcggtgagtagagaagcggggatgaaggatctgggagaagctggaggaatataaataaaagacattgtataaaattctcaaagaactgaaaaatgattgtggtttataaacttgtaattttactaagatggtagaggaaaggctttttagttccaaagacctaattccatgggaatgtgagtctgagaacacagcaggcgttaaggatacttcttcgtgaagatacaagggcagagagctgagtgagagagcatcagaggcaactgggtttggagtccagcatcctcttgcacagcctgattctcacttccttatctgtaaaatgggcatgattcccatttcagaggagtttacttgctgcctctataagtgaccatgataatgcatgctaaaaagaaaccactcaaggagcgcttggtcccctcccccccttttttgtctaaagtcatttgtataaatgatttgcataggcagtatttagttttaacaagaaaattttggagccccaatgtagaaaataaattagtatttgcttaagaattctcttttctgcaagtgaatcagctttgatgactgtgagtggttccaagcttccccaattcccaaaacagagaaataaacccaaaggctttgctacatcgaaaagaaaaaccgagatgaaggccaacgtcaggatcacgaggatatgttgtctaattttatacgttctctttacattttatctggtgaccgaaacaaaaaatatttttcaaattgtatttttaaaaaaaaagaaatacttttgaatatagaagttatcaaattttctctttccccattctgcgtcatccttcagtctttgattgctgcggagatgaggagtccctctgaggagcacgtgaccggcaccccttgactgcaatagcagcccacagcctcctctgctgcccgagaaggctcagctttcagcactttccttctttgttatggacaaactaggaggcagaaagcctttctgcccgtccccttaattcctcagcccatccctaattagtgttttttacgttaatccctaccatatatctcagaaagcctcacatgagtcggctccctacaagttttattgcattcaaagaagtggcaagctggcaacgtgcgatggtgggaatgcaagcggtcaccaagcgggggttggctgttacttgtaattgattgttcactgaagcctgcccgcgcactttagcccgaggcctgacttgcctccatatgcctagtgtcaggacttggaagccagctggtcagtcaaggcacaccctgtgggaagcagcagacacaggcggcagggtagccatcagcctcctgtagcatatttcctctgtgttttgataatagttctgtaagctttaattatgctgtgtgacaacacattcatgaactatcaaaataaatcctttgaggagatggctgctaacagatttggaagcaacagtgcttgttgtaaaagaaagaaggaatcaggcattcagaatcctgcaggatccccctcaatgttgaaaccagatgagacattctcttgccttttctgtcctgctgacaaatgctcctttaaagctctgcccttaagaagttaactgaagacactcatggcaacactcgagtgtatccaacataagcgttgtacaattagcagtggtaatgtgagcgtaaaagctgtgccccaatatcagtatataatctgaaggcacaccgcagggtccattagggccatttacagttgagactgagactaatggcattaaattattatagctattgctaagggggcattataagtgaatcccttccagctgggttggctgtgcatgctttgtcaacagtacagttcctcaaaggtatctttattgttcaggatcatttatagaccaggtgctgtgtatactagtggaagtctaagtaacactggatttaaagacctaggaattagtgtttgattcagctgggcttagggttaagtggtattgggcagttcttggtattgcatgtgtgtgtgtgtgtgtgtgtgtgtgtgtgtgtgtgtgtgtgtgtgcgcacatgcctataggcacacagatggggttgtgtgtgtgtatacatttgtgcttgcttggatggaagtgtgtactgatagccccatcatctgtcagagttacttgagttcttctgtttagaactctgtagaatgtgggaaacgacttatgggctgtttgtaagaattctgaaacccagcaagttaagaaatgagcaatttctcatcataaacacacgtcattagtctttgatttcatttatttcctcctgtgagagtagttgccctttgtgttggtaggagattaccagaatctcttccaagattagtaacattgttaaatgttaagatatttttgtcaccccaatgccctgctgaacaacaggagactgctttagagcataattaagcactgggcctatcagcttcactttactaaaggaactgcaaggagaaattggggaataaattcaaagttgcttttgagcttgagtaacgaatttggggtgaattaatgacaccaacattgtcagtgtgctctgctcaggaagaggtcacaggtcaccatagcatgctgtaatgagtatgcttatatcttacatgtaattattgcactctaatagacaagaacattatagacacttggtcactggaattagtttcccccatagtttcttgggtcagatgtatttattgaccatctacttatttttgtgacgttcactgtataggatgctttggagggggaagagttgaaggagccatagctcttccttggtggaccatgagacggggatggtgagggatacataaatcccagctgtctctgattaggatgaaaatttagacaaggacaaagagtgggtgaaggaatttgtagcagtgcatagaataacgaactttgggttgcccatggagacatgactaccaggaaaggaaaataggagcctcatcctttcaattggggtgaagctttatagtgattgagcagggtacagatggggggcagctactgtagaggcctgctggtgaaggcaacactttgctcccgccaaggacgacgttagacttgacatgaacaaaaccatgcccagcccttggggaactgaggatcgagtgtaaccagtctcaaccctgtgctgttttttttttttttttttttttactgagatgaagtttgtttgcaagtaaccaggtaatccctagaatgaaagttaagagctcttgcttagaacctgtggactattgagttttggtggatgggtttgttgtgggtaatgtggggagacttaaactaggaacacagaacaggatgagaaagtcaaggaaaccctgggctgcatatggagctcaagtccaatccggactacaagtgactctgtcttaaaaaatgccatatgtgtatataacatggaaggcagcagggagccctgggataacgctcagagaatgttatagacaagctatggctgaatgttgtagaccggcgatgtcccatctccctcagtttcaggagagagtcaaaggccgaggtatcccctgttcccaggttcccaggagctcttcaaggcactgagctgaatgtagagggactcctgctggtatcagactctcaggatctgccaggatggccaaaaatggtacaggctggaaatctgaatttaggtctcctaagcagagatgcaggcagaacaatcaggagtaataagacaaaaagaagaacttagcaggaagctaagaacaaaggatgccgtctctgttgtgaacaaggctctctaccaaatatagttttaatgctcattgctggttaatggcagttcttagcaagaaaccttgttgtgaacttcgcgataaagcagagagtttttgcaatctttgaaacctttcactttggaaatatccacaaaacaaatgggaaaaacaaacattaatgaggcagatataaaacactttggagaaaaaataatttaacatttttatggttgctatagaaacacctcagccctcactcttgctaattagtcgggttttacacattttatatttggaaatgcaaatcagttttcataaattattacttatttttttccccatttatatttacagtactggtgtacggagacacacgggaagtctagacgattacttagttatataacgtgacatacttagttatgtgagcctgacatttatgtccacaagacacttcttagtttaaatattctcctgttaaatgttgtgggaaattatgcagagatttataatttttacagaagaaaatgagaaaatgtaaatcatgtggcggctctctaaagtgctttctcatggagtcttgggaggaggagggccctttacccccagtggattctaaataataaacattttaagactttcctccagccgtgggaattatggctggcttgggtgtcttctgaactttgggtatgaaacgctgaccatctgcaagcagttactggactcttggtgattggagaagacagaagtgtttggaggaaaggaactatgggatggctgtaagatctggggcggcagggagtctggtagaatagagatgggtggctctcagactcagtagacagcaattagagatccattttcagtttacggttaggagatgggaggagcttaggcctcaggaccatttggcagacttggttcaagctttaactgagctacatcttagcctcaggattgaggcaagtgatttgaccactccaagattgctcctgtgaaatggagacaagaagaacgactggcccgttgcatagtctttgtgtaaatgagatcatgggatcgttgcaaggagtttgcttagggacgtgagcatggtaaatgtttagttagcactatcaagtaaaaacatcatagtaggattggagagatggctcgctcagcagtcagaaaaatttagatgcttccccagaagatccagcctcagtttcctgtgcccatatggtggctcgtgactctctgtaactccagtcctggaaaacctgacaccctcttctggcctctgtataccaagcatgctgtggcacataggcaaacatgctgacaagacaccaccacacataaataaataaatgaatgaatgaataaataaacaaaccgtatcatagtcaattctcattgtagatatatttaatcttcccgattccaactatgtaaaagtaaagaaaaccacaaaagaaaaaaattaatttgaagagcaaagaaacattcagataattccttgtatagcaatcggtatatatctgcaccggaaattaaatctacttataatcagacttctgtatataaatactgatgtgcaaggtcaagggcaaacacatcctgcattctgtgtgaagtttaagggatttgcgagaattaatttggctttctgtaaattttatcctgaacactaacattaagtgctgactcccgcatcactgtggaaaccagccatgcagatgatgttattgttctaacacaggggaaccagtgagtccgagacagagactttagaattagccttgctgtcctcagatgaaaaagcagtacagacatgtggtagaggctctgtcactgtggtcctccatgtgtgagggaagagtgaatgaaggggcagtagaagcagggagcagccatgtctctgattagcaggtcttggtagagtgggagcctcaagtaaatggaagccacggagaggaaatggactggctgcctagtttttttatgggaagtaaacaggcagaaatcctgtcgcgtccacactggtctccttggagactgtattccagtggtgtcttcgaatagccaggtgtgcaaatgttccttggctttctcagtcttgtgtctccggttctttgaaaaaacagaacaaccaggatcgcttccttccctaggctgatttcctgtcttttcctaaatcaataagcgagggtttgtttcttccctgtgctgtgaccccattgaaattcagagttcacggtaacataaatggtaagtgtaggaaaacaaacagagcagcaaagcagaaatacatttctttttgcaaaaatttaccacattaaacaggccaatagttttgatgttacatagccccagaaggttatgactttgctatttattatacctactgggtgatggccaggcaggaaatgtgaggtattgaaaaacagggagtgactggaatggccagccggaagagagtgctcttttgggggaagggtgacttcagatgcatcatgtctccatctgtgtgttcatactgcctgtctgaacccagctaccaggcatgacttttttccacagaagccaagggtcagtattttgaatgatggcaactcattaaaaaattattttaaatcactatgaaaacccaaagagaattagtctatgagttgttgagaaggtcagcttaccttaacagcgatgcttgaccagtgtggtcaccactggacagatgtggctgctaagcacttcaagaggagcaagttagaatcaagatgtttactgattataaaataacactggaatttgaccattataaaatacacctgcaatttgaattagctgtatgctaaaatggttttagttttggatatgactgagtaaaacactattaaaacccatgactttaaaaaaaatgtgactaccaagaacatttaaagtttcttatgtgcctggcattttattttagtagacacacacctttagagaatgtatatgattctgagtctttcttctagagtcttctgtgtctttgtagatcatttgtgggtaaaagtccaatatcctctttttctttctcaagatttcaaaatagggtttcacagtgtacggagtccagactggtcgccaactcacaattgtcctgcttccagctctagtactgggattacaggcctgtgccactaagcttggccttttcttcattcttagaccaacttgagaggtcaaggaaggtcttctgtcttggtggctcctccaggcaggtcagttttgatccaaggataaagctataaatggatctcacaccttgggcatgagttttggttggctggacgatgtgcatccagctgtcctcgcctggtcccagtagtaatgaccctgacatctggcatctaagtcagatggaacctgggctcttcagaagccatgttgaactcctgggaaccacattgcttttgcttgccataattttgcttaaaagcatgtttatttcgggggtggggggaaggagcaagcactctgagtgtgccctggtaaagataagtttcacaatttcacccaagttttatttaaccacattgtgagctaagttgatcgcatttgaactgatttcagtgattgagaacctaaaccagatccatctccaaccccaaaagcagttccaggagagagtggttgccagaggcaagagacgagaagccaagcatagctgggaatctcgccttggaaagatggaagccctgcaagccaagctatgttgtagagtggagaatgatgtgtggatcaaagcactagagtccattctagaaaaccacagatccattttctaggtgctaagttctgtcggtttttttccctgcagacattatttccagtttattaacactccatgaagcatataaggaagctatgtggacccataggcactgatcaccagcatccaggagggaactttaggatgtcctcctgatttgtcattttctaaaggcaggacacctttcatgtcagatgcaagcctagcacatggcttttttttcccctttgctcttttctttagactagttcagtggttctcaaatttcaatgggtcataaatacaaatctgtatgttggatattttataaaagatataagtgatttgctccttccttccttccttccttccttccttccttccttccttccttccttccttatgaaaactttggatcttgactttgtagcttaaggatgtcattcttcttcgcgtacggacattcttagtgcacacttccaggcaattggaatatgacatagagatagatgacccatagccactgagtccaacagctaagcaatatcctcttttcttctgtttgagataaggtctcacgctatactttagtctaccctgtaattcactatgtagccacactgttgttgaacttatggtgatccgcctgcctcagagtcccaaatgctgcgattacaggtgtgagccactatgtgatgcttctgttcttgtgtggggcttggggagtgaggagaaatcccactaacacatccattgcctctgctttcctgaagttagggcatagatgtgtgtccaggaggcatggcttttggaagtgaaaatggcgtcaggcaggcactgtgaaagggaaggcaatatatcccaggctacccacacacaggacccacaggccttgtgttctctttcgaagatgcttcaagctcagctctgagatgaacccctggaatgtctaagagtgtcagatgtagatgtcaactttgagtgcagcctggatattggtgctacactgattgatcttggagatcaatcagtaaagctatggaatactgtggtagtcagctgtgagttatgttgtatgaggaataaagtaggtgaaggtaacatttattgaggagccattacagtggaatcctattatttgatttataccatacctataggtgagttttgatcattttttaaggattaaaaaagtagaacaggatcataatttactttttttttagatgagtataacctatatgatcctctctggctgcaagtacgagaacctccattctgtctcagaaccacagaacagtggcctgtagaagacaaactgcactgctttcatataaatgaggttaggaggtcagtcacagctgaggtagagctgtaccaggctccctgtaccacagtcttctgacatcgctgtaaggtagcctgttcctgccaccaaggatagaaccatggccatcactgcagtatccctagtggcagaatggaggaagaaaggcacaggggggaccgcttccttccaatgacattggatactgcagacatccactatcctcttgtgtctttggctaccgtttgatcatatggtgacattgttttaagggggtctggaatatgcagtttttattttgggtgtccagatcaatattggcaatgttatcacgtcaggataaagaaggaaacaggcatccgtggtcaacaacagactttggtcactgaggttgtcttgggaagccagttggatctttctatttgtcccaaactacaagaattaagtgagaagtagtgtggctctttggaaagcatttggcatcattcaaagcacagtagctattttaaattgtaacatgactaagccttccttctgtctgttaactttgtatacatggtgacagtcactagagaaaacacccctttgctgcatcttctcatacatgtaccattcctgttaagcaattctcacgaatcctgaggcttctgcagaactcaagttttcagtctgtttctgtgagactgaagtgctgagattcactaaccatgaatccccaaagactgggagaagaaatcataaaagataatgttttacactatgtgttcagaaagctgagtgttgatgctatcacagctgaagagaattttagaagtcactctttaaaaggagtggggataaatgtgaatctacccactctgggtctagctatacatccatccagattgccaatggcctgggaggccccctttcttttaacacggaatgttttcattcagagtcaatgcctttgatcacaaggtgtgtgaacaacatacataggatagaaaatgtttcctgcctttagtgtaggctgggtcttgtagttactgtaggagatggggcagtaagctgaaatccttcattgtcttttcaatggttacatcaatctggattcagcttcatgtgcacatgggacgctggctctgtccctctgctgcacctcagacatgacattcaggccttccaatctcactcatgccctgggctcttctggagctagagctgtgtctggagggccttccttacccattacctagacctcatggttcaaacccaccctacaggaggccctgtgagtccctctctccctatagtcactctctgatgctgggctgggctccatcagggagtgttaattaatagagtattcatgttgtgctccttacatgtctatctagtgtctgtcttcttccttcagcctggaagcttagtgaggacagaagttatgcccagtttggttcacatccctgctctctagatttgcctcagtgtttaatgaatatttatagggtaaaatctctttgaaaattgatttattatctatgtattattctctggtagcgtagaggtctgttttaaagtaaaaaaaaagatttattttttattattttgaattacgtgtatgtatgactatacgtgggcacctttggcagccagcggcatcaggtccctctggatctagacttccagaggattgaagggaactcaggtcttctgcaagaacactatccactctctgctgagccatctttccagccctgacttatttttaagcttatcagttgttgagggtacccaagtgctagctggctctgtcacaaggaagtgccacagggtggactacctaaaccccagaagtgtacttcctcacagatctgggaggccagagtcaaggtgtcagcatggctgccttcctcggaggacctccttcttggttaactgacaccatcttcttcttgtgtctttgcattgtctctttctgccgtgctggtatctgctgacctattcatatattatggacaacagccattctagataagggctcttctaatgaccttggtttattttaattacttctttaaacacactattgtaaatacattcacacttagggctctagcagttagaacttctatatatgaactgaaggggcacaggtcataatttagcctctgagtacagagagctggagttcctcagattgtaggccaggctggccttgaactcacagagctccatatgtttctgcctcctgagtgctgggattaaaggcttgtgttaccatatctggctcattgtaagcattttaaaagcagcagctaaaagtggcccatcctcttctggaccaagcaatgaagtgccagtggctttgaaatgacatagcaaaaaaggtgaaacataggttctggtagacccatgaagtccaaatcaaagagcaagattttgtgtgtgtgtgtgtgtgtgtgtgtgtgtgtgtgtgtgtgtgtgtgtgtattctgaactactggtatcttatctggtgagacaggcttctttacaggcaaattttttctttttcttttctttccctttcttttctttcctcttcctttctttcttttttctttttctttttttttttttggggggggggtgacatttggagttaatataaggaaataccctttgtattgcttggtattgaaaatgtcagtaaacaaacccagccttccagaagggaggtggtggtggggagttggtaacaaaagacattgtttctggatgcaggaggtaacaggagtgtacagaacaaaggttgactcaaaataggctttgtagcaaactcttgggtaacctcctttcccgttatgttcaagtggccctgctcaagataactctcgttattttaattagtccaccacacttaccaacacaaacacactctcaatttcagggctgacagagggctaggagtgtccttaaaggatcagaaaacaagttgggctgttgaggacttccggcagcgagctaacaaaaacacagcagcagaggatgtaactccaggaggcgtgggaccctcacagcagtggggacccgcacagcagtgggcatgaaagcctgcctttccgttttttttttttcagaggtttagccctcacatctggcagacctgtgacaatcagcgttagaccattttagaaatcagataccctggttaccaggaagttgatttgccttccacttccttaagaaaacacacattaatatttaagctgggttttcataaaagaagcgttgtgtgcctgagatgtgaaataaagccagggggctgggaaagcccctcctcccgaagataaagcgaccccctccccatgtaattcaaatcacccttcagatgggaaaaggagaggagtgggctccccctcccccaagggccttgtggaatttcctatctactgttgtgtggcatgtgctataatgtgttaagagctggattttaagttaggaattccttctttggggaaagaagctggagagtcacaaaggttaccttcgtaaaagattccctgaaacggtgtctttcaccattctggtttttttgtttgtttgtttgtttttgtttttgtggggttttttgttttgttttgtttgtttttttgtttgtttgtttactttttttccaggtagagccatgtggcgtctatcctttgaggaccaggctcaaggtgcatctggctagcaaggtctggtcttttgcattttcctgcccagccttatttccacttcctatggagatgacatggagatagcgccggatcaaacaggtcccaccatcctgataaggccaccttagatactccaggtgatttcggtctgcctgtaaagatttaacgaagacgaatacaagtcttaaagaaaaaaaatttttttcccatagattggtgtaaatggtttactttaaaaataaacattttaaatcactttgatctcagctgctcgaaagatacaaactggtcattgctctggggggagtgttttccagggttttaaaccaagcataagccatttcctctttgtacacaagatgaataatgtcccagaacagtaggcacatgaagaagaagcaactgtgtcactgaaagcgagtgggatactgcattggagggcatgggaagacctgaagttgggtttgagtttgtgactgagattttataatggttcaggccactttgtgtattcagatttgaatcctacctacaacattattctgttcctgtctctcttcctctcttccatctctatattatcttcaagactatcacaaggtttcctcacttgagtccttaaagacttgtctttgcagagcttcaatcttgctttctgcttgcttgcttgtttgcttgcttgcttgcttcctcccttcctccctaccctacaataaaataaaataaaaaaaacaaaaaaacaaacataaggggaaaatacaagacagaaataacaaaataaagaaaataaataagaaagaatagcagagaatacgatagtgacaataggatatgagacgagcataaactctcgatacgactacacaaggaaggagacaacgatagaattaaacacgagtactacacacaatacaaacacactggcacactatgcagacaataaacgccccgcaaaacagacgcactcatacactagaccctaagacgagcgcaaaaggaacatccagcatacaatcagtacaaggtagacagacacctatcacagcagcaagatacaaagccgtgatagtcaaaacatgaagacaaaaaagttcctatacaaacagcaccagtacatagctaccaccgataccagcctatcgcctattactccacccacttgtccactaacaacacacgagacacgagcaaaaagtataacaaagcagctataacgcttacacgaatatgcacacgtggatagacacgcagcgtacaggcacatcagtactcagcacgcagcgcaactaaaaatacaaatgacgaaacacattgttacccaaaccgatcgctactcaggaacactaacaccatcaggagcgaattcacaatacatacaaacacaacataatagaataagaccaagcaagtacaagagtctcgcaaatacacatacgagcaagagaggcccataggacccctggactcacacaaagagagaaaaagcagagaacagagacgataaatgtaatgagtaacacccgcaatcccactagggcaatacaccctgacacgataaagaatacacaacaaacaatacagaaataaagtacagataccaacccatgatagaaccacaaacagaaccacacgtttgctgcccaccatatcctaaccacacaaatgaaaaatcaaaaacagaacaaaaccacaatataatcaatcacagcaaactgacacactaaaagtaaatacaaaaccacaacacccgtaacgaaaaccaacaaagaaatactagaaaacaaacaataatcaaagtcataacaaccatatgataataaaaaaaaagaaaaaataaagcaaataaatacatcacaaagcaaaagaaataaacacagacaaaaataaccagccaatgaacacaaagaaacatatcctactggaacagggtcgcccaacccatccttccnnnnnnnnnnnnnnnnnnnncctccctttcttcctttctctctcccctccccccctctttttttttttttaagatgaagctttaaactgggcatggtggtagacacatttgattctctcacttaggaggcagagacaggcagatctctgtgagttcaaggtgaaggacaacatggtctacacagcaatttctttgccagccaggggtacacagtgagatcttgttgcagtagaaggaaacactttgttctgttagacaattgttgcctgctgtgcaggcattgtcatttaaatacaatcccaggacatttggattccttggtgctcagagttgccctagttaaagtaacataaattcaaggggaataattttcaatattgttataaaatagcaccagaaattattcaaaggcaacatgatcttgaaggttttctgcatgttttctttacatatgtgccagctaagttaaaaacacgtatcctcaaactgttcctttacattttcccccctggttttgtatgtgatgcttgaatagtaatctaacacagggcaggcaggaagctgtccttaggaagttcgtcatctgtacatagtcacagtttgaagtcttatgtggaagactgaggaggcagaccaatgatattttaaagacggagtggcatagtgaaagaagtttcatacttcatttctaactggctttcgggctgctaccaaaacagggctcctttgtccagttctgcagtcactgaatcggagagattttaagggagaaagtgctttgcaagagaaggactggtcccatgtgagcctcttagccactataagatgagtgactgagaacattacaattttcagtgcacagagagaaccacagagtggatgaaaggtaatttgcatgcataagcctgagttctgacccatgagatcttccacaaacaagctgtgtgaacttaggcaggacctttcacttttaaaggaaatccccttatctgtacattaaaaagagtttggcttgacatcgagttataaatatatgcagaataaaagcaaaacggagatggttgagcgtaaggctggggtggccctccctaagcttgggtccctgttagccctgaaatgcctgagatcctctgagcagccaatggacatgcatatgactagtctgaaagtcatataccctacagcagcatcttatattcttgatggctcagcgggttagggcactgtccctgcaagccctgttagtgacctgaggttgacccatataaaggtggaaggagagaaccgaatccacaaagttgtcttctgacctctgcatgcctctcccaagtgaggaagaatttagaaaagaattgaaattgatgaggtctaaagccctttggtaacatattatatgtagaaacattgggtaatatggtcaagttgaaagaggagactaaaataactcttaagcattaaatacccagcgatattaatttgatataaaagaatatatttcttttttcttcttgtgtcttactgtctctgtttaagtataatatatgtatatacatatgtataaagataaaagtatagatacatttataagtatctacctatcaatctatcatctatctatcatctatcaaatgatcttagtaattgagtgtcatctgtctcaaaactgattttaatttcaaacaaatttaatctggttatccatatgcactgcttttcaattataacttctagtagacttcatgagatattcagataaagactaatgagatctctcccatcaacacaaatttatataaagtcttaacagttttgacatatagtttgtcttacatatgcatatggtagtgtgtgtgccactgtgctagtgaagaggtcagagggacaacttgcagggatcaagttccctccttctgccatgtgggtcctgggctttggactcaggtcaggaggcttggtgataagtatgtttatctgatgagctgttttagctttttttatgccctgtggaaaatattttactgttgatttattattccacttagccattcccattattgtatatttagattatttccagtttttttttatgacttaaacatcactatgataaacatctcagaatataaatcttcagctgtggctctgattacagtgttagcataattcctacgtgcagaatgctggagtcaaaagcttgacttcagaagtgtccagtgccgccattttctttttgtggggaccacttgtttataaaaatactctccagaaaatagaaatccgatgatttgctcagaccattaagtgcaatagcatgcttaagaatagggccgggaagatgttcttacggattagagaataacatatgtcttccatgtcgtgatccctttgttctgtattatgtgatgttttacgttttggtgactagttaagtcagtgctgatatttgaggcataactggggcctatctgattgctaaggtgttggtttgttctttgcttctctgcaatgataccaccatctaaacaaacaggacttgcacattttcaacccctctcgtttatggacttccagtattgttttgttttgttttgttttgttttgttttactttttaatcaaaaccgtgagtttggagggtgagcataaatgtgtatttaaggtgtggatgcttctttcagcatcctacctgcttctcggccagcagacccctcagctgagcagagttgctctagttgcttggtcattcctgtaaggatatatttgaaaccggcttccttgactgtcttctaacctagaggcaagcacattcctcactttcccccaaccagagcgaaccaaactttcatgtgcagagtgtgttttcagtggattagacccaaagctgtgttgttctagagtcttagaactgctgatgtggtacacaatcagctttgtagcaaaatttaaatgttgatcttagcatataaacacccatccaaaactatctcagagaagccatatttaggagttggcttaaaagtatgtctgataataatttctcaagcatgtttttgtttttggtgtttttatttagctacatatttatttttccttgactagaatcccataaacaagtcctatatacttctctctctctctctctctctctctctctctctctctctctctctctctctctctctctctctctccctctcctttcctcccttttccagctcttttattcttctgagccattagaagacgacattctttattttgctgacaatgacttatttgtacctaattgcctgaattctgagattgttaggaaactgtattgacaatgataatttctagttgtctcacaaggagggcacgtgaattaacacagatcccaatcaaaacatggcacttgagaaacaaagccccccaccagcgactcatttctgacattgcctttgttaagcatcgcattaatagtaaggtgacactcttttgagaagtagagcgtatgtaaatagcaagagttcttagaaacagaattctccaagtcagatcctttctaccacttcataacacagaaagcaagttagacagcatccctccaatccagggagcagaggtcagcattgttttcctgctttttaacaacagaactttccaatgtgtttggcatagctggggataatctcacccattgattctgtgttggttgaatcttttcatttgcatgccttctaatgtttaggagttggcataagtatgtagcgtatagtgatatctgaagtaagtcaccttatacgattgtttgttttactgggaccccatgaaaagtgtgccaagtctaacttttgggttttccgctttccctttctctctccgttcaccctctttttcctttccagttgttttatgtttgggtacttgagctgctgagttgtaaaagatattctctgagcaacatcaactgtgaactccaggttgctctgtcatttggtgattatggctcttgacttatttttctctgtagaagtgggacaaatgtgctgaattcactaatcaccaaattgcttggttctgctcctatgccccacacatcctcttcatatgaagacttttacaagttaatctattgtaaaattagattgtcaaaatggacagagtcactaccaccccggggataatggtgacagacctgaagctccagccccactcattcctctgtagaaaaccatctcactaacccgtggctctccccagctccacagggagtatgagttcttttgtagccccagctctcccttggaagggtgacccttccagttttattgccctgagaacacacggggtccctgatggagaggcccctctctgaggtccctgtcttaagtggcagagatgtaatagtagctgtctaaactgtttctaattcaattctcttctgcactgtttcgcagacatggagtaatgtatccagtggtagaggaagaggcaggtcacaaggtttgagttccagtaagatgtaaatagccgctgtacttgcaatattaaatgacacctctgactgtgacaagggatgcatgagaagtcaattctatgagatgatttgtttttctggtgttggggatatacagtttagaaaattttaacctataggtaactctaggtggctcaagactagatttcaagggtggagtagtgaacctataaaatggaggtaacttttttttattgggtggacattttctctgggagaagctttttatcaagtttgctaaaagtctatgctcataaaaaagtaaaaagcttacattaatctatctccttaattttcttttttttaatatttaaaagttgatattttatttccctttacacagaagagacaaaagcctgcttgagtctatcctgtgatctttaatttccactccctcctcctggacatcttataacaaatatacacaggaaggaaatataaaactctctcctaatagctccgagaaacgcactgtgagagcgctttaaaatcagattacaaatataatttccaatttgttgggggagaaaataagaaggaagagtcttgaagaatacaggataaagccgttgtgcgtgcatcaccagtgtccactaaattctgggttggcacacagctcagcacagtttttggaagcagagagtttacacattgtccctatggatgacacttaggggttgcacgctcaggtttctgatgcttgagcaggtggcaaggcaagcagacaagtttcattttctgtcatcataaagtcctaaaggtgaacggtgtcatcagttagggatatttcaaggtctgattgggccattgattgcacttacgggctgttttttcctctgtgggttattttggatgaatttcaagtccttgacagattccagaaaatatatccatcttactttgctgggaagctatgggaacccgcatgctgctgcccgtggccactgtgaatgtgtagtgaagagcccagagctggttggaggacacttcgctctctttaaaattctgcatttcccacaaccaaatttcattagtccctgacaagctggaagtgttactgtgactatttaagcagcaggagtgcatggtttgctggctggcttcttcctggaagagttttgcattatggagaacttggctacagattgaaagtggccgtgtagcttttgggaccctcagatgtccctcatcctgggaaagccagaatgtcattactggatcctgtgggcttggagtacacagtggggctagaggatgctaagacagaacgcgctatcaggtagtgacaaagggagcatgggatctagaatgtgcagagtggattgtgagcgccgctctggctcggaggtagactcagactacgtccctttcaggttgctactttatggcaaaattatagtgtgacacagggatagggggaccgtaaatctttcccccactcttctagtcatagctgctgaatcttaagacataactttattgggactgacttccctacgctcctctgtggaaggaacataagtttaccggttctgttgacttaatggagttaggataagaggaaatggcgtgtgcaatgagcattcattttgagaagcattttaacaggaagaagggattggtgtgtgcatgtgtatgttatgtgtgcatattgtatatgtgtgtatgtttgtatatatgtgttgtgtatatgtgcatgtgcatatatgtgtgcacatgtgtgtatgtgcatatgtgtgcatttgtgtatatattgtatatgtgtatatgtgtgcatgtgtgtatattgtatttgtgtgtgcatgtgtatgtgcatatgtgtgcatattatatatgtgtgtgcatatatgtgcacgtgtgtgcgtgtatgtgtgtgcatgtgtgcgttaccttggtagagacttttctaatgtttctagaagtcacatcacttagtaggtcataattctacctccgaagttagaccaggtcctgactcatttttgggaaacctaaaggaagccacaaatgcagtttgagccctctgtcctcatcttaagatggaaacagatatagtttgcctgtaacaatgtgagagatggagtatatgaagtaaattataagacttggttctcgtacagtgcctgctggcacatgcttagtgtggggtaaatgtgagctattgtccctttacccacattgttacgaatgagcacatcctgaaagaaaaaaaaaactcccctcccataggggacccaagaaagcacgccacacaggcaacctgtcattttagaggaagccatccaaggtcctctggctagtcctgggcaatcacctattacaatcagattggaacttcaagtggtggcagaatgccagtttctctggggttctcggcttcctgtgccttccagtggtattcaaaatacttcacaattcaactccagaaatttagcacatcttcagaataaattattattgtcattagcacattcccacccaagaaattctgtacaggaacagaatgcccagagtggaatgcactctattcgcccactggtgagcccgggttttgcttagacggttgttttgcatcctgctttcttgtgccctgaagctaaaaacaagacacacccggtgctgtttgttgatctttgacgaagggagttagcagagacctaattgaaactgttcaaaatgaccataaggatgccagcccaagagcaaagtcactggctcacagcatcaagatatgaacatattagcgtttcttcatcttatccatgtaaatgtgtcagacaatgggcatattcctaacttccgttacgaataaacagcaatcaaaaggaaattccgtttttctcttttccccaaacttcattctgatttcagtgattttagtctactttcctacccagctgtgagttagacctccagctgtccctgctgtcccttttggtccttgtggaaccttgtcatgtgtagtttaacatgaggcagggcctttttattttacagctttccagaggtgatagtttctttgcattttacatgactataagccttaaaggtgaagcaagctacagtcagaggtgccctaatcatcccatcttttcaaaacagcactttaaattttctttctctatatgtaatactttccactatatatcatatatgtatatacgtgtgtatataacatgtacacatataatctcagccccgaatgtaacctaaactttcttccatcaaaggttatggaaatgctcatttttttacttttagcaacagggcccgtggatccttaagcctggaaaataggaaataattcactctggctgaaaagggtggagatttctttgtttctttttatatttattcaggaaaagctgacaatcgtcccacattaatgaactacaccatcaatcaccgtgttgacaatgagcggaaaagctaggtatatgtctggctgacggcatattgcctttttcagtgagggcatggctgtttatagcactttcgttggcaggtccttttcatgctcaaacaagaatagaaagaagaattagataggcagccagtggaaagagctttatactttcagattatggataaagcctaggagaaagttaagaatttttttttctttttgtagcttgtgtgcttattccttaggacttaaagagtcaaggggaaaaaaatgaggaaagttttgtttttttttttctctctcactttattgccttatttcatcggtctggcccaaagataatagtataacaatttctcagcttttatccactgtccgtacttgaaaatgagagtcgtgaaaaatttaagtagtgagccggttgaatggggagttggactttcttccctctcttctgcgttagttcaggagggaaggggaactttgtggaagccctgtggctaacactcagacaagactgcactcatctctcttttctgtccttcaacaatccaaacagtcctgattattgttaagttgacaagttgaccccaaagttcaagccgaactttaccatcagtgactagtaaattactaggagtcccttatgtgttagaaacaaagtagctattacctcaccctgttcttgtaatagccttgtggtgtggggggtgctacttttacagataagaaacctggggctcaagggggaaaatgactcgtacagccgctttgtacgtgaccaagtcacactagtgactcgctctcaactacagatatcagtgtttaactaatttagcagtgcttctcaaacattttggccgtagaacccgttcaccatgttagaaataattaaggacccaattcccttctgttaaaaagctggcatctctgtgttcagtgctgtgcgctaaggggaaagaaaaaattaaatgtacttcattcttactcaaataacacaggctaaccgggaaaccaaactatgttgtaataaatatattttcaaatgttacaatagctctgctttcccaaacaaaagcatttagtgaaaaagagtggcaccattgtacatgtgtgcaaatctctttaatgtctgacaggagaaggcaggatgctcaaggttgattcttcattctgtcactgtaagtcattttggtgacagtatacgctgggaactcaacttcgtaaagaaatgaagttagtgaaagggggagcattttactagtcttttccagataattatgaatatttttctttggcatggcaccaagcctcagtgaggggtgacttctttggtgtgagttgtggtgcggaagttgaggccaccttgacaaacgtgcttaggcttcgcattcacttccaatacacagatctccttttgaatggtcatcatttcctaacttctgttgggaatgttgattccctagttacatttgttccatgatttggcctgcttcatatttaatattaaaatcaatattcgtcaaggtagccattaacttcactagaagttatgctggggtggttaagctcagcatgtgggatacaagcttttcaaaattgtagtttacactcaaaagcttggatttgtatcattgtcaatgcatgtgtcaatcatctttaaagtaactggctcactttttctttttttgaaacagtgtgccaactacccaagttgaaattcccacagtctgcttagtttatactctcaagtagaatgctgtttggaaaaacagaaaacaaaacaaaatagataaacttaaataataataataaaagcaacaacaacaaaaatcccaaatcaaaacaaacagcctaaaaaactactggttcaacttacaactcaaacagttgctttgtttagaagcaaccactgcccttggcatgcaggagaaaaattagtctgcctcgtgcacctcaagtttcaacccacaaaatattaactataaaagggtcaagagataagaaaatatgctatttttaaatggtatagtagaattatggggtttgctactttatggtttcacatgtgtactttttgcaatctggcagagactacagtaagtcccagtgtggcttagtggtacaaccttgatgttcacaaagcactccatgctcacctcagggtgcttgcagcttcagtatcctaccaggacttattatttgaaaagtttcttagacctcatgcacccccaaaagactcaaagaccttcagggttctggggcacaaaacatgctttgtgtgacactatctctatctcaacaaaaagctagtcttatatgttcaaaatatgtaggagaattagagattagtattcttacaatgaatacttttgtgtctgtgtctttacaatggtggatggatgctttggtaaattgttggtaagatttttgttcttgtcttcatcatcaccttccttcttcttcttcttcttcttcttcttcttcttcttcttcttcttcttcttcttcttcttcttcttcttcttcttcttcttcttcttcttcttcctctctttctctctctctctctcttggctctttgaagaaaagaaagaaaaagactcattcttagtcagttgatgacattattcttaaagctgaaagttctgttcttgagctgtgtttttcctattaccatgtcaactctggaccccagtagttctctctgtttacaatcctgaagactggccacttagaactgatttaaaatatttgtttatatttacagcattttaagagggaaaaacaaaacaaaccaacttctcacaaatgttttttttttaaacaaatggatatgaaaatatcctgtttcttttctctgaagagacaaagtttaaagagaaatcctttgatgaggtctaagattcctaaaatctaaacttagctaattgtgaaagagatgcctctggacaaaacaggtgtgtgctcattaaagcacagaaaatttagaagttttatggaagctcgttgtaagaagtaatgtcttttttaattcatgccttcattgttttgggtaagttttggttatattttctattcttggaatattacatagattgaactctcttcaaacattatatgtattatattgtcagcatattattacatggcactgtgaatggatccaagttgagtcgctgagtaaaagccattaatatggtctttcgttatgttcactttctatgaggttattttttctttcaaagagaaaatgaaacacaaaaaaacctcttgtgtgtgtttgagggttattcactgcaatatgagaagtgtgccatttcggttaagcctttgaagcttccagaacagaaatacttagggtgtgggcactaaatttttcaggttgtggacatttttcagactaggtgaaaagcatgcatagcattactttgtgattaggcatgatcaaagccctgatcaaaccaacagcatttctcttaagtgctaagctctcagtgacggtccagtgtgggcctgtgatatgattctaggagacacacagatgccttactttttcttttaaaaaccttattattaatggtatgtttatgtgtgtatttgtgtgtaggtatgtgagtatttatgtgtgagtatgtgcacatgaacgtaagtgcctgtggagatcagaagagggcaatgcattctctggagctagatttacagactgttgtgagccactcaacagcgctgggagctgaagttgggtcctttgcaagaatggcaagcattcttgactgctgtactattgacgtctctccagtccctgattttaattattggtatcaggtacttgcttttaagactgctttctatttactggttatattttaaaaatatttttccctaactgaattaggaacaatttaaagagaagccataagtaaatgataacaagagcaatggatggattggcaaaatgatatgccaataattgaagcataaggaagtgggaatagttgaagttcaactttctcatcatctacttagccattatgtatggaatgcctccttctttgagttactgcacacaacaaattgggttgaataaattcagaataagtccctaccctcacggagctctatcctaggagggaaaggaagtaaatatgtaacataaaggcaggtagtttataaagcaaaacaaatcaggatcaaggatagagctttaggaagtagatggttgggggacttcagaaaagcttgtcaaggagttcacaactgagaggaacctagttgggactgagttcattgggtaagcatgcattgcttttggtgttggctttaatatgtacatgactggttggaagaagctcataatatgggaaatagaagtctcttttttttgaaatcttatttttatgtgtgtggttgtttgactagatatatatatccctcctctggactataggaactgcacacaaggtgcatatatatatatatatatatatatatatatatatatccagtcaaacaaccacaaggtgcatatattatatatattacatatatatgtataatatatatatatataatatatgcacctgtgtaaatatatataatatatgcaccttgtgtgcagttcctagagtctagaagagggcattgagtcctctgatactggagttacagacagttgtgagctgccatgtaggccctgggatttgaattccggtcctctggaaaagcagccagtgcttttgaccatggagccatttctgtagcctaggaaacagaagtcttattagcatacgatggaatagactatgagaataacagtgtaagaaggaaactttgggagcgaggaagaaagcaatggcttttctaagggatggaaaacgagtcctcaaatgtcttagagggcatacatgtaaagtgagtctttcagaatgaagaggtagctggggaagaagacaacaacctgagtgtgtgcaggtacacagtatcatgtagtctttgtaggtggtctgcagtggctctccagcagatactgctgaatggaagaaccgcataaggagtgctttgaggtttccagcacactggggctgaggccaggtgtgggaaggggtgcactgcagcattctggtcttctctcgaccaggtctctgctggagaagattgacaggtagcatccctccatacttacaacacttgtctgtcagtttggggcatgcgtttgcgtgggatgaagagtagcatcaggaaaacctggagagttggggaaatagatcaagaaagacccagaaaagagtgattgaccgtgaagagccaactagattgggcagactgggctttctgggtggatttaagcagcagcttagtcagtgtagagggcagaagctgcacctgaaggcactgaggggtagatggggaccagcgagtctgagggtggagatgagaaactgtttacagagtcagagatgccagagcatctcacactgagtttgctgtgtggaatgttggtgttttctcagaacatgtctgtttgtctagtgctgcccatggatacagctgagcagttcatctgcccggactgtgctcttgagtaggtccccgtatgtgtctctcccttctgtttggacaagaggtccgtaggaccactcagggtctgataattctaggagatcacactcagaccttgattgggaccaggaattcactttgctgaggacttggagcccactggttctcttttctataggggaatgttttaatgtacacagctcaggttgtgagagaacccttgtgctatctgtggataaatgaggagggacatggggatgtgaacacagaggtagttatttgcatgcattattcaggcccttttaaacttgaataggaggcatcagagatgtagctcagtaagagaatgcttgactatgccggagtctttggatttgatcttcagtgccattttttaaaaagtagatctcatctagaaatggaagaaatgagagctaaccttcctgtgtcatcaagttcttgagtgaacttgatgcaagatcccaagagttaaaatatcaaacttggcctttcagttgtaaggaatggaagggagaagggatatatgttagtgtagagaaacaaaatcaaaacaaacaaacaaacaaaaaatcaacaaaatgaaagtgtgttgctttgttttacagcacctaaatatttagatatatgatatactagcctctttttatcagttacagacctaagtgcttcagttctttgaatttgttgactatagactagaaatacagctacatatctagtgtgtagaggtgcagttcccagaaggctttacaagttggctattactaagcacaacattttctcaaggcatcattatgatttgcctcacattccagcagcatccatgtgtttagcatccttggagccccataaagaaacacacagagtaaacgttcatcatccagggtgagcctgtacttaggcactttaagaaggaagatttggagacggtgagtacatcccctccccatttgggggcttaaagggagaaatcatatcctttcaaatcacagagcagtctttgtggctaacctatagaatgtgattaattgaaatatttcataaaaatttagaaaaattggagctgaaccatcaccaatttacccaggagatgtattaagaaattatatgcttacaagttatttataaagtcttggacatagttcttgatctgattaagacaatactaagtacttccagaaaaattcttttctagataaaagatccaagaattcagtgtgatcatcacatttatccaataaaagagagggcgtaggaaaaagtgaattccaaataagtcctgtgtaatactcctgaaagccatgaggtcaccagtaaattaaagtttgattcaggacccagaatctgttataagggttttgtattctccaaggctagatgccagactgccagaagcagagcatatccttagagaagcagaattgaaatggttctggtgttgttacagtacttgaccccatcaccgcacaactggaatccaggaggtttgactaacacatttagggggtgcgcttgcatgcatcatactacaaaattgcattgatgtttcagactgaagaatgagatcatactcttagctcatagtttcggatcagggctgccctaacctctaggtggggtggtacagaacactctgggataggaaatagatagggcctaaggctttactgtgcatctcgctggagccaagaagggtgctgggttctttctttaactgtccagtgagtcccgaccagctcctggcaagaaagtcagtgaggttaaggagtatagcagagctcacagagaataacacatgttagattctggcagtgtaacgtcctactctgggcttttttagcaacacccagtggagtgtcaaaaggattcgtgcacaggagatggcttaatttcctagtctcagggttgcagacaggagttgggagttggatagtcacagaatcctgtggtatttgtgtgtctatgtaatttggaagcagacacctcaagggatcccccaggtttagagctgctgatcctttgcccaaaggttttccctgcagtgtgattattattaaataaagtatcacaccaggaagatgatgccccttaatacttaggttctagtcatcttgtggtagcatcataagactccaagagcaaggggatattgagaagtggaagacagaagatctgggaaagtcactgtcctacactgtgtggctggagtcccgccaattatgaggctgacactgacacagaagagaaagtgttcttagaagttggccaagatactaagagatgcctgtcttagtcagggtctctattcctgcacaaacatcatgaccaagaagcagttggggaggaaagggtttatttggcttacacttccatgctgctgttcatcaccaaaggaagtcaggactggaactcaggcaggtcaggaagcaggagctgatgcagaggccatggagggatgttccttactagcttgcctcccctggcttgctcagcctgctctcttatagaactcaagactaccagtccagagatggtcccacctacaaggggcctttcccccttgatcactaattgagaaaatgccttagagttggatctcatggaggcatttcctcaactgaagctcctttctctgtgataaccccagccgtgtcaagttgacacaaaactagccagtacaatgccttaatggacaaagcctaatgttactaatgagagggtcctggtgtctctcagaggatgtcttagcccactggatgtgtattgttatgggccaaatgtgtgcctttcaaagtttctatctgctctcagattgttcatctggaacaaaacccacggaacatgctttctagttgtgaaattttccatgatgggaaaagcaaccttgaattttctgcattagtagtttgaattttccgaatgagctggggaatttttattactccgtactgacaagagggaagagttcttgtttaatgaaacaagccactcataaatttttcaccttggtgacttgagcagccccttattggatctcttaatgtaatggtgtatttgagacttttaaagtagaaattaatgtctacggaaggtaacttcaaatggcaagatgggaaacaggggtgcagcttagtcttccttgttctgaggcatcaaactcccatcatcactgatgctaaagtcagaggaaacggtaggcacagagttccaggaacttgactcaaaaggaacgcagaggaatagagtagaagagaagtcatcgatgtcaggagactcctcccaggttgagtcactcccttgtggctatgttcgtacagtcaatcacaaggcatgttcagtgtgtgtgtgtgtgtgtgtgtgtgtgtctgtgtgtgtgtctgtgtgtctgtgtgtctgtgtatctgtgtgtgtctgtgtgtgtgtgtacactaaactttgtgaattagaactttcaagatggctgagttggtgaatttgggcaaagctacccgatgtcatacccaagtagtgccttgcgtgagctttctcactgagcttgtagaaaactcagtttgcacatctatctgttcatattattcaaggtttccacttgtctttcctcagtggaaaactgtcagaagctcatcaacttggtccagagtaaaaagacaggacagtgttctctttgctctgaggtggatttcagaggcttcctgctgtctgttctctccctgcttcctacctgccagaacgtttggctaaggtatggggagtggtctgaggatgagacatagatgatcgccatgcctcacctcacctgtcttccacttcaaaaagtggatgctgaaaccctttctcccagtgccaaaggtgatgggaagtcggcacttgtatttctcttttctgcttgtttctttagaaactgcaccccagtgatctttttctccatactctgattactgcttgagatttttgcagttagacacgtgtaaacatgctaatggttctggttggtgtctaaggggaaaagtcatttgttcccttttaatttctttctgatcatagttctcaacttgggtttccaagaccagctagagtcagacacagaggccatggtgggcaacgttatacatcatgaggtgttttatccttattataaacctacagcatccccagagcacttaggaccaatgtgatggggaccattttccagttatggtttagaggctagtcattcagttctttggtgtctacttccacttatttcttcctgttttcccctttccatagcatctcccattatcactgccatggctgtgactaaaatttttattttcattttcaactgaaaaacactgagactcgaagacccctcccccacctctgtaatccatcgatttggtatctgtgctggagaccaagcagagccttcttataggtcacactcaacccctaataaatctaaggaaacagcagggctcttaatatacccccagtgaaggtaaatcttatgagattacatttcaacagcgaaaaagacaggcagaataatttcggtgtgaaatgtgtaaagccatatttacagagcatctcttgatgctgttcccagatgtctttaaaaagaaactttttagctacatacaaagaaactgaaaaccaggaatataattaattggcaagaaatataaatttattataaaaaaaagaacatcaacaacaaaaacaaaccaaaaacaattataacaacttgatgaaatatatactttttgagatatatagcatcaacataaaaaaggaagaatgttaggatccagaaatggtatgtaagtaaataaactttaattggtttgacgatgccctttttcctggcagtgccaagaattctagcattataattacatagttctgggcagacatgtggtttccattaagaaagacttgtgattgaccgagttcatgaagcatgtcagggaaaacacatccatgtctctacaggaagggaacaagaatgggtctaaaaggaaccacacaagatacacgttcataaatagttttaaaagggcacacatttttaaaaaattctgttgaaaataaaattattagaggaagtgattatgaacactttggctcctatctctgtatgaccataacacagggccttcgatttatggaacaggagacctttcttgacctaacaagaatttatttaagaattcagggaggaaaatattgaggaaatcttagaggaagaaactgcagcttcatgggtttaaatagcacaatccccctggctgcccctcaccccccaccccagtcccacttttctctttaaatggccttgcattaacaagacttgtcatatctattctcttagcctaatgtggtgaacgaggttgggctaatggtctcactctatgcaaccccacctcatgtttttaatagaaaaggaaacaggtttggaaagttggtgtgttgctgaaggtcttgcaagtagtgaatgccttcaattttaaaactctgcaaaagcgttgagttcaagttagcttgggcaactgaagagaggtattgtagctcttacaacacacagaaatcttataaaatagctttgatgtagatggatagaaggatgggaaggcactacagggaagggtgggtctccaagagggttttaaacaggattctaatgatttgccttcatcgcccaaagtaactacaatattgaacagtttgtttttttctgcctttgcctaaatacttttaagatgacaaacatttttaagtctgccaagtactgtcatcttttggcaatgttaccatctcgggcttgatgtagtttcttgacactagaacagtttgtatgtgtgtgtgtgtgtgggggggggtgtagtgtgttttcttttattggaaaacattttgtcaagaagtagtggcaaaacacataataggttttttttttattttgaatactgtttctacaaaacacttcttgcataaaatataagctttgtttaatttaaaaaagaaaccggtaatattgctttttcaatggaatttctaaagctgtttctgtaagtgattcatatatttttttaaagcagccatctggtatgctacggatgtatgtgtatttataatattctagcctgaaattaatgaaacgatcgcctatggtgctgtcaataataacaataacaaccaattggggccatgatttatcaagtatttattatgttccaggtactgtgctctgtggagtatgtttctttaatattctgttcatgttgtgaatttgggataatactattttataggtagagaaatggatatttgctagtgaattgttcaggatcacacagattgtaaatagcagcactgaagtccacaaccttctcccctccctgtgataggttattgttcctacaaatgttgctgcatctagcaggttctatgtgttgaggttaatttatgaagtgtgtgtgtgtgtgtgtgtgtgtgtgattagcccatgagttgaattatctcagtcatgaacacctgtgaagagatttgctatactgcaacctcgcagaagcagtgtgactattagctggtgctattggagttcttttaaacacaagaacatcttcctctctgtgcccttgctcatgtacagccactttcacggtcactcactgggggcagcagccaatgagcaggacaggatacaggaaaattatggtcttgcttgaagtttaggtttgagttagaactagaaacaagacttgttgagtggaagcccagctctgtatggaaccatattgtgtctcagagcccagtgtgcattttcaggactacactggtaatgttgcagagaagaccattctccacattcctgcctgtgcatgctacacccacagttcgggtctatcagagtttctctttaacttgatgctctgcctaaaagagcttcctcctcatcctgcatccagagaagtcttttaggtgtctcttctgctatgcctccagggtacatgggatatcccataacctgcttcttcctgctattatattaatgtttttccaagtctgtgctgtgcatcttcctaactgcactctatactctgactgtactctgtgtcttggagggtcacagtcctgtgtttacttattcttctttaaacctggaggtttcaaattctttattgctctctctgatggcccttttgaagttctgttgttccttgtttgtctctctcatgtcatccttcatttccatgtgttcttccagcactacctgcacctttaattcctcctgctaagaccacaaggtctgaaaggggtgtgcactctagaacttggtgtggaaatatcgcgtcccataatatctagcaggcaaagtcagatttgtctggaatgaaggaagcagtgagttacggcatgccttgggtgtggatacaataaatcactatgtcttggatgactggacacatgaatgagtgtctgtgattggcacttgacctctgactgactcttccatcatctcgagtagggaagaagtcagagggatggaggcagtggctttctctgttctgtactctcagcccccctgttctgactacaagttgcattaggagcttcacacacaaggtaagaaagactttaatgagaaaggccacccagcctctgtccaggattctgtctgcctccttcctggggatgcctgcgcttgattttaatcagtggaagatcacagtgatcgccatgactaagcacttgactgaggttttccaaggtccttgtggctggccatttgtactcatcatttgacatgaacaggtttgtgtctgctttctggtctgaaaagaaattgcccatcaaaggcacaggagcagctgtctccagcactccaacgttcagctgcactatacatctcattaagaactaagaagctaagctctgacatggtgatggagaaggagccttgtagaaagtctttcgtcccttcgttagcccttcctgtttctttctgggacaggaggagtacagacagcagctttctggatggggcgatattgatgtttgtagctcagtatagtgttggaggtatgagaaaagaatctttgggtaccacagaaccaggcatccacacttattttgaggtatgcttgaggatgtgtagtttgctaaacatgtaatctatgtacctctagggcagtggttctcaacctcctagtgctgtggccctttcatttcctcgtggtgtggtgacccccagccataaaactatttcattgttactccataactgtaaatttgctactgttgtgtatcgtcgtgtgaatacctgtgctttttgatggtcttaggtgatccctgcgaaagaatctttcaatactcaaagagatcacatcccactggttgagaatcaatgctctagggcaaaaaaacctggtctgagcctatgacagaaaggacccctggctgccagaagaaacccaggaagcaagaactttgtgggagatgcatgcaggaggctccagtgagacaaaatggcagtgtcccttcgaagattccaaaaaacttttttccttctgtttattatattttgctgagccaggagagacacgtttaaagtgagtatctctcacatgactcagaaagaggcagtctgcacagccatcacattccactatatttatattattatcaatatgctccaagaggctggctcgaaagaacaatgggttctatttaaagcctcttgcattgcttcagttggtacctatccactgaacacttctctagaatgggctgctctcgctttagacagccccacaactccttctgtctttgtgaatgtagatctatccatcctgccattccctacattaaagcagatggtgtgatggacgctagaagtatagtacttaataattcagttgtacatgttatgaaatatgctccagagatgggggcagctaaagagtagcgaaagtcctcactgggctgctccagtgagcccgtgggattctccttcttgtcctagcaagtctgggatgcatgtggaaggggcccttgactatcctccacaaggaagttgttatctccctagctcagtctacagctatgctaataattgatttttaaaataatttccatctacaagtatttatccacaaatggggcagtgtattaattccagtccgtttatgctcctttagaactattcatacatcttttttcctgggcagttagttgtgttatgacccctgttaaaatttcaagctccaccagacacatggaatgtttctctattcagtggttttcccattcacatccttctcactaagtctagtaagaagaagaaaccagagttgtagtgcccatgtctacctgggtaattttgaatggccttccaagcctatttggactttccttccaaagtaaaattccccctgccccgcctaccccatcataatattgggaagatcaagtaaagaggcttctcaaacttaaagatggttttaaaacccaagggggtattaggagtctatggctaaaagacctagagctgaacagagacaacggacagtaagggtcacaaatcaaccgtaaaaggccaacttaactcagtgtatgttttactcaaggctctatgctgcaccgtcatatggctctcacccacccaagcattgcaggaaatagcaatgctatctgcttttccagaggagaaagcagatcccaagaaaggtggagaaatctgctcaggggaattcatactactaccaactcaggactgtttagtagatggaatgtgtgaaatgctatagaaacggcgacgagagtcattagtggcatggttgataattgaattgttaaactggagtttcaatctggcaagttcctattcctgtttcattcaaactcccaactcagttaagtttctagacagttatatgtcttagttttgttccttaaaattgttcttggtttagtcttttaaaattgaactgagaatggtggtacattctattagcaccactcagagaacaaaataggaggaccaggagtttgaggtcagcctgggctacatagcgagtcccaggttagcctaggccacagagaaatacttattcccaaactaattaaccaaccaacccttccaccaaccaaccacctaaccaacccaatcctgtgagtttgatgccaacaacccaaaatcagacatcatactcagggtcacagatctaactttccttacataattgaaaaatgtataatcctgagataattctcccgaccagcctctaccagcttttactggctgtagctacatggagaggcaacatttctaaggatttctgcagggattcgagtttgaggcccttgccagtgagccaccacagtcatctagagagctagaggagggggcagaagtttctccttttaattaattttggttttgttcaggtctgttgccagcagtcactcactaaccccaccccccaccccccactactcccacccctgttctgggatggaggagatataaagagaagctagggagaagcagatgggaaatgtgttatatcttaattaatctggagaaggagacagaggctagaggatataggccagcttgcagctcggcatttatcaggcttttgccccctgacctaagttctcctgctggatggaagagccaggctgctgggaatggctttgctgatgggccattcctggggtaagtagttattgatgaaggggcttaagtggtaagtgaacaccagccttgaagttaatgttcccggcccctgctgggtcctccatctctgggaatatttgagacaatactgctcactcttggattcagaggctgagctccaaaccatccaatggcttccagatcaaggaactgtctcttccccatcctctgctttcccaggcactgagctaggggctgacagtctgggctctccaggcctcctcttgcttctgttgtagtggctttattactgatctgaggagtagaaaaacagcccattaatggcttttgtagataatggtgacttgggagctgttatatcagcaaaattcagaaagaataagcagttccagaagtttgaaagaaaaggagagaacttaaaaataagaaaataggggctggagatttggctctctggctaggaatacgggttgctcttccatgggacctgggttcaattcctagctcctataggactgctcacaaccatctgtcactccagtttgtgccctgctctggactctgttgacatctgatgcacagtcatacatgcaaacaaaatatttttatacataaaataaaaattaagagcaaggaataaacacagcctagcatttccatttgttgtttttttttagtggaagatctggggaattaagttccccaatggcttttcaccctggcccttgattagactttctgggaatatcaatgtctaatctcagcctacagggattttaagacaattagtctgaggtggtagagtccagagatcatcccttttggtatagattgtgaggtgaccacggtgaaacaaggttgagaacagtgagataatgttgtcaccttaaggtcagcaaatgatacctaatgctgttcatacagtcacagtgttggataccagtgaactgccacccaggagctggctgcctgtttcccagcctgggttctttgtctaatgccggctttgtgtgcaagcacaattcacatactggttttgtggctttaaatataaccttgtatccctactgttcttaaaattaagtatactgacccaatctttaaactcaagttgacaaaactcctcagtgctataggacacggtggttcaggcttacctgggccaaatggagggcacctatgactgcatacaacattgtaatactgtatccgggcttgcgacctgcttgtactgcaatctgagactggcaagagggatatgtacaacaagttctagcacgggtaaaactcttctgctcctgtgttgacttaatcagaataatgaagaaaaaatttggaaggctggagagatggctcagtgcttaagagcacatgctgctcctacagaggacctgaattcagttcccacaatccattgttccaggtccagcagatccgacgccctcttctggccctcatatgcacctgcactcatatgcacacatttacacatagatatatacatccaaataatttaaaatattaagattaatgtttctaaaagagaaaaaaatgtataaacagcaattaaaaacctggtcatgatgacgttcttactcgaaggtgtttttatttgaagctcagatgtttgtttggaccactagactgttctgagtacttcattgggattaccttgtttgcccttaaacaatgatagcagcagttatataacaaggaaagcagtctataaatagagtccagcataaaaattttaaaaagaaggcaagaaaacaaaattgagaagaggggtttaaagtcaggcatcctacaggagacttgagagatataggttagcaaaacataaagaactccagtaacgaacaaaaccacagacatcagtttccagagcaggcagaaaggttgccattaacagttggggttactactagtatattggatggagtctttgtaggcagtggacttaactacactagagaggtgaatgcagagatgcctttattccatcttttgagttctaggtctaatttggaggtttgggggttcctgggcagtcagcttttaatgtattaaagtactgtaacagaaaccagaatgttaatatttattgttgttggatttttattaaagagacatagttctattctctctttgtacacacacacacacacacacacacacacacacacacacacacacgagagcagaaatggattccctcagatgaggtactaaaatattcttgtatagttatttgtttttgaggctatcccaggtctggagcctgtttactgtagactttgactggacactctctctcaggtttggtcattgcccctgtcttcccaattcactccctgccctccccatgatggagcgttcgctttccaaattgaaatatctccccattccctttgatttctcaagacgttagaggctataggaacctcagtcttccagtcaatacccttgtatacatttccgtagatggtgtgtcctttctcatgtcattgcagccgcacaataattaaatgaaccttcaaacagtattgaagttagacagtctctgagcttattgtttaattagttcagtttggtctatagttctcatcaccatgggatcgatagacctccagagagcatcctaccaatataggaaacagatgcttcttgtctccatgcctggatgctgcggggttcacaacatgttgggaagcagtcagcctggaaatgccaagccagccacacttcttgagagcttgctaactggatccatcttttcaaaatgcacatgtgtataccaacccctacaggcatccctgaggtccattgttcctgtcttccttcatgtcttcaggtcactaagaatttcaacgcaatgaaagatatgccttcttaccaaggccagctactacaggaatcctgatactattattttgccacattctgggccttcacagtaattggattgaaaggagaagttgacatttttttctgaccaggattctgccatgaagctgagaggggacaggttgagtgggaagctaccaagctggatactcaggaccgcttagaggaaggcaagggtggagtcgggtgtggggcgtggtgctggcagccagcagcagatcctggtttgtctttgttccacaaggtgatagtgcagggtgttataggaggcctgaccagaaggacatcatagttgctggtcacgtattagactggttttacttctaggatgattctcattcatacacgacatgctagatggaagttgggtcctcattaggccgcagtgtctgtctttctccttaaacacccatggaatcaggttctctacgtcaactagttgtaggtattttaagttacgttttgctagggaaggattttccaagacaaaataaaagcaagctggaattgtgatagaaaatgccaaggatagcaaaattagactccttgataataagactatttcttttattattaagtgtttctttgataaatatttaccaaatatcttcagtgacccaagcaataaggaagacaatgctctgcctaaccttgttgatctcaatatcatgggtaccctctcctctgattgggtcaacctgtgcatgtttgaaactttctgcgtgaacaagactatccaaaacaactgtagcagctaataattttaatgatgtgtcaatccatttacattcactagctgattgtctccctgtgcttctatgtttgacctaagttttttgttgttgttgttgttttgtttttttgtttttctgagacaggttttctctgtgtagccctggctgtcttggaactcactttttacaacgatttctagtcatattaaacctgcccaccttagctctgaggtctaagtttgcggtttaattttggctgttgggacttactttgaatctcttttccttaagctataaatgaaccatcaaaccccacatctgtagttcatcttaggcacatagtaggcactttaataggttctgactgagcgaacacggatggagcttagtcagtaccatcatcagctagatcatgagtgaagcatctcaggttttactgcagtgacctgaaggcatcactcagtcctgatacgctgtgtgtgtttctcacacttttaggttttttttttccggaaagaataaaattctagtagtggtattacgatggaatagtacaaacagaactagcaaatggccgggttctgtgaagtcccttcccggacagctcagagccagcggattgcatcatatatataacaaccacacaaaaccctctaaaataacacagaactcagagtactcaaacatttataaagtattttaaattaatttttaatgagttttaatattttaatattatacttgatcttaagtaagaaagttgctcttgttttaggctgtggtgtacaatattacttcatgggatagcatttaattaaaatacattaatttatgtgtttgtttattagctttacccctaaagcagaaagaaccactgcacaattttatgaaaaatgcagatgaggatgttggcatccctaataaatgtaaatgagaataggtaaacatgtatgcttttattttacctaagaaagagggtattggtttgacatacaataaagatcacttcttagtgaaaagattaaactcccatggaaacaatctttaatttttgtaatttcctttggctttattaggtttttacctgatttgttcttgtctgaaaacgttttccctcatttctgtaattcctggagtcattttgttgcaaggatattatagggtaaattttgtttcaaacatttggaaatagttagctaccctcattctgtatggcccacttcgagtattgacgtaacaaatgagaaacaccttattgaatctgacatgttctttgctgatttggtttgcccctaacttagattttatgctcctcaagactggggcctggttgttgtgaactttcgctctggttttgaacacccgtcatacttgcagaataagcaaggatgttctaaccttcaccttattatgatgggactcaccagcttatttttccttttatgcaaattttgttttagtttatggatgtaggcatagagaagaaaagcaagaagcaacaacaccaccactttttgtagagttttgtctcaatattctagatgctagcatctagctagcactccaacacctattgtttgaactgactcatatgccatggatagccctttagaaatactgtatttctcctttaaacaaatattctatagaaaagtagactcagaatgtattagaggtagaactgccctgtgatgcttcccattctccctttgttagttatttatattcacacttcttcacttcaccacatcccttggtaaacagcttgcagggggcttgatgtttgttaatgaactgtcaataaacacatgttcttcccaacttcttaaaaaacactattttggggggtgcggtgggggcaaatgtgctggtttccaattcctgtctgcactctggagacatagaagagtcttggctgagcgtagggcctcggagctgggtaaggcagcctgtcacgtgtgcaggcacagtccctgcacaggcctggaggaaagtggcagattttgatagagatcgtgccagccgcttgtagggagaagtcggaaagtgtttggaaacagctctgttagcatgttgcccgctccccagccccagcccccggccgccccaaagctgaaggagagagtgtgccaaagaacaaaaggcaaactataagaggactttactgatgtagaagctgacctgtccaggtttgagaggagacagactaacctctctctctctctctctctctctcttgatgacttggtctctttactctgtagctaaatatctccaccgaagaggctcccaagactctgatacgtgtgtgtgtgtgtgtgtgtgtgtgtgtgtgtgtgtgatctttaggcttccagaaacacctcactttctccccctcccccgtcccccgccccaatgcgggcattgggagagcaatgccatctgaggagtgggggctgtgagcccaaagcacacctacccctttcttttgggcacccacctgagctacaaatgaatgcaagaaacttagaactgcctttaaccaaaaccatttataatttaattggtgttattaccaccatctattcattttggaacaaattgtcccaagagcaatgattctggaagtttttgctttgggaaaaaaatggtgaactcactgggttccttggtcatttttttttttccttaaaaattttatgcattgttagggaagaaaagtctagtctaactcacaaatgcatccttattctcatgtatatttgatactggccccagtctaatctgataaagtgcactttgcctgtggtgtcttacaataagccggctgcattagtgccgggaaaaatcaataccgatttataatttaccatcgcaaaaacctatcactttttatgaccctccatcctggctcattaatattacattaaaacacacacacccactgaaacaggggggaactgtagcttgtcaggcttccagccactaaaaaaaaaaaaaaaaaaaaaaaaaaccaaaacaaacaaacaaacaaaaaaaacaaaaaaccctttaattgggcttagtttggaaatccagatagagattttttttttctctatttgttttatttttaatgtagggatgttgcctagcatggatttttaagatgcacaaatacctatacatttctctgaagagcatatcagaatttctgacacatgttttcctatagttcttatgataataaccggtccttatagcatcctcagctcttctccagcctccagggtcttccctttcctcccgtgtgtgccagtgtggaactggcttctttctgtacacagcagccttctggccaagctggtctttttcttatctttgtggttgtcacagttggtatttactccacatccccctccctgcccccaacccttggctcagatcacggaggagctaaatgccaccctttgcattgtctgcctcccagagaaaggatgaggattttattttccttccacactggctggagaaaattcctctgacctggctctgtaactgagccattcatagtccctactgttccccggcagagaacaccagactctgtaggtgagaatgtgtgcatgtgtgcacatgtgtgtgtgtgtgcatgcatgcctctctttaattctttcaccttaaagaaatcctaaaagaaaaaattaaacaatagtatttccttgatcaactttattaagctattaagcagttttgacctcgtgggtttttagacttaaaagtcctatccaaattctttccagataatgtaaaaaaagaaaaaaaatgatgtcattgtttatgttggcagtggtgacaagctctatttattccatgctattcaaatagtttccagggaatttttccggttttttttttttttaaataaaatcacaaaaatccaaccttccgactcacttgcccctttccctggctgacttaaaggggaagggtttcttgtctcagagagggaagtgggaagcagcaacaaataaataaaaagtcaggaacggggaattcattgtgttctcaagtgtgcagtggatccacaccacgcagcgaatgcatgtcgtgattgggtttttaaaagacgtccgactcgcccctgactgacagggcctattgattttttaggtttctgccgtcatcggtttccagcctcacagcggccgcatgtcgggggtcagggcgcaccggggcgcagtgagccagccctcgccacttcccaaagtgaagggctgctgaaagaaaatcaatcatgtcataagtgagaagcatcaaaaattttctctctgtacggccaaggcccatcagcctgtcttcgctcagtagctaaggttaggcatctgtcaagtcagactaggtgaaaagtattagagatgccagttaacccatggctggactgtagacgggtgcgaggctggtctcttccctttgtctgaccatctggattgacaaggttggcagttttgcttgattttggagctggaatcacccatttcccctcccagtagcttctgtctacacttcactctcctccacaaggcaaaaaggacagggccccagacgctgttggcttgtaactttaactatagactcagtggatttgttccctctggtctcgacactgggcattttaggttcttctaatatgaaagtgtgttttgattctatgtgtttatctgtgtgtttatgtgtgtgtgcacatgtgtgtgtaccgtgacatgtgttcaggtcagaagacaattttcaggagtcagttctcttcttccaccatgtgactttcagggatcaaactcaggtcccccagcttggtgacaaagtacttctaagtcaagccatctctctggccctactcactgttttataagcctgcattctttagtgcttctagcagtgttcaccatgggaaaagaggcctgtattaggatttgtctcagagctgcaggagcacaacacagattgcttcttcatctcagtgacagaatttatgtgtgtggcaaaatccacttccagcttacttcttctggcttccaaatgcacattctttagtgcttataaacattaaattgtctataggaaaagagcctgataaagatacggaagaagaaattgagagaaagtcattttcctttggggctttggctattaggtggttccctgtgccccagtggatgagccagtagagaatcatatgggcaggactaattgggctcaatggaaagaaagaaagaaaaaaagaaagaaagaaagaaaaaagaaacaagaaagaaagaaagaaagaaagaaagaaaacaagaaagaaagaaagaaaacaagaaagcaagaaagtgttggaagtatgataaatacataaataaatgtgatggggactgttaaggggaatagatggtagataagaaaaatttaaattataaaacaaatgaagtgtttgaatatatatgcatatatacatatatcttcatccatatatataaaatgtcatctatctatctatctatctatctatctatctatctatctatctatctatctagagtgctatgaatggagatcatgcatgcatccattgagagagcttggtttctggcagatctgccacataacttctacggtacatgttctataaacacacattgctctgtgctaggtggaatttatctttatgtgctcattatgaggaaagaggcctatctgaatcctctataaaggaaaagttccttttggagaccactacaaagtcacagagtgtattccccctaaacaaagccaactctttaccgctcttttcatatcgtgttttggaacacacaggacatagatacatttatctgaaataaatgggatggtctatagtggaactcttgtctgctactatgctgatagatttgcatggataggattctgcatttcttcctgtataacccattgagggaaacatatcttttccattctcagggggaaaaaaataagaaagaaatatgctattcatttcaaaacaccttgtgatagtttttaggcttcaaagctaaaaaatgagattgtagtttggtgaaagaaataatatccagtggctgacttgaagaaaccgttctctaggtgcctgccagttctgagtttggttatttaaatagaatgtgatgctaggtctcttatgagttataaaacagaagctgtgtgttctgtggggggaaaggagagattttggtttatatattgcttcactgaacaggaaccatagattggaagcctggctattgggtgggcttcactgttagatggtttatatccacttagtgcctcttgtctttaagcatgtctctattggctgatccctagttcttattgtcattttaagactggcttgaaatctgaaaaggtctgctctgcagaggactgtgaacttatgcaggtatgcttgagtgtgttcttgcatcagtgtatgcatgagtgtgtgtgtgtgtgtgtgtgtgtgtgtgtgtgtggtgttggggtatgcggaagaacatattttaagatctcctgcttgactggagatgaccacctcagtagcattggagaaacctgaaactgtattgagctgagggcttcttcattgtaactttcctttcacacctaaattgacattcactgcctgcaccaaggtatactcactaataaatattttagctgtctatgcctcaatgattacactagccattccatccagatgaaaagacaaaatgtttctttaatcagtaccatgataggagaccattaatagcatctgaaaatattagcgtctcagagatattgaccggattgcttttggcatggaaaattatataattacattttaggttatattttatggacttataccagttattctaacataacagaaattgctgttcagaattttaagaggggagaatgatgtaggttgaaaccctcagcaacacaggcatcagggcttgctaatatactatctaattgtaatcaataatttcttttctcctttctgtaatgacaaagcctttgcaataaaaacactaccatccttttgaaatccacagaatgataaatgacctaggccaacttggggagggagtgtagtgtgttttatattcctcgtgatttattatgggtttgcacacacagctagtgtgaaatcaagtaggggaaggaaagtacccaacaaagaaatccattctgtctagaatgcctaggtttgagtcccattggcattgatatgaactaagtactctcatcaaggggcctaggagccctctggtatttagattcctttctgtaacattacagggaaggcagaaaagccaatacaatgaaccactacttggctatgtatgaatcgctaggtcagcctaactcatgtgttacacaaaaagaacccatttgatttgttcttgacaataaatgaaagcctagctttgaagggactcttagctgggtctatttgcttcctgagacagtctattgcacaggctctgtgaggaaggcaggttgtttgaggtgtgagaaagaaaaatcccctctcttcgttaactattagggacttcctttgctgtaaagctaagtcctatcatctcagactccctttcacccgttacaggggtgcgtggctgtcctcatcaaacccagctggccactgggtcccgacaggtaaagattttgagaaaacccagcagagatttgtgaatttgaaaggagaaagactgtgaaaagtgggtctacaccagccccctttcaattcccgccccacgtgtttgtgcccaaccgagcttctcatgtgacactggttccagtttttaacttctgtttgtaagttgtctgtgacattttgcttcaggctggtgcatgatagtgttaggggtatctgaaatcttagagtcctccccttaccttccattcccctctcttgatgttgcctttgttctcttcctacccctgccaactcctttttgtttttcttcccaaacccaaaagccttttgtttaaagagttgggtaaaatatgatgtcactaaacagaatttaaaactttaggagcgatccatttttcttcttactattcaccagacctgggatttgtttcatattaaaaacaaatctcattttcttactcggggaaacacagcagacaacagttaacacccggtgtgagacttggggttttcattcagatgagttgtctatagtttgctggtgtgtttgtttatttgaatctgggctgcagaaggagaaacgggtggtttaggagactaggttttcaatgatgtcattaatcttttgttttctccagaaccaggcttgggatcaaaagggataaagttccagtttattctatcagatttcccccagtgaccaaggtcttaatgcactactcttaaggaagttttgttggtgaccagagctgatggggtctttgaccattaaacaatacccattagtcaaagtcccgaggctaccatctctgaatggcgttttcttctaagtgtgccattagttagtataatggactgatgtctgtctgcttttggggcagttcagaatggtacaaggaagacccctttttaagaagatgtgatgttttttctttgggctgtatacatgttccctgaaacagttttagctcttgagcaacaataaacattaatggtttcagtaaagcctttatgatctcccaggtcagaaatcttttattttcccttaaagtctcaagtatggatttacaaaatactcttcaaaaccattatagtcttttgggtaaatagttttcatttaaaaacatttttataatacacacattttaacgtgttctaaatatgtatttttacgattgatcatgacagcgccttaaagagccattattgcctatcagggagataatgtgtgtgtgtattcaagagattgtctacaaagaaaatctctaaactgtgtttatttccaatgaggagggcttttttttctctcaccaataagcttgaaaaaattatgcaaaatggtagaaattgaggcttatcatcaaggggaagcagttcagggttgcagattttggtagtgcctcttaagtgacaactgagaatttccacagtgtaaaagcagaatcgctgcctgagcttacttgagacagggaactcgctcaccaaagttttgtgtggttttgccagactttctgcctcaagttcatattcctccaaagacaaggctatggtttcattggtccctctgagccagaggctgccatccagttaaagtaactggaaagcagacagactagggtaaccatttgttggttgtgaagatattgttaggaggatgtaggtcataaaagagtatcttggagagaaacaagggagatgaatggggaagtaaaagagtgcgaggaagcctcatgtattcctttcttgggtcccacaagtcacacaaaggccttaggattttcctttgaggaagaagggaagccattgaagttgggggacattgcccaaaccctccctgtttgcttgtcatttgcttggataccctaggtctgccagaattttctgaataaaatcctaaaaccattgcagttccatgttcatcttttaaagcatggcttctctagcatgtcctttcatgcaagtctgcccttgactcataaagatgtgattttggaataaaaccgtttcactcactacagctcttcctttctgatcccgttttatagttctgttccccctgaactatctttctagctaagggacaattgtggatcccgataggcgaggcagtgtatgcctccttgggtggggtgaatgcaaagaagtcagctgagctttgagtgacaggaagcccagctgggcaggggaaagatagggagggagagagagagcagctgtgaatgcagattgaagtggccaggcaagacaatggcctggcatgataagcacctttccagcaaaggtcatcagcctgtcacacagacacaacagccacaccttggcttttgtgttagctcaagtttcattcaggagagaagtctgtgtggatctgtgagagaaaggttaaagatcactgcagcaattagcaagttgatcaaggaagagacataagatatccacattcatatgtcttgtctcgaatatataagcacccttctgctctcttctgtagcagaaggactctattctagctttagatgacccatctctcaacactgggcagcaatttgaaaacagtctaaattctccctgactttgctgaggtgggggtgagagggcaccccaggggcttagctcttagaggctaatatggactaggtaatggcttgttgagcttttgagaagtcagattttttgtcccagagcttatcctcttcaggctttgaggccacctgtagtatctttaaaaggacatctttgcccgtcttcccccttgccttttgtagtacttctttcccacccccccccctcacccccagaaaaagttccctggaggcttaggggcaattctcatcttccttcttctttcctgcatgtgtgcatatgtgtagtatgtggtgggtatggatctaggcatgtggaggttacagggtaaactcaggtagcttcatattccatgtcttcgaggcgggtctcttcattgcttcctgtggttcacatgcctggctagcagagcctctgttgttgtagcacgggtcctcttcgaacctgctcttgggagtcgactggtgaccccagtgaaggaagcaaagaaagaacaggtgccgagtcctggagtttgataccacaaagcgagttcacgtcatgtttgccagctattcgcttatcttgtcagcctagctcccaaatttggttggttttgttgttgttgttgttttgtttcttaattccttccttccttccttccttccttccttccttccttccttccttccttccttcctccctccctccctccctcccttccttccttccataatctgattatagagaatctggattcgcaggctttcctcagcaggctatttcctgagacatacccaacggctttcctcaccaaattaccatctaaatatgaacttacttttctttctttttaaaaaaagatttatttatttatttttttatatgtgagtacactgtagctgttttcagacactccagaagatggcatcagatttttgttacggatggttgtgagccaccatgtggttgctggaatttgaactcaggacctttggaagagcagtcggtgctcttaaccgctgagccatctcaccagcccgaacttacttttcttaagaataaggtttaggcattgttattcccaacgcacagatgagaagttgacctcagggatggctcagtggcctccttccctttccacctctacaagaccggaagaggaaactcctcccaactctgacactttgaccaaaacctcttcctaaaagctcctttggagactagggagatggctcagtaggtacagaacttgctacacaagcacaaggacctgggttcagattctcagtacacatggaacatgacagaagtggcagcctgtgtcataagccatggccaggaggtggaggcaggagatctcagaggctcattggccacctagtctagatgattccacgagttccaagtttactgtcctaaaaaataagatggagagagaggatgtcccctgatactgacttctggctttcatggtcatgcatgcctatggacagacagacagatagacagacacacacacaaacatacacacacacacacacacacacacacacacacacacacacactattatttttgtggtctcagtgctgtgactcaccccccatcttattctctactccccactgtaaagctcctgcaagcgcaaacatgactggaagtccctcttcctttctcttatgaggggaattcagcttccaggcgctgcccacgggggtcttttcctctcacagttgatttttatatgcccttgtagctttgctagcagacacacaggacttagagttacaattgggatatatgcttgtgaaattagtctcaactgctttaacccgaaggtggttctgtttattgaaataagcaagtcctaactgctgaccagatgtcaaattgaagtataaagactttcttctaagccgaccctcttgaagaagaaatgctcacaatttaatataatgagaataattaataaggagtgtgccagtgaccttgaatattaatattgtttccttttgctgtaaacaaacccggctattttattattattttagtgtgtaacttggcatgaacactctttttcacataatttccccaggtgacttttgtctccttggcaatttccggctttaataaagaaaacctaattaagaaggagctgttgattggtttgctagtgtaattaacacaggtgatgctaatgagtttctatgaaaccaatggtttatgggaaaaataaacagaccgttgttgcatatggcccagctgatatctctactctggtgtaagtgatgatccccaagtctcctgtgagtggtttgtgggcatggaagaggcagataaaacattttataagattcattagtggaactggaccaaattgagagcaaaagtctctgtgttaggctgtattaaaaaaaaatctaatctttgactatagtgcttgttatatctttttatttaatttaaattttaaattaaaaaaatgtctgctttactttaaaaaaaaaggcagacttcctttatttggggtgcacatgcaccttgcagtagttgctttaagtctgctgactttgtagacaagcttgagtttcgaatctcttcccactggcttgtggatgctctttccagatgctcgcagaatggctgcagcttgtaagaacctggcagtttccttcctcaagttatacctgcttcctgaggaaccgtggactttggatctttggtgacatccatactcatgtattatagtcacagtcacatagaaagagctgagcttcctctttggtcttttcttcctttgttgggttgggaggcatggtggggaaggaacagccgatctttcttaataagaagtcagggacaaccaacattcccgttccatcagtccccctattgtcattctgagttttacccagaatacaggacagtttataaagagccttgctcagctcctaaatagattgaagaagtggtttgtatgaaagatcaatatgtataagacttggatatttctatagttttctaggtctatctccattgttctttaagttggctttttagataagtagatttcttcatcttcaaaatcatttcttcatcagctagttgctcctcttcccccttctctcctcccatccctgaccccctccatctctctctcccgtttctaagtctgcctgttccacagtgcctcttgactactactactgtgaccaaaaaaagaaaagaaaaaaaaatcagagacattctatatcttgccgcacacctccagggacatcttttgaactctcataatttgtatttattgccacccactttgtaagttcacagtttaatttgccagcagtggcagtgttaggccgacacagtaaaacaagataacgttaaaatgtcaggatgagaggggcatgaatgatgcattaccccagccaggacttggcttgtcattcccttctgccgatgtgatgttaactaccttttgagagctctgtctgactggtattactccgaaataggatcattagttcactgttctgattagaaagccgctatgcttgattaactcttcttggactgtgtcctcagaggaagcatcaaacgagttgcgtggcttttgacatctagaactaatttataattattttactgcaattatttgtagttgttgacatgggtttttctatgatgtggtatttaatggagaaaagataagtgtgttcaagttacatgtttagtctacatttcagtaacgttctagatttacaccccgacccccaggacagacgagttatcatctttaatagtgtgtaattcatgcacaaatctcttaatagtcccatgtttcagggactattcctttggtaactttttgaaaaattgtcatcctgggaggatattggctgaatgcacatttgtgtatacacatggtggccagttcgtgtgcacctttcttgaagatgtctccaaaatgataaatggagaatgtggagaaaggaaagtacgttacacttcctcgttcctctgacacacctcatacccctctttcccaattgaaaccatcttctatcgctagctgctttttgatatcctaacaatattgattctctacaagtacataattccctatctctttccagatagacatctgatgacatctactatttcatgaagacggtgtcttagtgcctttcaagggtagatttcaacagagtgtatgcagaaaggccaagactgggaaattgctatgttatgcaaaggaaatgtgtcctacacaagttttaggacttagacttaaattaggagttgtaagaggaggttttgtttcacaataaggatagataatgtttctgcctcacaattgtcatcctgggaggatattggctgaatacacatttgttcttggtggcaaattcatgtgcatggtgcacctgtcttgaaggtgtctccaaaatgatacaagtttctgggattgattagtgtcatttccataccactgtgtgaaaaacctagcaaatttttaagttgactggataaagttatcactaaggaacagtccttagttctccagtacagtcttcaatgtcctatttcttgaaaggcttcttcttcccccttcttttcctcctcttccttcttttcttcttgttcttgttgctctcctcctcctcttcctcctcctcctcttcctcctcctcctcctcttcctcctcctcttcttcctccttttcctcctatttctcttcctcctcctcctatttctccttctccttctccttcttcttctaagtctgtacagatccagacatttgtgatgttattatagatgcctctgatgaacctggagttaccccaagcatgtaaacaataccaccctgttatgtctctttatcatatccttgacatctgccttaagttgctatccttcactgtgggtttaagtcagtccatgttctctttggagacttcttgacagaacacacttggctgtagatatagaccaactggccatgagcaattggtcttaaaaatataaccaggatttgctggtcaaagggggtaattgaacctcatttttcagacctagccatgtatctgtctatggaaagacatacttgagtggagggtctggacctgaatgtaaagtctccaaataggaactggtggcttttatggcagtgatcacaataaacccctaataaatattggaaagaaagtcttgttggtttgattgttgtggggtttgtaaatttaagagtatatagatttgttaatggggatgatttaaagcaaattttggttttgctacttttctttgtgaacagatttttttcaatggtttttgcccagagaactgttaatatgagatttggctggaatgctctttttgtagagaggtgaagtggaggcttcaaaaaagaaacagttttctaatcccagggtaaaaggatccatggcattggtggagccctttctctctctgtgtgtgtctgtttctctctttctgttctgtctgttactctctctgtctgcctttgtctctctctgtctgcctttgtctctctacctttgtctttgtctgtctctgtgtttgtctctgcctctctctttgtcatgtttgtctctgtctctgtctctctcttctttgtcctcttgtacttatatagagaacaacttgagtaatatagttgagtcctgcccccaaatcaaaacttctttttaaaactgctctcatgctgattgtggtggtacatccgtttcacactagcacttaggagcagaggcaggaggatctctgtgagttcaagatcagactggtcgacatagtgagttccacccttgtcagggctatctagtgagaaagagtttcaaatcagttaaagagataatttgctatcatctgcaaatcctttcctcgtcctttctcacagaagggaagatgagcttggagttaggaaggaaatgcagaacaactgagaaaataggaaatacagaatctctccacttcaaagccacacacgccagtgagtgcttccaggagccaatgcatgcgacttcttggagaagtgatggtgggagctgaattatgatgatctttccaaatctgcccctctgcaccactcaaggtttcctgtctctcgaatgggtccagatagagaacaaaatgaaactctccccaattccgtctaccttttttttttttttgctttaagccaaggctctgctgcaccattaggatgtagatgatcatatttaaaacctgtgatgacaccgttgtacccatctgaatgattaatctgctcattaaaagagcgccgatgggctagtctaattggaacatggatcttcttaaaggacgtcacagggtcgggaataggaaatattactcataacataaagtagggattaattatgctactaaatactactgtgtgaaatttacatatgggtctggttagagacaaggattagaaaaagtatgccatcttgttttataacatttatgccaacttcaagcaggtggtgtgtgcctactttaatcccaaatcttagatcaacatttaagaaaagctgttttaaactcaaatgtcacagaaggtttagagattggaataaacacagaatttgcatgagtgaatcactgtgacttaacgggggtggggggggactcttaaaaactaatgtcaagactcaactctgcaatcgctctcttcattgctgaatctttaactttggaatggaatttatctttctagagttgggaagtacaattaggatgattaaggaaatatgcaaattaatcaagcacaagtttataatcatcccccacccccacaaccttctttgatacaaaaaaaaagtggaaaagatttgcaaatggtatgtgggaaagatgtaagagggtttttagtgtcaagaaaggggatagggtgtgtgtgtgtgtgtgtgtgtgtgtgtgtgtgtgtatttgaaccatcactgtaacactttcttgttttagtgactatggtcacccaatgcaagctaacttacaacatggaagagatgaattctagaactttcagggtgaaaggatatttctttctttctttcttttttattttaaagccagggtctcatgcaactcacgctggccccaaacttggtatgtgacccttgaactcctgatcttcctgctttcacctctaagggtgctggacttgcagatgtgcaccattgtgtctgtgtgtgcaatgccaggaatagactacagggcctcagatgtgcatagcaagcactccacagccacatctctggctcgtcaaagaaccttgaggcttttccattctccctccccctctcgctctcctctctcacctgtgaaggcgtgggagcacaattcttacccaactagtgacagccaaacaccacagtttctgactctcagtccagtgctattttcaacctcgtcagtctggttaccagataccttgacacttcggattctttgtttgacgcatcatgtcttaagatatctctgtttactgaagttagatcggtttgacaaatgtaaactattttcttaacatcccgaggatttgtggcatttccacgacttgaaactccgtattcttttttaaacttgtagacatatgtcatgtcctgtatgaagtaaaaagtacattattgttcctctagagtaaacagcctaccgtgctgggtgcttcagtcagatgagcaaagagcaaagatggctcttggttctaaatgggccccacctgtctatggaacttgcagggttgtgttaccagttattggcggggactgccacactcggagtacttccttggactttggtgacctcagatgcttctgggcttggccatgtgctaggcccagatgctgaggtcactgatgtatcccattatgttgtttctgtgatgctgtcttggagcctagggctccatgtataccagtcaggcactcaggcactgcagctactgagctacatctgcagcttagcagtggtcacgtaacacctctgcacatgtttagacccccttttttgtctcttatatttgctttgtcctctctaccctttcctaatggttgggatgaatgcaccagcactgctcagtcaagattttagagtagcttacctgatctactcagcgattcatctcccttagtcctagaatgatctttctggcatcagactcctgcttgaagacaggtcatttggacagtctggctccttgttgtgttagagacaaaagtccaagctcattcctgcctgtggtatctatcccccatcttcgttcctcttgctgggctgtctcatactgatgtaacaggatgactgctgcctgtgcctctgatgtctgtccttcttggtctcttggctttccttggtctcccctttgtagcagctgtcggtggtttatccacggggttggttactgcatttggccccttttaggccccctttctgctattcacactgcataccccactctttattgtggtggtttacacttgacatggtaaccactccttgtgcaggctcccctcaacagagctctcgtaaggcagagatcatgttgttagtgttggctttctgcttttgtttctaagtgtggtgtcttcttccaaacaggacattcgcaaacattttgaggaagcaagaaagaaatagatcccagcagattaccttctaattggttgtatacaggaaagcactataacattttttctatctcttttctccttcctcttctcccctccttttctactcccctcccctcccctcccctcctctctcttcttcctcctccttcttctccccctccttttcctttccttccttctttctcgacacgacatgtagtctagactggcctggaacttgatatcccttctgcctcagcctcccaaggagtttggtttccagggagtgaacccacaggcccactgatactttccctgatagctgatgtggaggttttgatgtcaagacttttgagtcttggtgctccctctgtgtttttgctcccccgacttatgtgacagatctctgaagccgttcttctgaagtgctccaggatgatttcttctcactctcctcactctgtggcatgtgtcacatgtaggtagacgcctacaaaggccagaagaggtagaaaaattagtttccaatcagaggaatgctttgtcacagatttttgctgtaatctgtaagcctgagttgtgacacgtcttggagtcagtcccaacgctgttctgactgtgactggatgttggagatgagatttttgaaagaagccagtgttgtcgttgtttcaaagttaatcgcaaagtattgctgcaaagctgttgggaaaaatgtttgttttctgaggtaaacctctggacatttttttaagactcaagagtatgtccaggaaagcttactttagaacttcagatcgtctgtgtttcataattgtcctttattggaacaggcatttgagcaaagtggtgtttagtgtgtatcattcactgttgggatgccgcagtccgcaagtggaaatgtgacccacgagccctgaaaagttaaaggagaattggggagcctcggaaaggggttcgtcatggttgttaaatgacagtgtggttatgtatggaaagtgctgtgagagacctggacgatggagtcagacaggaactgctctcctgaattgttctcttcagtcatacaattgggagccttgtattagaatagaacttaatcacaatccaaacaaactcattcttaaagaagaggaactagaggccagagatgggccctccactcgcacaggtggggtttgcagctagtccttattcctttaggtaattgttcttagccctgccctgagaaccttcatagaagcgtcatggactttggaaaaaataggcttaaaatgctttgtttaaaatgaacaaacaaacaaacaaacaaacaaacaaaccccagtatgtactcaggggctgaagaggctgaagaaagcattggcccaggaccatgaatggcgtggaataagctacattctgataaagcaaagcttgaccacagggacactcgttcatagcgcagtcagtcttcccgattctgggaagccttcctggggtgtgcacagtcaacagctgcacactggcatactcatcataagggtctggaagaacatggcttctgagcatccctggtgtattgagaagggcattggtcttaggctcacctatctcgtcccactttttggtccttcgtattccaagcctggtctcagaggttttccaaccagaaactgagtctcctgtgttcctttactttcctatagggaagtaactaaaatctgcccattttgtttccaggacgtttgagaaagaagctgtgttcacccagcgtttgtacaaaaagacagttacttggtctgtgagtggcacagatacaaagtgaacgtaaataaaatggttgtgtttggtccataaacagctcaggtttgggacaccggtatcaagtcagtcctatcttatttgggaaaactcgtcccagaatttagcttttttcacttttctcttcttttaaaaaggattctcctcaacctgaaacttagttgtgtgtctgtgtgtctgtgagcgtgtgtctatgcacacactcacccacagatatgtatatatgtgagtgctgtataattttttaaagatagaaatcaccttcatagatgagagcttcaccaggtgcaagtggtaagcatgtccctaatcgctcattcctaaaaatgactcttaaaaaattaaaataaaatataagtgaatggcttaattatgttctttggagaacatttaaaattccatgctgtcattctctgtatatctgcatgggatgtttctaaaatggaattacgttgttttgaaatgtgctgctctctccctgactgcactgggaacgttttgaagcattgcataaggcttgaaatagttgcaagaacactgcatcctgtgggcatcactcagtgacgcctccttctgctctggtgtccccggcccattttcacttttgtttgttttgctgttgttcaaatggcctgacttgtgtttgactctgggttgtgagttttggtctctcggctcaacttctacaagtgtgctctttggtttaaagaagatggatatttttaagccttttgctgcaatgggctaagtttccctccagacatatgacacctgtttatactctcacatgttaaaaggagtgcagctcactggcactctgcactgacttacttaatcaacctaaatccattctttacttccaactgcagtctgcctgccttttgaggtttgagagattgatttttttctctctctatgtgtgtttggcatatatatatacacacacacacacatacacacattctttatttgaattaccaattaagatgtttcatctttttctcctcatatattaagtttaaaatcataaatgattaaaaagtataatataaaaaatttttttagaaatttaaaagctggatggggtaaggagacaaaggccctgaatcctagcaagctggaagctaaggcaggggaacatgagcgtgaaacacacacagagaggccctgcctcgaaaatgaaaagcaggacacaccaagacagatggcaaggtatgtgtttactgtcacaggagtttatgaatggccacagttccaggaaagactctctggactggggttccctcccacggtggcttatgcatcagggctgtgggcacatgcctgtaaccctatgagggctctcccagctgtcaggtgtcaccagaacaaggcacctggctccccaggagcaaactggaaagaaactgaagtgccttctgacccagccttgaggtttcatgttggagtcagttcttttgctcatcagcaaattctcgtccagctcccttcagtgggcagttgagtctctctgaagttggcatgcaacttaaagaacttagaggacacactttgaaaccatcatgaaactactcccaccccccaagtctttaaaatattttttttctggtttgtgttcagtttagaaatctaaaatgttaatgtaattatttttaattaattacatgtttattaatcatttctttaaaaatttgttcttatttttctgtatttgctttgtgcatatgtgtgccttagtgtcccagaacagagtccagaagacaactggaaagagttcaggcccccgtcccgaaccatgtgggtcccagagttctaactgaggttatcagtcttggtggtgagtgtctttacctgctgagacatctacccaacttagcttttgttgttttgtagcccaaaccgacctggaattcacaccgtactgctgaaatggctctgaatttgtgggaatcctgcctcagtctctcatgtgatttggtgcttggctcaccctttttgtttatgcttagtaagtccttccctttcccagggtcacataaatattcatctgtatatattatatatgtatgtgcatatataatgcacccactttctctgctctttcactttcccatgtagctgtattgctatttctagaatgcatttttaccgtgtgccattatacaatatcaatcaattattttttccaaacaattaacatttattttagtggcagttttgaatcagcttgagttttcctgacaacttacgatgccttcttcattatcaataaatgcggcatggatcgtcagtgatccagtgctctggtgctggttggccaagagctgctgctctgagctccccagcttcttttcttctggagttcgcctcctccttatcagccaaagggcatgtgcttgctgctgggtccctcagaatggaactccaaggacacaggggatatcagttttgctattttgaatgctgacccccccagccaagactatacagattcatttgcctggtcagatttccttaccgaatgctttgaattcctatggctatataggatgtctaattctgtaaccttctcattttaatacagcaattgcttatttattcgttcacatggacaataaaaccacctattagcctcagaggactcctagacactgagtaaaattatgttgaagactgaaaaggttgggaggcagaggcaggaggatttctgagtttgaggccagcctggtctacagagcaagttccatgaaagccagggctacacagagaaactctgtctcaaaaaccacaccccctccccccatgggggggggggaagattgaaaactttgatatctatagcatattgaaaaaaaacccatttatttaaatctttgatattcttcttgaagagagttttcttatagttttggttccacgtattcacctctttagtattaggaatatttttttttaaaataaaatattggcaatgtgactactgcttgtttattgttcagatttttttaaatattcagggattcattgaggtagtggttttctaagcttcagaaaatgccaatctattaaaatattttacatatcccttccttcctccttcttggatttccagttaccctgatctgaagagttaagagtctagtttcattctgacaaggtctaagtgacactgaaggcagatatgccagtcaaaaggacaatcacaggttgatattcaaaacactggccttaaaatgtccttttcttatgaatattccttttttgttttttgtttttgttttgttttgttttgtttttcgaatattccttcttcaaacgtcaatgacaaatggcattgactgccgggcgggtgatgggggtggcggagtgttctcggtttctaactgaatgctttgggaacagtgtttctaacccccataatatgctctctttgcgaagcttatgccagggcatgccagagccttctctttctgttataaaaataaccaggtgactgttaccaaagcaatccctcccgcccgcaggatgtgtatgttaacctgtctgtgggctggggatgtgcgctgagagcaagaggcctatgattcaggtaataacattagtctatgaaaaacacgctgcctttgccttgatgctaatcaggaagccatcagacagtcttccctgactgatgaagggcaggaaggaaaggtagtcggctgtcctcctgtttttgaagaagaagaaaaaaagggcgaggtgaattgaagtctgtgataggactctccctcacccggagcctcctgaacgtaaaggtgtggtattccaatcagaacggccaaccggaagcatctgatttgcatgtattaacaggggcgggtcgcagcctcctgacaggtcaaagcaccactggggaattgaaggaaactttgattcctctgcttttgctcctctgccaggctgcagtcacgctgttctattgtaaaagagggtccaggactcagaaagccaagcttgtcatttaaattcacccacgttaggacaccaccgagctctgtcagatgtcgttctcaatgcagcgggacaatgtttttcaaccccttcgcctggaaacacagaggcctggatcaagggggaggggcagctcactgggcttgcaggatttttacaaaggcaagattgaaaattttcatttcaggcaggttttctttttcctttacctctctctctcttctttcttccccacccccctctctttctttctgtctgtccgtctttccccctttaaaatatatgtaaagaatctcaccataaaaggagagtgccaaaaaacttctatggcttgcaaagactgcttcaggagaggctgcaagggatgctggtattttttctacatcagaggtaatggctgtttgctagtcatttgcttggacaaatactggttggctttaagggaactgctgatttttttttttatcagaagaaccattcatggtaggatataaagaatagcagagacttcctgataacatctctgatgcccacacctagtgaaaataagatacacattgtcaaccttgtgctgagttggggtgtcctcctcagtgaggggtgctggcatggcctgacctgggctgaggcaaagaacctactcagctgaggagggagtcctaccatggcggctgcagggccacattgttcttttatttaaaccatggttagtaaacatctgtgaggtaagagttctaggagtttaataccctcagtgagcacttactatctctctgtttctcaaccgtgtattcaccaatgtccaaaaggccaaatacttcatcaggccttatggacccaagttgcaccaggatagatgtggctgttgctgtctcagaacttcttactcgagatttttatcttgtggcttgatcccgtctatttgaagccttattcatgtttatttagctttttctttgcaccacatcgttttgtattacgatatcttatagacagaccagggagtttccttatcaaccgattggctagaaaggatgtggaaacttgctatgccttattgtgtgaaatggggttatcatcgtgggttgcttcccacagagaggctggcatagggcactcatgttgcaccctggagatactggcgtttctcattaacaggagtgttacaggcatgagaagtgatgagtatgtgctcggcaccttgaaccttctagctgattccattggacttggtgtattaccatacaccaaattttgaaattttgaaatttctttcttttagcaagcattgtatcagagaatagattattgtttggatggctgaagataaattggaaaactcgggtcatgatttgaaagaaattcttaaaagctctttgaggaaggaatatctggaagtgtgtgtggaagtgtgtgtctaataaaacaagtccgaagttacatttctagttacatcatggtctgagaaacctcttgcttttcttttagcacacaaatctctctcagaggcatggactctcataaaacaagaccattaatctgcatgtcttgaggaaattgtattattggaattggtctggaaaggtgtcattcctttgtggtatctcaccgaagtattagattccttggtagcataaaattatgaaggagagtgcagctagagtttgacccgattccaaatcttagccttgttatttattagctttgaggccttcaatgtgcttttaactctctctctctctctctctctctcacacacacacaaacacaacttatacacacatacacgaatatatatatgtacatgcacacacatatacatgtatgcatataatcaaatacatgtacttatgtatgtacgcatatatgtatacttgtatgtgtatacaagcacacatacatttacagatacatgggcacacacatatgtatacactaacacataaggacatatgcatatgcacgtagatacatacaaatatggacacaaatgctgatttattaattaaattcagtgtctaccacctccaagcaggagtttgcagcatataaatagcaaataaaaccagtaagtatttgtcgttcctaaattaatgaagagatggatgatggatggatggttattattacagttaacccccttcagatatttcataattaagcatcatcttgttctttctcttcgttttggttgctgcctaaacctacagtacctatgaacctctccagtgcaggcaacactcattccatgagggtataattagccagcagagatctgtcctagaaaaaccatcaactgcaatcagaaatcctgtgtctctcagggaaaggtggtgagtgagatgggactccatcattttacatggcttccaaagatgagcagcagagagtttgcaggagttttctgaaacatcagaacagggtaggatgggttcatttggatgtctaacccttgcttgcacggaaaccaatttgacctcatgtgaaaccctggctgttttgctctcgacaaagcaatgtggtttggctactggtgatagcaaacagggagggctgaagttttatgctgttgactgagacctgagtttgaatcttacctctgccaattactggatataaggtctaaagttgatataaatgcattccagttacttctctgcagtgcctgctcccctctgaggattgcaggataaaaatagacccggcacacaccggcctgtgttgattcaggttatttcccccttagtagtaattcagtttccttttatgtgtattcaaggctccacaagtcctagtgaaaaatggtctgaggaatgagtaggcaagaagtgcagagtgtctccatcttggacttgtgctcataggttggtgtccagaaagagtgttcagtgcttcctagtcacagacacagagaggctgtccaagaggttagtgggccatacgacctctgcgcctgccacactctcaccagcctgcactggcttggcaggaagcttgaggttgctggagtaaaccccctatttctctttaggcctgaacagacaccagtaatcattatcaaacagatcaaacagcaccctcttgttaagtaggggccaccctgaagaacaattcctcacacgcgatggtttatccattttcacggggccaactcacaaaggcaaatgaattaaaagcaatttggagttgcattcagtattctcaaggcaaaaagcggcctccagcatctttgctgagagtcttggaaatccgtgtcttcgacaagccagtctctctggcctcggtgatcggcttctattcaacccgtgatttaactggattgatcggaagtaagtcctgaactctaaaggagggtcctcagctggcagccccgaggctgtgccctgctctgccccatgactatgtgagcgtttacagatgaggtaggaaccgaaagtggcaaacagaacagcctgagaaaatgatggtcaatcgagtagaaaagtccactatttgcatcagtacaataatacacaggcacacaagattttcagttcctcaaacccgaggagtggccaaacagcactgtgtgaagtctgacatcctgctgtacatatatatgttgggcaggctggaaaaatatagtaaaatcccctcttgtgtgaggggacctctgcatagttctccctaattatggaggctgctgctctctcctcttctttttgttttccccttcatttttgcccttgccttcttctctttccctcccctcccctttctcgtccattttcttgtgatttcaggttgttagtaaactcaattatgaaatcctagctttaaagtcagctcagggggcagcaagatggaccaggtggtaagggcagtgacttgagtatcttccctggaatccacatggtgggagggtagaagtggttcttaaaagttgttcttggaacctccagacttgtgccatgaatggcaacagggatgcctctgctccccacattcccaacacaatcaagagacgatgaaaacatttcagtaagatctaaggctacactacgtgactttaggcatcctcagcacatgttaatccctcccgttgtccccatccactctcctaaaccttaagatgcccagctcttataaaactttgaagttctcactctctaatacacagaacattaacaatccttaaagacaatgaaggaaacctgtggctggcttcttatctttctcaaggtaagaggtttgactattctcttcaaagctttcctcatcctcctcctcctcctcctcctcctcctcctcctcctccattcctttcctccagttgaaaatatagagcaagacagaagtggccttgcagagatttgaacttgtgactcaaagcactgatttcatgcaagagacccatgatgtctgggctgggagatcaaagcccttggttttggcctcacagcttctgctgtttctttctggtacaggatgagggtttatgtctttatttatctatggggctagcagaatcccagtctgtcgtaatggtaaataaaacgtgttggagttactatggagaagaaaggagcaattacaactgcttaaaacagtattaaaatatacttaagcagaggtttgccacgtaaacacacaattaaagcaggaatttgtgatggatgcaggagtttgacggtcccagacatactgtttactggggtagttagcagatggatacgtcaactgatcccagatgtgcagcctttaaatgggaacacacatcttactggtgatgtatgcctgcaagtagcaacaaattactttctgtttaactcttacctattgaatgcagagctatgtagtactcagtggatatatatatatatatatatatgtatatatatatgtatatatatatatatatatataatttccttattcaaaagtggtaattgaatatctgaatatctagaaaaaaagaagttttgtgcaagtcattttaaaagaacagattgaagtaggttcacttttttcttttaagtccagatatctgatccttctatccccagctacagtgttcagatatttgcagccaattaattcttaggaaattgaatctgaactgaattaattttttccttttagggcagatgaagcaacttttaggtaaggagagggaaaaaaatgaaaacagcttttgtggcacataattcatacaactaatgaaaagtgtgatatcactgtcctttcgaataaaacaataacaaaacaccaagccacagaaaggcgctgtattgttgtatttgctgtttaaataatttagctgcaaaaagtctgaaggctgctttagctgtaattaattattcattaatgacatgctaattgcacaatacctttgaatatttaacagaatgcaaaaagccaggctctgaagttatgttttaatgcaagggagggaggggaaatcctgtagtccatcagtgtaggacactgcatgacaaaaaaaaaaaaaatctttttttttccagatatgaggtaaagtaggagtaatgccctactttccagctaccctccctgtccagtcaccctttgtgtcatagaatataatgtccttatctagacttaacaattgacagggtggtaaatcccttgacttttgtccaaatgatttctctacaaaaatgggttaattatcgcctttccctagctttttgactaacaaaaggccttggatctcttttttcttttctttcctatttactgtaaggagccctttgaaatgtgatagtttaatcggcaacaccttctgcagagggatactgagaagccagcctggcccagcctggagctcaggttcctgtgtgaacattaccacggttagaagatatgaccttcattatgccaaagccatcctggactttcaggatgaaaaagaaagaaagaaagaaaggaaaaaaaaaaaaccaaaccaaaaaatctcccccagtgctccagagtggacttctttttttttccttgaataaaggatggcggtttttaaaacagtgtcttttggtggacaggacggctaaagggcagctggattgagttggcttagttgtgtttcattaattccctccgagacctggtgcttgcatctcactgcactctgtgcctgttgggaagctgtgtttatctgcaagccagggacagttttggtagtggctaagcagagaacaagactccgctccccaacttgtttttatttgtcttggtccaaaccagagaggcaccagcccctaatttagtgcccagcagtgagctgtgtggcagcttgtctttgtggttgagactctatttcatgcactagggcctacttagtcatagtttgcatttcactcccattactattaatggcatttaggaatgcacattggcgggaagaagaccacattgaatgagtatattatgggagagatgaggaattagcatactcatgtctggtctatgatagattttactgtggcctggaagatttagcaattaagtgagaaatccccattacaaacgtgcacctgctagaaacaagacaaagagcaacaaaccccagaatgtaaaggaacaacattgcctaaggttgacacctaattccccctcttgtctttataatattctatcatttgggaaatgttacatctgctcatagctgttgttaaacagggcaatgtaaaaatccagtgcctgagtgataaatgaatgacaggggaaggcagacccggccaaaagtgtgtcagggtcaaaagtgtatttatagtcgacttgggaagtcacagctcactaagtgaaaagagaaatgatgtaaaagtccggtctcatctggcaatatgtgaatcaaagcatgggtgattgcacagcggcaagccacacacagggttcagttgacagatgcgttttcttggcttaaatgtctaagtttggattaatattttagaattggaagatttgtgttaagatccaatagccaacttctctcagaacatcaggaagtccagaaactgaagcttcagttttatccttcagtttctgttccatcctggtgacaactggcaggtgcttgggtaccagggacttttctctgcagttggcttgtacctgcctgtgcctatagttggaagatgggaatcagaggtatgagtgtgagttggaatgagaagagaagggttgccttgtagacaagctcctctagtggaccccacactcttccatgatgttgagctatgacaagatttcagaggctttgggtcactcattgatgtcctcctcttcctcatactgaaagatgtcacctatggttgtcatctcccaggctatcaagaaattagtcctttgccttcctcatggttctcagatcagtgccaatttcaccaatgtgacttattgtgattctttgtatatctcaaaatagtgccttcctgtgactaaggtactgggcactttccataggaatcaagggatgatgggtttcttttgtttgtttgtttgtttgggtggtttttggttccatcaaggctggactcagtagcagtcaatgaatagccccagactgtgataggagaatgtctctgtgagcaaaattttgttgagaaatattagtatggagaattcccagtttctattgactcctggctcggggcttccagcctctactgcttacttcacattgggaatactcattaagaatgaatgaatgatggaggtacccaaagccacactccctccatagtcctgaggtgaatggcagtcttgaagtgggcaggaatgtcaagagaagccaatttcatgagtcttatttagagatcttcaggccaggaaagagacaagcgtcaacaatccatgtctcctttactcacaccctgtagaggatagcctggaattttccatgttactgaagagtgatggggaaacatctgggaccaggcaccctcatacacctctgggaattgcttaaaagtggtgcaacatgaatctcccaagtggaaaatggtgttgtgcaggagagaggctcaaacatgactgagcacaagaacgcttcctcccccttcaggtctggattgaactggagactgggattgccaagaatagatctgctctcctaatctactgtgggatggatgtctaacctgtgagaagtagaatgtgggattcttggatcagggtggggagactccacatgatttaagatctgttctccgattggacagccaagtctagattggataggttttattttattttattttattttattttattttattttattttatttttgccagctaagaaattgcttgctggtgatgggctgttttggaaaatgcttcaacatagtcctctgctggtctctgtgcttctccctcttgacagtgtttcataacagcaggagtagtgagtgtgtgtgttcagcagggaatgaaggccatagaggacttgaacctgctcaggatgattttgtgaactgataagaggcaggggattgtgggagaggtgataggccgtcatcagcatacagaataagttgaggaattctttctgatggtaaggactgtaggagatggtatatggtgttagctagcattctcttgtccacacggaagaaagtcccagaagactgatataaaaaagtgtgtgtgtgtgtgtgtgtgtgtgtgtgtgtgtgaagacactggcatttctgaaagatgtcccatgactgactcctgttgcaaatgtgccttttaccacggcaaggtgataaaatgccacgacccaatgccagagtacaattaagggcctgtgggatagagcaggcagccactccacactggagagttttcattgtataattaaagtgagcagaggggcgggaggcagggaatacactgaaggagaagaagcaatggctgaggcatattcagacatgacatttacagatgtcgatagccatcaggagcttggctcctctgcccacgaagacaagaatgtcacatgtcagtcaaaggcagagctgcttagcagggctggctggagtgtgaaaggaacaatgtgtgtggggtgtctgtttggctcacagtggtcccaccttgggccttaattgtgcttcctttgtgttggtagtgtccacgtccagatttctgatgaattcagagagatagcagctagcgcgaagtgtatccttccctttcaagcagggattctaggccatgcataatcccaggggaggggctaaaaataacacacctgagaagcagcgagacttcttcctgagaacctttttaggcagtctgggctcttacagagtacacttgtacaatggccctgtcagtgtggtgtacgtctccttaagccctcttagtggataccacttcaccagggcctttgccgttctatttttatgaggaggtaaacccgtctccttgtccttcggctgtgcagctgccattggcctgccctcgggcctctcctgacatcacataggcaaagcagttgtgtgagaaaattccagaacaccccgagcaaagaaaggaacaaggtcttctttatctagcccctgaaaatgtcaacgctcagacacctctcctcgccccatggcacaggacactggatggtgtgtgttccctagactggctgtcacgttgggttcctggacagttcttcggagtcacacacaccctctaggaatggaggatttgtattttcagtgagtgttagaggtgcttttgaatatgttactctttttctttttttttaaatcacagttctgggaaccactctgccacaaaccagtgtgctggatgagcaaaccaaactgggcttggcttcagttagcaaggatgcttcagcagctcacagagggaactttgcaagttagctgctcgatgtcggcactctcacccattcctacatattcctatggaaataattttccatccaagttatcttctttattctaaggcattcacttgtctctgtacttggcacttactagtctgggtgcgtgcacatgtgcatacacagaggtctgagttcgatgctgaatgtccatcttaaactgttctccacttttgcattttgagaaaggattctccctaaatgagaagctcagtgattcagccaggctgactaggcagtgagtttcagggatttgtctgtctccactgcccctgttctgagtactgtggttagcatttggctttttacataggttctggggatcggaactcatgcttttggggaacccacttcagtaatcgatccatcttcctggccttatttctttacttccttgtttgtttgttcacttgtttctttgtttattatttttgaggtagggtctcacttaagcctaaactgaccttgaactgaccctatagcccatcatgacctagaactcctgatgcccatgtctctacctctgggacgttggcattacagatgtgtacctgaacatttggtttttatccagttctttactctcagagctttgctctgccttcaatactcccccctttacaatttctcctggctgcacccttctgtgtcctccttaaacttcagagctctagatctccatggcagagattaataatggatgaatttccaaaagttttgtttcttgctcacacagatcagtgactaatggctgcctggggtgttctctgggaagtgctggatgacagtctgtgttccctgcaaatgagtgtgatgatagagagggaggcggaggcccgctcatgccttcccattcaggagggaggggtgctgctgagcatcctgaacattccactcttggtgttttgagatcatgtctgctacagcttgtgagagacttggctgtggtgacttgattgacaggatacacacagcatctgtgatgcaaggactattgtagggctactcctggttcccatttcagctgaaatgttagcggtgtttcaaaggtgcatgtccttgtaacagacttggggaaaggacacgccacagtctctcctgggtcccaggttgcttctagaaggaggtctacaatgtgggggttatgagctatctgtgctgtttacaaggtttgatggagaggtttggaactaaccagggatgcatcttacaacctagttcacagctcgaattaactacttatttctgtaatggtttaatagctgtctgtctggctagactgtaagcagttggcaagcataggttcccatctcttcagcaccctgccctctgaatctaacagagtgctcacgcatggttcaagtctgtaaaaatctgccaagcagcaagctaatggacctaaagactcttttaggccttgaagtcacccgtgaaagttccctaaaggctatctagttagattgatgacggttctatgtgtcattctggccaccttttgcattaatctgaccccttgaaagacaggggttcaatctgtcggctgccagccctgtgttcttctttgagtcaccatttgtctttccagtcagctatgtgcacagtctttctccctctccctttctgtgtctatttctatctctgtctctctgactctgtctctctgtctgtctgtctgtctgtccgtctttctctctctgtgtctatttatcactgtgtatttctctgtgagtgtgtctatttttctctctgtatgtctgtgtgtctgtctattctctatctctctatttctctctgtctctctgtctctctgtctccctctctctctctctgtgtgtgtgtgtgtctatttctctgtatctgattctctgtctgtctgtctcgttctgccccccttcccctttcctgtcctctcttctttcccccctccccttcttacatcattgcattctcgtgaaaaccctttgctttcagtgttatttctagcatccccatctggagacagcatttctggatcatcacagccacaggacagaagccctctcggtatttctccctgtggtggattaactggctccctgtttcctcatatttgagtaacctctgttaggaactcctggcaactgggaacctagccacacctttccaatcccggggttcctgagttacaattttcatgggttgggggctcaccatgtgttcagacctgcactgtcttttctgtgtgtcactctgactgttgatggtacctttaccttccaaataaagacactgagcattgaaatgtgggataatatggaaaattgcacagacagatatacatatatagagaaatgttttttaaagaacatttataaaactgctctatggtaacctttaagacacatcaaacataaaaccatcaactagataccaagagcccttggtctgcaaccaaatcatcttgtgttcaaatagaagttctatcactgattgctcaagcaatcttatgcaagccccagatctgaactacccactccttactgtttaaccaaacctctcctattaatgtgcttcctaaaaggtgggtgtttggaatgagtctgtgattcacaacaagctgaggtgtaagtacttacagaaagccattcaagcagggatcccacattcaacctttttattttctgtccgccccagaatagcccattgcaaccaatagcagatgtgtgttcagttctagcttaaccttaatgtagtcttcaaggtggttggcattttcagttaagctctgctcagttaaatgggacttctcactaaactgaaaggagatacctcctgtccacatgtctcacaggtaatggttataagtcatattgagcctaggtacccagtgtagccatctctatacctggagtgttctatttcagggaagcagccgcttttgtgtttccttccattggagttagccctcacttgaccagtaggggtcagaagactaactttcacctcctgctcttttaaaagtctgaagcaggaggaccttttatgaacttcctgccttctttgtccttccaagaatgttcccaggaacatagcaaccgaataacaaggcaaaatggttgtgaacccggactctgaagtcagacaagatacatagttaaaaagctcagcttcaccacttgctagctccctggcatgagagatggtttcatacctctctatccttctgcttcttgaacctccacactggtttaataccttcagggcattagagatttttaaaaatgtatttaaatggcctaggacattgtagctttgtagacagcaatggacacaattgcagctgaagggactctctagacttgtctccatgaagataggaggctcccgttctttgacaaatcttaacccctgtctttaacagaagtgtagaatgagaacccattatgggcacagtctccatactgtttactcctcttgggcaaagcagttggcaggtgcagttactgcctccctcttttggctaattgtgttgtgcttctcttgccagccaaggctacagctggagattttactgaatagaagtgggagcaaggagtgttctcccagaatgcatcagggcaaggtcgggtgctacagctaccttccagataaatgaaacaactatcttcacagaggagctgttcttggaacagaggccaggatggcacccgggcagtgaacttaaggaaggaggaatatgagtgtgaggtggttccatgagatgacatcagggttccagatgagaacactcatgttctacctcacgggctctcatgagattgatatctatccctcccagggatcctgcactttgcagatctgagcatgtaaggaccgtgtctgccatggcagttggatacatggtgcctgaggaggattaggactttaggaccaggtctccacaccaggatagcaggcctgggtgaccgccctcgagtgctgaccattcacagattggctggttaaacagaacaatatgtttcatcctctggtgtaaactgcagcccacatggcttccttctaccacatcacactagagtgaagtctgatgatgtcactgtgttaatggagctaattaaaggtgtgcacctcatgttcaccatgtgtagctcctccataactgtttcagtttcacttcaacacagtgatgggatactggaagcctttggttttctgatctctgaatagggcccactcagtctctggtcatcatctccacacactctaagagttctcttcccctgctgctgccaagggtttctgtccttcccagtagccagcctaacatgcgactgtgtctcctgaagctgctttcaactgtgttgggagcaccgagtatttgtgttcatcttcccttcttgctcagtctgtaggactttatggattattttccagttctcttctgtgttttctgaagccccaggctcttgggtgtatgtaagttatgtgaggctctctaaggaccccacttatggtgcagcctctagaagtgtttctataacgaaccttatgggccaggtcccagggtcacatcttgaaatacatggacagagtctggtctcctgtagactggatggaaagttggacaagaaagcttctcgtttaggatccttgcaggagatccctgttggagggaccccagtctcattttcaactcactgagaaaggttgcctaaagatttcctaaacattcaaggcaaagtcctgaagaaagaggaggtttggaaagttgtgggctaaagatggttcagctgtaaccctcagtgttagcagtgagtgagtgagtgtgtgtgtgtgtgtgtgtgtgtgtgtgtgtgtgtgtgtatgcccttgggaggtaaacaggcttaagggagttgataagggtgattatctcatcttgggaccattgagtttatatgtggaagtcagagcagagcttggtctctggctatgtgagtgagggtgtagcatgaaggcagtcatctgcaaaccagtagagagccctcactagaacttagatctctgctggagatacaagctgaagcctctcagctctaaaacttggcaactttgttacctgtcaaccatccaggctatggacctgggtgctgcattatggctgctggagaagacagatggtgctaatatctggggcagtgtgcatgtgtcagggatacaaggagcagcgaggcctcatcctagagaagaaggagaatgtttacttgttagccctaaatagcttatccgattgtgtgtacaggaagagaggaggaggaggaggaggaggaggaggaggaggaggaggaggaggaggaggaggatgctatgtgacatctcacaggttgtcatgaccccggaagacactcagatccgtgttaaaatgttggacccacttccaagagagctaaatagagttgtcttattacatcagagggtggataaagatatcatgattttctattgcctgggacagggcctcatggtgaagaaaggtgtcaaaacaaaagcacttcaacttcaggagcaaaaaccaagacactagagtcagagttaacattcccttcaaggctgtgtgcagctttacagctcaagcatgccagggctaccgtgaggcatcattcccagggcagcaaggagccctggagggtcccttgaagtggaaagggatgtttcttgagtggcatattgagaaagaacaatagctgggggcttctgggggcaaagctttcggcttacaccggtgggtacctgatgaaatacatcacaatgtgtcattgaagtgtggagccttgcagccccgtggggtcacctgtccctccccctgctcaggcagatcattcctcacactctgtttctgagctctttgtccggtggctttgtgcacctcaagcgatggggcttccacctcctcccttgggatgccattccacactcaaatagagccagctcctaagcaggctgtcctgatattcagcccaacttttcctttctgtaattacatcccattcctctcggctttaccccttggcgtgaccccggacaattctttcccttcatcggtgtgcctacacccttgctcggggagtgtatttgatcctccggtctttttgtcctgcccgagccttgcttattcctggcttgtgctgcgggagtccttatgagcagctcctgctgctctctgctttaatcctcgtggctcccctgctttgatttctgtccaatttgcctatttctttcaggggtactgaagagccccgaatgaaccctgggcttcttcactatattatttattaatcttttatatgggagatcttctcaatgatgataaagcaggttggctggaaaataaaaaatccctttgaaagacagagttgatgtgaactcctgtgatcaggactctgggcacttcagagagaaatgagtttgcagtcccaccacccagccctctgatacccaggcagctgtacttccttgtactgcagagggcaaaggaggctgggatttagggcacagatggatcagagtggccctccccagtcagtctctctcacccagactgttccccaaggccagactccgggttgcccctcaacaacccttcatttgactcccctccctccatgattggtgtgactggatgggatcatcctgacttttttttctgaatcagctcagtatttttccccactttcttctatggtgcctcctgtatttctttcgtcttcacgtaccccctagtaagcttcatgtagaacttaccttgatcgcaatattctgttgggggcaagagccaatgtaattaaaataacaagacagagagttctggctggcttggggtttccagtcacaagtgggagaacagtaggtggaggctaaaatgcaagtgtagttgaatgatgcggggctgtgaagcaagagtgacctggagcccatatgaattccatcaagcttgagaacggcgcattgccaggcatggtcatgcatgcctgtggaggcagaagcaggttcatctttgtgagggccaggtcagcttggtctatacaacaggttccaggttagcgggagctacatagtgagatgtgtcttgggatcatttttaacagaatcggtttaagggaccagccatgcatgatcagtagacagggaaaatcaaggcctaggcaagaaagatggttagcaagatgtcaagtcaagtatatatatatacaaagcttcactgtttagtgttgacaaagagcaagaatagaataatgagaaacaggttgtgcactgggtgacattctgggggtatgtacagatatttgttactatattttttttggcattgtgaagaggatggaaaactaagattctcatttatcgtgtaataaaaccagtctacctttgtgtaagtgtggggtccttgagattgaacccagggcctcatgtgtgtggtcagtgcactatgactcagatacaaccccaatgtggaagtactggaggcacacacctcagagaatagttgtccagagccaagataggggcataaaaaggaaacatgactcatatttggaaaacctctgggtatttgggcaactttcagcatcatttgggcatggttttgctccggtattttacacagcacatgcctaggtgctcatttcatttgtttaaatgaacacatggccacaatttcttgtgtgttttgtactcttgggaacctgagacattctttttcataaatggtatccagctaggaggatgatcacagagatgagacctgtggacatttttaacagtcactaaagcagaggaaacaatgttgatttttaggaagacagatcttggtttctcactgcttatgattttaatataactacagggatctctctctctctctctctctctctctctctctctctctctctctcacacacacacacagatcgagagagagagacagagagacagagagagagaacgcatgtctgaaccatgcataggttctctctgcccatcattatgtggttctggggattgaactcagggaaccaacaggtacacagcaagtgcctttacctgctgagccatcacactgggttttatttaataggttaaaaacatatgtagaatacagggcctgctccagaatatggctgatattcttagggtcactccattaaagaaaacattttcccttccagcaacattcaataacaaatagcttttggcttcgggtgaatgggtggattccattattttgtgtgcctgtgtttgtgggtgcatgggtgtgtgtgtgtgtgtgtgcgtgttagtgtttaacaagaaaaaggacaagaagttgagtgagtgagtgagtaagtaagtgagtgagtgagtgagttgaggggaggatctggggagagtcaattaaaacatattatatgaaatttgcagaaaataagtaacatttaaaacttatgcagtaactattaacatcttagattctggaaccagctggcactgtctacatcctgattctaagagtttcttactaaatcttgagcagctcaaagtctgtacatccattttctcttctgtccatggggaagataatatttcccttgtagattgtcacgagtcatatgcagaaagccttgaacccagtgcaggttgcacatttgagcaaggacacttagtaaacaccaggtgctaagtcttgagtgacacacacctcatgaactgtcccacacgatctttacagtagtctacaaacagtgctgtggctatttgactaaatacctcacagggttctaattgaagtttgacgcatattggcacttctttccaatacacaccactgaccacgtcaaagcccatctgagagtgggtatttgaatagcttatcagaactatggaaaatctttaactttgtagttggggaaagagtaaggggaaggttatttgtgtccagcaagaagatgtagttttactagtagaagtagttcctactccccttctttgttcaatcgcctcttcctttgcgtgtctgtgaagtaacatggtgtgcggtcttccaggcacttccagacaagaggtaatcatgtctggccactgagaagttgctgtcatctgaatgacgtagtatgtgcaaagtgcaccatacaacattggtgttagtggtgccgagtgaatgagtgagatcaccaaagaccagctccttagttacacgttgttgctacaacacgtggctttgagtcagcctccagaagccattctagactgtctgctgcatccttctcatttcttggtagacataccacacacattgtcatgaacattctcatttacctttctgaattgggtgtggccagatatttgtggcacaccaccttatagtttggatgtattgtttcccttagtgtgatggacatggagaaaatttgggctttgtttctgtgtgacttaatattatcaaacacaaaagagggccatgaaaatggagtgatatgcagtatcatgaaaatggagtgatagcctatccctgcatgtaggcttaaagctaaaaggaaacaccacaccccttaaaggctttttaaaggttccttgcttttggagcagtgagattcaattcatttggttttggagtgtttgttttcaaattctattgtaagttgcaactctttgtactattctgagttaggctacttagcttttagacacgctttgagaggagactcttacctgcagtcaaccatcagttcatgtttctttgttctaatctccattcctcctcctagtggctttcaagtaggcaaataaatccaagagtcccttgatgggtagtttaagtttacttaatttactctccttcaggggaaaaaaaagtattatttctcccagcatccccataaatccatttctcataagaatttgattgattggcggctagtgagatgttccagcaaataaatgtactcactgtcaagccagacaacctgagtttggtctccagaacttccatgatggaaggagaaaattggcttccccaaactcactctctctctctctctctctctctctctctctctctctctctctctcatacatacacacagagtaaagaaatagaagaatgtaattgggaaatgttgggcaaacaatgtattgatctcctcatcttcagctgacaaggtagcttgtattgtacgtctctccttatgtcttcattgttgtcataattatcttaatccttcagaaggtggtggctctctagaatggtatatttgccacatacagtctaactaactgtcctcttcactccttttctttagaaaaacattcttggtgaaaaagctaaaccacatgtcaaaacatttttgtttttcaaaatctaaatgcatctatagacagtttctcactgatcaggagaaaaacaaaataggagccaaggctacacatggccaaagcccaagataaactcatctaccctaactgaaaacaaaaatagctcagtaaaatccaaaggcccagaggccagggtattaatcacactataaagtaagtcacctaaatgtttaagggacctatctatctccaagggtcccaggtagggctgtggaatgacttgagattttaaagttttcctccggtcttgtgtgattcctaagaagattttctataggtcaaacttactctggctatgaatatagggagtgtcttctaaaggcagtatctgggagtgctaccctgaggggctcagcagttcctcgcttttcagtttctccatgggactgaatagtgatgagcttcattggagaaaaattgcctggatggtgttataaattatataatggttattaattataatgttactaattacataattaaatcacactgtaacattcctaataacatcttggagtacacccccaaaagacgcattgttgaatttttttacctttagtatttaaatataatagtttagcaatgtataaacattaaaatttcctttcatttcaactttcagagagagtcaccattaacactttgaaatttgttttcttcccttttcacatgcatgcattaaaatgcattaaaatctatgtggacctgctgcacatacacacacacacacacacacacacacacacacacacacacacacacacacaatgactgatgttgtataacattctatcttgtggatgtaacatcatttgtttaaccaatcttccatggcagaccatgaagttctaaatttttcattcttatccatcatgctttgataagcatctttgatttctttatctcaggccttctccacagccactgtctcactccctctcagtggtccttctgcatctcctcatccatgccattttattagaaatctaccaaagtccaggcagcaaaaattaaaaaaaaaatcatgaagatagcctgaagtttaaattccaggcagtaaacaaaactgcacacatgcacctggttcttctggaagcatcctctttataatttataagtgagaccctcttataaagggctgcccctgtgtgtgtgtgtgtgtgtctatctgtctgtctgtgtctgtcttgtgcatacttgtgtacatgaatgcacacatgtacgtacacacacacacacacacacacacacacacacacacatacacacacagtttcattaatgcccatgaataggtatttagagcctttttctttttgttagtatgccagacattgtaatatttatccaatatttgccctgatccccaagacaatttcattgagatgtcaacctctttcctttatttacagtgccagtgcaattgggcctcccttgcaagtaactagttgaaacttctgaatttatttctttagactaaatttcctgaaatagctcagagagactccaataataattttaatagagacagtttcttgaagataaccaaaacagcctctgagcccatctcttccagcctcaggaccaaatcagggagacagcagggaaggaaaacactaatatttttcattcacaggagttgggccagatatgctcagaaagtcatccacaaaccagtttttctgatctatggctggggtggtcacggaatgagtgcaggcatgtttcccatgctgtaagttagtaatcccatttcgaagaatggtgggtgatgaaaccattcaaaactagctttttccaaagcagagagctttgagggaggtgatcaccattgggtcaatcagggtgagggaggagcctggctcgattgacttgaacagagtgctgggcacagctttgccacccctcttgtcccctcccaaatcccgacaggctagcctagcaatgcttgagaacttttcattttgtgcaagatatgaaaacgtgctatgaagtaactagcccagaacatgcagcgagactgttagcaatctcggaggtattagacttggccgggcaaaggggagcactgggattcctactctaagtcaggctaaggtcctttcctctgttggttcagtctgtaaaatggaagcagtgtcttcctttggacgtcgtgggaccatgaagaagcatgttctaattcccagggaaagtcacaaggtgcggattagtttccagtagtggctcagacagccaaaaccgagttgggaggctggtacatttttatttttagagaaaaccaattccccaacatgtcctattctatggcaaggtagttgctgagttacacagtgatgcatccgcagctactgaggcggtgatgcccaggtgcactgccgtgtgatgagtagccccccagcactggcatgagtgccaggctcaaaggatcgtttctcacccccagcccattgagtctagcttcccttgattagccatttgaatgcacacttttgttctattcctggctggcagggtctgttaattactgaacatggtacacttaaaaaaaatacggagaggagagccttgtttgggaaagtttcgttttaggtccagtaatttgaattggcagtcataggagagaacattgtaatagatccacctgactaacttggattttgcatttccagcactcaaaagtacaatgcttatggtaatgaattttatctattacgagggaaaacaatcacctttgatgacattatagagtaaacacatttaacagcatgctgaattgctgaagtatcattttcaacgccctcattagtgtcacttaattaaaacttcctgctcttgactttgatgccggtacaggcaaaaaacacagggggaattgaacaaacaacaaaagaaggggggccactgccgctttttctggtgataaatcacagaggttgctaatgaaaccgaattatgtaccttttttccccctgcaactccgataaaataatacggaacacgcagcaactttgcatcaagcaaattaatcagctgtcagccgatttgcctttataataatcttttgtacttattgatcatttaaaagggagggggactcttgtttccatctccgtacacaagcattaggttggtggtaattaaagccttagcttcagaaatgccataataaccgttaattagcaggatgctattttcaacataatttgctaattaggcagtgaactggtatagtgtatatacctaattacgaagggtcctgtgctgtagacacgtgtgactggggtgtaaatgacaccattataggggtcctcacagacttttagaaaatacagtttgttcagagtgcttagttctttagggacttcttggcgtaaaggatgctattactcttggctcttttgtgtgaaacttcgacgggaaaaacattccatagggctggactcttttcttttatctagactggaaaaaagtcggggccgagggctccagagaggcattgttgcaggtacaagggctgataattaggcatggaagcaactcacagtccagcaggaaaggcaaatggtctctgttagcaggacacgcggagtcatctgtgagtcagaatggcaggaatctgttcttactggactcccttcagtaccttaacttgtctgtcacacactggcacaccatagcatgaagctctttgcctctctagcccctcctcctacactgccctgtgtagggcatactagacattaaaaaaaaaatagatgtttatttctgtctatttttaatccagtttgcttttccaactttcttggcctaaaggggggttgggggggtggggtccagatgatctctgcagcatgaagctcggttggtagagcacaatgtgtggaggcctgggtaccagcctcagcatcatacaaacgaggcttaatgtacacatctggaatcccagcactctggaggccaaggcaggagcatcagatgtttcaggttatattcagctacacagtaggctccagggcagcctggactacacgacaccctctctccaaggcaaaatcaagccaaacagaaaatctaaacattaaaaaaataataaggactggaatgatacgaaaaacagactgagctgttatacaaaagtctcgatggatatgctgattagtgacatttatgaactgaggtctggctttgtggcagaggctaagttaggagagactcattttcagatagacaaacttgcttcctggatcatcatagctgatttctttttaatgttttaccttgtttcaaatatttctttattccctttaagtggaatgaaaacttaattcaataataaatgagcttcaaggcagaatgggagtcacttaacttaaatctttttgtagaggttcccacttaagcagcctgaaaggcagtaaatcaggctggagaacggacatcccaatttcattgctgcgctgtagagagctgaattaatggccgcctttttaggatgtatggatgcgctctccagctgctgagcctgacagtgttatagctcaattaatgtgattttgatgtaattgcagatagggaatgtcatgctgaaaaattttatatatgtatacacacacacacacacacacacacatgtatatatatatatatatatatatatatatatatatatatatatatatatatatacataagaattacattgtatcaaccagatgtggggagagggctggtttttaaggcccattgtaatatgtaagagagcctcttcttaattttaataatgtttctctaggcgagagagagagagagagagagagagagagagagagagagagactaatcagtcaactaggttacttaccgagcatatactatgtttgctgcttgctgtttagcactcaactgggctcagcactgactgggctcagtacattttttcaacaatatccttccatcttccctgaagttgaagcaatcactagcaccaacctcacttcagagatgaggaaaagggggtctaagagatcaaaatagtgtcagacagcctagcattcgaaaccatggtgtttctgacaccccaagatcgtaattgactgtcatagatgttgtgcctgtaactgttatcagtggctgccagtagatgaacgacccataagtgttccatgaagcttcctagaacgtaagaaattcggtagtgtgaggagaaacaaggtcagccaagccgcctgagtgtctacaccatctacacatttctggttgtgtctgactggactcaaggcaaactccttcaacactggtactgctgagatgactcagtagataaggggcaagactgatgacctgagtttgaaccctgggactcatgtgtgacagaagaaaaacaagtccattagtttttcctttgatctccacacatgtgtgtgcatgcacacatttacacacacacacacacacacacacacacacacacacacacactctaaatataataaaaatagttttgaagcactctcatgccacttcttcagttggaataataattgtgactgtcttacataatttgtcacaaaaggtatgtgtgtgtgtgtgtgtgtgtgtgtgtgaatatgtgtatgtggatggcaaaggtcaaccttaatgtcctttctcaggtactgtccaccttgtagtttttcaaaagttaaaaaaaaatccttttaataatgtctatatgtgtatctgtggctatgtggactcatctacagatgacagaggcttatggtctcctacagctgagttacaggtcgttgaagcctccagatatgggtgctgggaattgaacttaggttctctgcaaaagcattatgtgcccttaactgctgcaccttctctccagccccagacctcgactgtttggagagagaccattgacttattggcctatgggtcagcaagtagtctaggctggttgatgtgtcaccaggactgggccaccatgcctggcttttttcttttttaatgtgggttctagggatcaaacttatgttcttgtgcttgcttgatcagcactttcctgggtggagcatcttgggtgaggcattcagaacagggcctggaacatggagactgtgacaacctagattactgttactaagttcaggcaagccagcagggtcattggtcttgtgtaatagaaagttctctgcttcttcttatctggtgggtacaggctgcctctgggaacttggctgccagtgttttctgggaaggacccagagggatatttagcataatctgggcggtgcctactggcactgatggaagaaagcctttttgtgttttctggagccattttcatgtctgtattactagaatggataatgctaggaactcagagggtgataaaccacggccacactgtctgtaaccttatttgtcaacccaacctcagctcttaaaggaaagaactaaactgaggcgctctttgaggttccaagtgacaacatgaagaaccaagcagtggtatgaattgaaaccaagcttagggagtctcttaaacattgaaaaatgagtgtaagagacatcttatactagctgtatagttagtaatggcatcttgagaccttagctactcatcttgaaaaatccaggtaaggagagtgcaccatggaagaaaatggtgatgacggtgtggcagttaggatggtgcctggcatttgcagaaaaattcctgttccccagacacattgcaaaattaccctaagcaatgcccacagatctctgctagtgagagtgagtattgtctctgtgagctttaggggaaagtcaagatcaaagaagttaagtggtctaaccattgagacacagttggaaagctctcccctcagcctccacctcagctcctgcctcatgttgcgagatgaagggaaactacctctaattagttcagggtagggatggaggaaggggggactaaaaagaccctggactcttgttacttcttgtaattccttgtgttagccaggaagtctggctttcacactggccattactatgtaaataataatgttctccatttgtggtcatattgattgagttacaattaataaattgctaatgtccctatggacagtttatgaagaagactgttatatacaaataatactgcgccgtaaatcccaggcacattcattgctgtgagtcaatgatcatttaaatgtgatagttgtttctaatcattgcagtggattggtaggtttcaatacagaatgattccagtttgcatggtgttgtcattacttctgagcactgtcttttgaatcaatttataaaaattaatattaaatttcaccactacatccaatacattaatccaacaaatagggctgttatttgctcacaagtaaattaataagaaatgagccaggaccttgttatattgttgaaatataagtgagggtgcattgctaggatttcttcttagaaatgtattttatatttaatgtgtctgcgtttgcctttctgtgtgtatatgccacgcatatgcaagagctcatagatgtcagcagagggtgtgagagctctcagaactacagttacaggctacggtgagccccctgacacagatgctgggaactaaactcgggtcctttccaagagcagtaggcatttttaactgctgagccagctatccagccagagtgttaacatttttgaagaaaaagcaatggtgggaaaagttttgattattattagagagaaaattcaatccatgcattagagatatatttgaatggggcaagtataggtaacacgtatcaaagaggcttactagctattgtgattttgccttcttataagcttgagccttgctgatagaaaggctttgggcattattgacatccttttctcatttctctcccacctgtcccagcaaactgtggacacacacacacacacacacacacacacacacatgcagtaaaaacagcaccttggacagtctgacctatgaatacattaactctcttatgaccttttaccttgtatacagtgggtgccgggtcaggtggcagctaatttcttccctcttcctgccacagcttgaccatgtaaaagaaataagaagaaggtagacatttgtttttttcttcacctagttctgggtctgtggttcttcatggtgggtctctgtcttctgttttgttactgtattgggcgtggcttctatttttaaggccactttactgtcacatatggctgctaggactccatcttcacctcacatctcagtggatgaaggaagaaggggagattcgtcccctagaagaagcacttcttgtctctctgcatattaactcgttagaattagtctcagggtcacataggaagccaggaaatgtagccagacctggaattagctctgaatcagaagaactgttgtaagtaggctactccacagtctctctactcttttaggggtcttggaagctttaggagtcctaagaaagctaaaactcccctcacctgaaaactgtatatagggaaacttttgaagcccaagattcaagaatcccaaattaaatcccctctatctttaaaataaaatcagctttaggggttggagttggagttcagcagcagagcgggagcttgcctaggagctgtgagatcttgagtgggagccgcagtactgcgatgaacaaatggttgaatgaattatttaagtttttcgttcatctgattatccaattattcaggatccagtctgtcagcatgtattttgctttgttttgttttgttttgttttgttttgttttgttttgttttctgcttactatgtttctggcaattgagatgtgaacaagacaggcaggggacttgtcttgattgctcttgcatgccaaggaggaaatggataatgtgcaaggtaaaagtgacaagggggtctcagggagatggcacagcagataagagagcttgccatgcatagatgaaggtctaaattaaagaccccagtagccacgttaacagtccacacctgtgttaacatacacacctgtgactctgagacagggcatccctggaggtttgttggctatcagcctggcttcagtttcagtgagggatccagtcgcaagggaatatgtgagaaagtggtagagagggatacttgacctctgacatcctcctctggtatgcatatgtataaatgggtgcacacacctgcacacacacacacacacacacacacacacacacacacacacacacacacacacacaaagtgatgtgtgttactgggtaaaataaatccgatttctgtagtagggagttgacttatggccaagggcaggagtcactttggataatcctaacaccctttccagaaagatggcttttaaggtgcatgatgactgctcagagctgtgctaacacacttcaggcagtaggaacatcatgtacaaacatcacaagataggatggacaagagcagtaggcaggggttaggccataggaagaagctagatttccttctacaagcagtggacccagtttgggaggagaggctaacctgagaaggaagggtggggttgccatttcatttaccccccgccccccaccgtgacccccaggactttgtgctctgatagggtgttattgtgtggctttagagttgcttgatcaactacactgaagtggccttgccctctgtcacaccttcatgggggaaagcagtgagtgtgtccacagtgggaagatggaatgagaacagtttcccagtgatcagcttctggtccatgtccacctatcccagggcaaccgtgactgagtaaccgacaggataatggaacaggataggttgcctgttccccatcgggaaccaaggaaaggaaaaggtgggggataaacaaacagatctccgggaacatgggaatttgtcttgtaattctcacaaggactgtgctttgtcagtgacacatctgggctgtggggaagaccccccagggcttacagcagcaagggattaaaatggcacaacagagcgcaaacaagtttcgtgggtgatcttagaacagtgcgacagctgagaggaggagtgggggctatggtgggcttttgtgctcatagacagttgcttttgaaacgtcatattggtgggttcacatttagtccttgaactgtgaatgtttttgattctgagtcactgagttttggctatggcagggatgttaaagtggacttgacccatttctggtttgacacatggagtaaaggtatggttagtccattgcttgttgagcaggttgttgttgttgttgttgttgttgttgttgttttgttttgtttttttagcattgttttggttttaattttaagatttatttatttatttatttatttttcatctagtatggtagctaatactgtcgtttcctttttacactatgtgggtctcctcccatcccatgcttggaccttcacccatttttcttctcctccaagattgtaaaacttcaggagcactgcatagcttagtcaaaagtcagcattctgttttgactactgactgagtgctcccagtgagagccaccctctgaagctggggacactttccttaacaaaatagtgggaagctgcaggaagctcaggaaatcctgagagatggttttattttcaacattggagaatggcagagaagttttaattggtaagttaatgagagggggagaaaggaggaaacaaagattttatggctaagataaggttggacatttttttttgtcttgaacataaatatttctaggcactgttttttaaaaaaatcttaaaatgcttcccctgtagggagggagggacggtatttgttatcgattcctagaggattttagtgtttaggagttaaggggcaaaaggtgccccctaattctgggcagtgtagctgtggcttaatgaagagccccacccccaactagaagcttttccccatgtggccctccctaacaccatctaattggctaattgcaggctcagcctttctcttgggctgcaattagccacttacttctttgcagatacaagtggccacttgaatcctcaaaaagtctattgtgaattcagtcatttgtgtgtccaatttcacctggacagagaggaggtaggaaaaaaaaagaaagaaagaaagaaaggggaataaatgatagtccttgaaattaaatccctgtgaaatccggcttgggtattgtcacttctgaagtgacgataatgggaacggattgttttcttctttgggaaaaaaagtatattcaacgtaaagtgcacacagatatcctattagcccaacactttcttgtccttaatgtctggcgtgacatacccacccgctgggtctgagctgtgtaactttaagtactctgttccgagactctagatgtactccctgtgacttaattggctaccatacctttctgcagaaaacaaatgtgctggactggagagtggagcggtacccgtgtcctcttcccctctgtaatgtacaaggttctggagagctggaaggtttgctgtaaatgtctacctcttcccatgctatctctgagccaagtgcaagagcgactgtttcctattcccttttgatgtggtctgctattgttctgttgggtcaaagggacttacctaggggatgatagatgcaggcagttgccaccgggtttttcttagaagtgcacaatagctaccaaagcaaatcactgagaagacactgggtagaacattgcttttgggtggggaattccaggaaagaggagattataactgaggttgctatagaatgtcaaggacagatggggagaaggtatgaatcaatatatgtcaactgcacagatggtatagccacacagtgtccacatcccagttttctatcccctgaatctgaaattaataatgccttcattataggcaggagctgccaagtagctgagaggggcccagcaaagctctgagagccgcattggtgttggaaacaggctctcttcatcccaccctactccaccctatgctcgactctcacctcccagatttggaacagtgagagacagaaagggagaaggaaccaccttattaggatggtgagttgtacagatgaaagacaccccaaacagcttactacctgtcttgctatgtgatctccgtaactccagtaactgaggtctaaaattgaagatctaaaaacatggttgtaagtagaatggaaagttatatataaaaaaaaaaaaaaaaaaaaaaaaaaaagaaagaaagaaaagaaaagaaagaaaagaaaaaaaaaaagcaaccacaaaccaccaaaacaagtaaagtattggcacaactctccaagcccggctagtaatgatggattctgtagtcatcccatggactaattaatgtgctctaacacatcccagtgcaatttgcaagtcacagattgcattaggtgatacaaatgactcatttgtgaacctgaagggtgacctttggcaggactatctgctgacctcaaaaatattaaagaaaggttctttcaccttgccattgtctccaaatgccaaaatagcccaattaaaaatccggacttggaaccacgggagcagatgcgagtcctaaagggcattaattattttcggtgtcagctggttgtgtaactgaggccaaatgagagtttggaaagctattaaggcacggtgtggtatatgcactgggcccaagattttaactcagggtaaggtgcttggtttcgtttacttaggctaaccttatggatttgtgcttgctgtcctagtaagaagtaagggctgtcactggtagaatgtagcccgccatctacactggggctctttcttccacagtcaaccaccagtttccaatatctatttatggactcatcattattagccatattgggaggtcaaagcgtaaacacatgttcaggggtagtttgtttctaggcctccctctccccctctctgagtctaaacactgcgagatgctgtgagttttgtttctccccaaatggggtgacagatgaagatatgtatccaagctatgctcccatatggctaatttctacatttgttttaacaacacacacggttttaggcaaattaacacagaaggaccttggtaactgtgctagttcagtcttggcttcctctgcatatgtttcagagagtcacactgatgccagggtccgcagtgagaggcataggggcaattgtgaccattaagtgtcactgacctaccgtggcaccaggtgttaggaaagacttggcatgctgtacttgactttcatgtcactttgttcttagtggacattaatggtcaaggcccaacttgtgacgatagtataaaatgttgatgttgaaggatggtgttctgtgagtgaccggctcttagcctctttagagcccaaagttaggaccgtggttcacattcctctctagttgaaaggaatggcttttctcaaaagaagtgtctgtgtccaggtgtgaaggaagaatattgtagaatgtacagggcgcagggcgcagggcgtcaggcagatggggttcctcactacattggttacttagatgttaatgtaagcttgaagatttgagtgaattcttctcggcctcagtgttttcatctatgacttaagaatagtattaacaagatcaaacaacattttacacacactcacaaagtattatgtgtgcaatatgttacgtattaatgtcacaagaagtattattttcagtatggggaatctagagaatattttaaaggacttcattttttgaaatttctgttctttgcttccacatggccccaaggtctccaagtatccccgaatgatctagctctcctcttcctgtctctgtctctattgtgattacaggcctgtttaaccatgccaggttcatggagtgtttgggattgaatccagagccttgtggacactaagtaaacactcaccaactgagctacgtccccagacctgagtccagtcttgggatcattcttcagttgggagttccttactctccatccacggtgcatctcccatgtggagacagcctagcactgcttgccatggctttgcagagactaaaggagaggccatggatacatgagaatgaacactgcttgctaaatgagtgaagcccacttgttcttgcttccatgaaacgcctaacctttattcccataaatgctgctcagaagcccatgaggaagagaaggcaccggtccatttcaagatttcccaagctagttaactcttgcccttgttttattctgggggttgggcgtgggcaagcattgtctttagaatgcagcacccctaaatatggatgacttgaaggtagtgggaagatgtgtgccctcttcgaggtttttgtgtttctctcctctttcctagcatattatttggtcacacctcatgttaaagttgaaactattgctcttcgtgtcagtctctcccagtgaatgtactggagttgctcccagtgatctcgcctctgagataacacactgcagggtttatccctctggctacttggaccacatgttacccaagtcactcgaatgttcctcccctcctccacaaagttgctattattccaaaatgctgtttaaaaaaattacccctaatttcattatgagatctttataaatgccagcagctaatgaaagcgggcttagttcttgcgctttgggaggtgaccacccatgtcagtcttggagtgtgtctgtacatctttgcaggcccaacaagtggtacacagatggagcctagatccagagcagaattgccaggaaagaaaattctcttctcttaccagatgagaatgttaatagccacttacaaagaattctaagccagctgttggctgagttgggtctatggacgaggaacatgtttgctgaaaggctagacgaagcttatcagaggcaggttgttttgtttggttggttatttcttaatgtaaaagctcactttcaacttgaatttcaagaaagcagtatgttctgggggcctagagaatcttcattattctccccaaccccagagcagtttattgtcatggtctttgagtcatggttggggagaaactggaccatgccaagggagcacaccacacttgtttttctgtgagaaaggttgaatggccacagaagaccaaaagtaggaacttctggtagttttaagactttttaattattattacagcagaatctcaaccaaaacattaggtgaattcaattggagaagccccgcctacctcacgttgaacttctctggccgtagaaggaaccagggctacatgcaccgttttcctcttctcttcatgtctgctccatggcctttcctgtcctgtattctatagagtgtttttagagcttatgcctttatttctttgcaaagtggaccagtggatcaggctgaagttttgggtcttgtgtaggacaaagaacatcccaccagatgatggcagacctagcttcagccgtaccacatggccttaggaacctccacgctttaggaatcccataaaggctatatccattttttcctggatatcctaatgtacatagactattcttgtgactcttactaattgaaaaccatctctaccataagatttattgcccctaaaattgaagaaatctatttgccacacttttcctaaatgcgtacatagaatgtgagctctgcaatgctgtcttagaaatcataagtttgttttttaaccaatacacaggaaattaatgtgcatacacccccaaaagtgaacttaaaaaatgctgtatctataacccttgggagagtgggctccatgctctgtggaagctctttctgatccagtgttcagtagggttggtgtacaggtaggtctctcttggtatcaccagagggatttgtggataaggataggttctagggaagaaggaaagcatcctctgggtgttttgcacatatggaaggagtagagaaaggaaataaaagctttcattgctgggaaggatgagagagcttgaggcttggagtatatatacaaaggatctaaatagctcaaagagagttcttaatattaattttgtggagacatagggccaccagctgcttaattttatttgggtctaataggcagcttaataaccaagaacatcattggtctcttgtttgtttcttttattgagtgtcaaagagctaacagcttttattacccatctcccagggctggagttggccagctaggacagtggcagtgcaggatgctcatgtagagagcaagggaagagcctaaccttgtgcttgttatgttttgaaagctgagttccaaagggacacatggtgggaggcagacgaggctaaaggatggcttgcggcacacatggcagaatgaatggcagtgtttatgacctgcttgcttcatgtgtgggggtggggacagtggctctgagtgtgtatgtgctgagctggcctggaaaatgcaggacaacctcacagtcatggtggtccagagcaagaaaataaaaatgtaattgaaacgtggggaaactatagcatcattaaacatggccagctctgaggagagacttaaaaaatggaaactagcccagagtacaaatccagtgtatggcttaggatccagggacagaaagatatgggttcaaatcgcactctgccactctgatgattctttggaccctggacacaatcttactaggtgttggttaatttttctatcagatagtataatacatacgtccaagatttcctcaggtagttaatggcttaaataactttgcatagtgtctgtacatggatttttaaaaattaaattataggttcttttatctttaccacctttattatgtgatgggattttgttttttgtttagttctattgagtttgataaactaagatgtattgattggcaggacagagaattgagattgctgaaaccgacagttccctgcagacgccatcgtgtacttctgtgaggtcacacaattaggatctatactggtcagcagaaaagacttcccacgcttgagatatatgtgatgggtacatttttggacacacaaattccaaggcttcaggagggagagctctttagacagggtatgtccatctttggcattaaggacttctgagggtgggtcagagaagggagaacaggacttgactataccctggtaagtttggagcctccttcacagcaagattgccagatgtcagatccatacaaagacaagatcccttcaagactgaattggtgcagccagaccctggctcctatactctacacataaatggtcctaatagactttcttacctgacagggaaccatgaaggcctcgagtatggattctatcctaacacactgagtctagctacagttagatttgtgatctgtatcttcaaaacaaacaaacaaacaaacaaacaagcaagcaagcaaacaaacaaaacctaagatgactttataaacagtttaaaacttattttttctacttagttgtcttcatggtaatgagcaacaagggaaaagaatagtggaattctcttgtaacatcaccctttgctcaacctccttaccttcctgaaggagaatataataccccgggatctgtctccttaaggccacaggattgccttacggtttgtgccctaactaagaattctgtgtgtgtgtgtgtgtgctcaaaggaatctttacacagtctacactgcttcatgtaagtgcccaattaatgccagttaaaagtttttattcctgttcaatctgaacgaagaaacaaagacgagaagaggatcaggccccactgctgtggccctgtcctcctcctgtgagaggttaccagagacttctcccacgtttgcacattgtctctccttacattcagcctctgactattgttcccttttgttccagcaacagctggaaatggtaaatttgtgtttggggccaatgttttccttcaccctggcatttccaaacatttattttcccgtgagccaaaaataccagtacagctgcatccagaaagagcctcgatgtgaggctgcccatcgccctcccaggctgtcccttcagaaagagccttgatgtgaggttgcccattgccctcccaggctgtcccttcaaatgaggcccccagagttcactttctgaagttcattagcttgtgttatcaataatttaggctactactcgggtgcagcctgagtgcctggcccgccccgttttcagtcagctttcccatagcctagcagtccagtgaacttgataagtgtcccatcatcctgttaatcaaattacttatgaactaaaattgacagttttcattaattataaaggattattctaattgcaattcaaatttattcatttagaacagacggcattcagtaatatttcaggaaatttgcatattaaatggagagggtcgtccattaagtatggtaatgtatgcatatttccttatttttaacttctaggccatatgcactattgctacttcagcaggtgaaaaaccagaacgtgcttaatttgttcaacaaactcaggggccagagcacatcctttggcgctggctactggcacctttctctctttcttccctctgtttttctcttccccacctcccacggccccacacacggcggaaactctggttgatctctcgaagaaactttttttgataaacctgggcattttcacacacacccccttcctttttcttaaatgtaggcacagctggtaagggttgattgaaatgttttgccatagaagctgtgttcattaatttcttcaagatgctgaagtaggcattaaggttgccggctggagtccttccctgtgacacatggaacagcgaggggcctaatagtcagccttgtaacatcaactggttacccccctcgtgcggcatgaacctttcccctccagtgaaaaatgaacctgtctgagacaaaagcacagaccacgcatgcgatgagacagtgccattattcacacccatacgggctgttttcagagatcattaaaaatcatacactccatgatattaataagcaccttccctgatccagatctccggtaacaggaaggtatatttagagccgcccccaccacctacctaatctgagatcatgattctgagaggggagaaaaaaaaatcttctgagaggaaaggctaacaagccagtgtgactgagccactggttagttaaagccccgatccatccggcccagagtcatcaatgtgagccctttcagggaaagaagggggtgcagaccttagtcacctcaagttgtttctgctgagttttgtggccagtccttagaaattactgatacagggtcttaatgatctgaagaacgcatctgccagcccattcatctctccaaactcatgttgcataacggcttgctcgtttccccccagtttcatgtagacttgggttttcgtttgctgcagttccaactcaaaagctttgttgtcttccatacagatatttgatttgcggagtgtgtttacttcagtctgtttgtacaacactctcgctctcgtggccatatgttattgattgaaaagccactgtgactcaagattctgaataggcactgtgtccttggttaggcatcccagaggtagacagagggctcacttgctaccttgccaaacctggactgggggcccttcctgctgctccatcctacgtaaatcaggagtgtccagaacccgctttaacagttccgttgtttacccagcctctccccaaactgcaacaggagcacacagtaccttgttggggcacagccatttctgctaagattgaatgggaacaaagctgagtggacagaccaccaaaggctattttagaaaacactgatggaaaattctcagaactcattcaagcccactggtgtgtattaagtcaagggaaatttcccccctgtgcaccatctttccctccacttagttcagccttagaaccatgaaagtctcggtcttaatcctatttctgatgagagttaattttcaatgcgagttttaaaaaatttaattgtcactgattactctgacatgcaatagtaaaataatataaaagaacagcacagatgattaaagtaaaacttaacaacgtatgcactaaaaaaaaaaatcccataactccactttcgttatggggaatattaagttgcctaatatgacccagtggtacaggataattgcttaaggagctgtattgtacagatattctgaatattacaacctcatgtgcagcatttctgctgatgaattcctcagcagagggaggctcccaaagaatggatggtgcttatgttggaatgtggaccaaaagacatggcagaagacacaagagtgggcactgagagctggcaagatggctcagtggataaagggacttgctgcaaagctcaaggactgtagttcgatctctggaactcatagagtataaggagattcccacaagttgtctcctgactttcacatgcacatggtggcatgaacacacatgtagacagaaacacacacacacacacacacacacacacacacacactaaacaaacgaatgaatgaagtgaaaggtatcctttagatatcttgaggacagtgtctcatgacatgtcccctccatgaataagtactaggtcctctaccacatgccacatgggttgttttgggaagggcgggaatctgagtgaggcatagggacacaagataaagacaggcaaggaactcagccacctgtgacttattttacatacctcagagatgaagctcattcgcaactgctttgcccttcttcgtgggattttgtttatcagcatcatcctagagtagctaacatacatgtttccaggctcttccacaaaagattctgactagaaggtctgggctgaagttcaaattctcaggtggtttggtgcaccatgctggaagggactgttaagctgtatgacaagtgtcctaccagatccagtctccgagggagagaagattggcaaggaaaggaattgggaagcagttcacagtaaacttctacttctcatgaaattttaaactgataaagctttgtgttctaggaatcatgagcacccactacactgtggactctgaaccctagtcagcttagtctctaggtctactgacggtaacagtgattgccaacagagatacccttagcatgtttgatgccttgggctcaatccctacctgtacaacaacaacaacaacaacaacatcaacaacaacaacaacaaacagaagggggggggaagacaatgacagaaattggctgtttcagaagaaataggatttctatgtctgggcattggttccatgagggagaggaagacacacttccccattgatgagactggttagatgaagcctgagtcaatggctggtactttcccaaatatccagattatcctgtgagctcctctcatcattgcgtagacattggaggtgaacctgcttctactttcccacttgtgagatggaccctgggccatgaacgtttactgggtttctccctgtggaaccatgtggaaagaactaaactgaggagccattatttctgcagtcacttcctgccatattggagtaacattgagagggatggccatatgtcccgatgagatgttagtttcattcaatgggcatatcacagtggccatgtagtagtactagggcaactgatgttggggtactctgtgacctcaggagggtgagtcttgaaataaaagatgtgctcctctgttccagacacatcatcttgcggttggagtgaggctttttaagggacagaatcatgaccttctgtcccggggaacaacaccttgcatccacacattgaggcgattgtgaagtgtcacttagttttaaggacatgggggagggatacgagctcccccccccttacttctcttctctgataattatagacaattaaaaagaaagtttctagtcccatcagacacgtcttataaaccttctctttttagccagtggatggctacattgttttgaggcacattaaatggttacatctcccacccctgggagctgacagcctttgttagttataccaagctaggcacaaaacacacaaagacaaaggagcaagcattgaatattctgagtaaggaaggcgcaagcactttgcatggagttcaggttacactttgtttcggtggtcagtggcttcaggacaaagtgtgtggaggttccctgtgtagctggggctcttccggatggctttgtaggagtaacagcagctttaggctgtactctgtaccactgatgattcaacggagccaacggtacatgggcgaagcatagtttctcccctactggcggtcaaatgcgtgttgccaaatgctacttttaaataaaggggacttgttttccttttgagaacgtatcttggtctgcaggcactaggtggaagcctgtggatgacttgaaggcatggggatttctgtttggggggtcacaaactaggcttcacaattacccttggaatttctaccacaggctttaggtaattcttgttttgggacattctagtgcttctcaactgccctgtgtctctagactgggtctcaatttccaagtctttgagaactcaaaaaggccatttgttttgaggaatacttaaagaatgggggtgtggggtagggatcaggttctgagattccttttagaacaaacattaatgaaatttttattgaatagggttgggtggctcagtgggtagaaatgcttgctgcacaaccatgaagatctgagttcaaatcccaggcactcacaggaaaaaaaaatggttgtgtcaagcccactcccataacgccaacgctgtgaggggcaggaacaggagactgctggcttgttggatgacattctacctccagattccatgagagacttggtatcaagtgaattaggtggagagccatagaagagacacctggtttcttctggtctccctgctgatgaactggtgcaagcagccccacccctgctagacttacttgtatacactaatgttcatgcttgcatgcacacacacacaacacacctttttcttaactgaataaagcaagtgacgtctaaataaatacatgatttaaaagtcatctttgctatagagacagggcatcgtttctgaggtatagaatgcctttcattgaagccatggaagctcagagcttcttttgaagggcacattagattttaaaagtgccccaccctccacagcacatccttctgctggctcatctccacgaattcctaagtactactaggaaaatcactcctacccctttctaatagaaatcttccccagagatcatgcttttgtgagaggcggagcaacacttgatgggcatttttaaccctctgcagtcctcaccactatgaggccttgctttgcgaggctggcttgtttctgagaggagtagtgaatattggtgtccagtttacatattaggaaaccgaggacctgggtggggtttggatggaggcggaagagggtagggatgaagtcagtaatgaaatgtcagacttgcttcagagctcctctaagatgccgctgcctctgcttaagacacatagctgcacatatgtgcacataagtgcacacagctgggaaaaccggagagggtgtctgattatactgcaagcctgacactagttcttctaatatggctcctgtctgtgacctaatctgtaattttaaaagctttcactgtggggcggtcgaggtggctcagaaggtaaaggtacgtgctgtggaggctagcgagctgagtttgttccccgacatccacgtggtggaaggagggaactgatacctacaagcaacgtgtcctctgacttacacatgtatattgtagcacgtacatgtgtgcacatacacacgtatacacataaacgcatacacagaatataaaacaagtgattgtaaaaaaaaacaccacttaaacagtcaaaaacaaaagaattcttattgctgccagggctacttgttctaaagagcaccatgtcagaagaaagctgggttccatctcacccaagcatgctcagtttgtagcctggagcgagagttttgattacctttcatttggcatacataacttccagtggtcctaatagttacacagttatctgaccagcttcactattcagaccaggttcttggactctagttaggtgggctattgtttttatttgtaagaccatggtgtttgacatttgtttatcttttctaaaactaaaacttctatcaaagtgtgcacacacacacacacacacacacacattcacacattcacacacacacacacacacacacaccaccaccaccaccaccaccaccaccaccaccactaccattactaccactctgagtgtgagtccaggctccatggagaaagagttcacatttccctgcagcttgtagtgcttgtgcacatttcacgttttggctgttttctgagattcattttccctagtgtcacgatattaatgcttttccctgctggcttcctagcctaggggggtcgcagatcgtgtttcacaacaggagacgcctaaccataagtctcctttaagtaatacagatggcaggaggggcgctgtagagagagccagtcagtctgaacaaactggcattgatgctccacaaagcacagcctgacaaatgagtggagacgccttgatttagggagggaggctgcctgctgcgcggttccgaagagccaaccagttctgatgctcagtgtgtactggctgccaatcagagaggcttccagagagcaatcgtacacctcctctcagctctggctcagctcagctccctctagagcacccattgacatagccggtgtccggggtcccattgctttgcgtgcctctaaatctgcatttctcatggcttcttagccatactcaaagtgaagcagagaggctaaggtagtgatgttgtgcttgtggttggaaggcatcaggcttttttggaggaagtccttcccaagtctggaatccagagtcgttaatgtgaaaggacttttgcaaagctaggcaaaaggtgggcttctcgataggctggagcctggccttcctgggcacttgacaaaacacagagggaaagagatgagggtttgtcagaatatatatatatattatatatatacacacacacatatatatagaaaatattacaccatcatattgaaactgaggagccaacatatcttgttggggtatcttttgtgaatgaagacaacctaagtactaagcttaagtgtagacaaagtagtcaaagatattttgttaatatacacaggcatttcatgtgtttatgtgtgcatgtattgatgtgtatatacatgtatatatgtgcacctgtgtatatctgtgtgtatataaatatgtgtatgtgtgtataagtatttgtatgtgtgtttatgtgtgtatatatgtatatgtgtatcagtgtgtgtttatgtgtacatatgtatatatatatgtatgtgaattggtgtgtgtgtgtgtgtgcgcgcgcgcgcgtgaacgtgagcatgcatataccaccatttcagtagtctgggaaataatcaaagccgacgaatcttagaagtaagggtgggtcagtgggggagactcagctttccacagccaggattctacaggaagtctgccttgcacatcagtcgacaaactctagctccataatttttatctgaccaaaatgttggtctagtgcttgggagaagactaatatctcatgttgttaactttttgtaccccctttggccctccgttggttagaactttgaagagtgggcatggcagctcatttctctgctacatcactcagggtactggtactaggattagcttctaccgaagtgctttctagaatccactgcatgtaaatgcatggagagcaaaagacagacagccaactccaggacccaatacactggcctcagtcagttacacctttcagcatttgtactgttggcattcgtagaaacactattcttacacagtggttctcacgtcctaatgctgtgaccctttaatacagttcctcatgtggtggtgacctccaaccataacattatgtttgttgctactttatagctataatttgcttcggttatgagttataatgtaaatatctgatatttccaatggtcttaggtgactccttgtgaaaaggtcatttgaccccaaaagggtcacgactcacaggttgagagctgctactgtaaaagaatatatctttgattctttaagaagtcacacacacacacacacacacacacacacacacacacacacactacacatcctacaacagccctagctgttacaccagccatcttactcattctctctgtctgggtctatatttcacagactgctgggtgaaggtgggaaattggtcatgtcactattttccccccacgatcttgtgtctagcaccttatttttagggtgaccaagtatatcagtttccttagcatctccttggtttagaagtaagggttctaactcaagaggtcccctagtcctgggtgagctcaggacacgggcagtcattgatctttccttaataaatgacactcttagcagttctatcacagtactttaggaatctctcaagatagacctcggcctagtgttgaaagtactgtgaaaactttacagaaatagagagacacagtacctgacctcacaaccttctgtagagaccagggcaatgagctatgatgttaactttaaacagaagccaggtccactttgctgccacacattgtagaccctccttgggctaagagtgtcatttaagagtgtaaaccggagtttatactgcagagagtgtttctatctggttactggtactccggttctgcgagcctctgctacccacgcaggaaggaaccagtgtgtctcaatgcatcctttcccctcttccttccccaaggtgcagtaaatgctgagggacttgtgtagatgagagcctctttcattcaacagactttgcaggttttcttgtatgcttttgtttgtggcaactagttgtttggaaagggtttttgtttgttttgttttgttttgttttctgtacatgggtgctttccaagaggtaccacccagttctcccagagtgtgtctgagttctttttgtgttgttggcatgggaggcaggcagtgttgcttgtaagcaaggctctctcacaggctggggagtgtcagtgtgtacattaggcaacacccaacaggcaaagaagaaatctctggggttgggaaagcctatgcttcttgctggttctaccttcagttctttcttcccatggttttcttccttgtgcacagtggtgaagctgtgtcccctgaatactggtgacaagctcactatgcagctaacctcaaagagatggaaaacacaccagagtcaaatgaaaagtaaatcaggatatgtatatgtaatatatatgtaatgtatatgtgtatatgtatgtgtatgtatatgtatatatctcctgttagtgaacacatgcattttgtagaaataatttcataaaaaaggactggtttatttttctccatctcccatatcaccctttcttcacactacccactaactagggaagttaaccagtttccttcttgctttctcaggttttttttgggggggggcgagcaagaacagagcagagtatctctgctactccatcaggcttctggtactccagcactatgtgccccagcctctgtgatgcatatttcaataatgagcaagaaaaattgttttatggtagtttaataaaagcaggagacaaatgttgcgcccgtgaaaaggaactaaattacacacttcatgagccaaattagtaccacagcacttggctttgttcaaaaggtgataagcatttccaggcccatttttcagcaagataaatatggcacaggccaagatttccctgaagtaaatattgtaaataataagagccactgccaagggaagctgagaaatgacataatccttaccgagttatatagcatttctgaaagcaccagggttcaaactccaaagcacactgcccctttaataaactcatcttacgattaagagagaacaaagctctttaatttcccagtagtactctatatctctcaattccagcttaaaactatctatctatatctgtatctgtatctgtatctgtatctgtatctgtatctgtatctgtatctgtacctgtacctgtacctgtacctgtacctgtacctgtacctgtacctacctgtacctgtacctgtacctgtacctgtacctgtacctgtacctgtacctgtacctgtacctgtatctgtatctgtatctgtatctgtatctgtatctgtatctgtatctgtatctgtatctgtatctgtatctgtatctgtatctgtatctgtatcatctgtatcaattccagcttaaagctatctatctgtatctgtatctgtatctgtatctgtatctgtatctgtatctgtatctgtatctgtatctgtatctatctatttatctatttgtctatctatctgtctatctgtctatctgtctatctatctatctatctatctatctatctccacatataagctagaacattttatgtcataaataaattcaattactgagaaggagaatatattttgagggcagttgagagttacatagtagcaacagttgtggggataagtgcaaatggggatcttttcacagaaagtaaaagctgtctctctaagattgtctctgtcacccttgttctcacacagtttattccagtttggttccagttaaagctttctggtcacaaaatgagctaaatactatttctcccgtcggtgcagacttgctggtgcaacctcatgtggtgagaagcaggcagtaaaatactgtggttgggatgagaactggcagggccagcaggggcctttttcaatatcgttcagctggttccagaagctttcccaaccgagtccctgtctctgctaacaaccactgacatagtattggagaatggggtctgagggaagccataagagcagtgaattgaggtgacctgccagggtgtgccctgtataaaggggaagtggccatagagtttcagccaatagttgccacactggaatgtggacctcataacgctagacatctcatttccaagaagtttatgaaatttttttggtaaaatcccaagtttaaaatgctggccgtaaacacccccccccctactgcctccgtgccccccccccccggagctcaattatccagttcccaaataaaacaaaggccataggctccagaagtttgtgtttgaagtggagaaaacaaacaaatctgctatagtttgacattcagtcctgtggcagaaagggcaggtaactagctcatgatcgcaaggccctactgtgtatgtggctagctctgctctatcctaaggctctgagcaattttcttctttctcaaacagttgctatgagcaagggactcttccctcctcactttacacacatggaaactgaggttactattccaaaaggtaaaggtgggatcagaagccagattcttagttctctcgactcaggggctcatcctccacgcccccaaccagacacatcttgatttgatgggatgacacatcggaggcaggaagtacaggcaagtcactgtcagagagacgagttttggtgacgtacccatcccatttctgggaagagcttcctctctccctctcagcaaacggtcacaatactttgtaatctatctagttctcgggtcacgggagggattatttccaggcatgtgcggaagaacatagcgaaaatctgaagtgctctgtcaacacatggaaggaatatcactcataattagtcagagcacactgcgaggtgagtctctgaagccgctgcttgtctccgaatcaaatacaattaaataacaatcccttcttgactcttcaactcaatcaagtgtctatttgtagaagtggcttcaaactgaactcactttggaaattaatcagccaccactaatggctggaaagtcagaagaccgcatttattttaagaggaaaaagagcaagtggtagaaagagatccatctccaggacaaaagttaacagcccaaaccctgcctgctgtctgccaagcctgtgactgcagggcagcctgtgagagcgccctgatgccagaccccctaatcaagggactccccttctgagaagccagaaagaaggcccagagtgggctgagggcatagaactgttcattgaagacagtgagggagagaaagcccttctgccccagccactgtggccactgggggaggaagagggaaacacagaagtcttgaaggaagatgccaagggcttagagtgtcagggaaactgttcattcacagaggcagtgagtaatcttcttattcataaatgagtgagctgactcaaggagtggagcctgaggaatccaatgtgactggctccttctcacccacagacagagccttgcagagcggttctccttcttgcagtctccacctaaggccgatgatggttcgtcctcccagcctccacacactgataaccccacgtattttaatggacatggtctccccttgctttaggatgatcactcccatgtaccctgaatgccctttggaagggttggtcatgtagcttagtgttacaggacctgccaaagtgtgcaaggctctgggtttgatccctaggacttagaaaaacaaaaacaagagtacagaaaaataagtgtaagtctccaggctggggaggtagtttagtcaggaaattgctctgtgaacattcaggtgggcctgaatggagtccccagaacctacataataaagccgggtgtggtaaaacacacttagaatcccatcacggaggaagcagagacaggcagatatctatggcttacgggttagccattctagcctccttggcaagctccaggccagtggagaccttgtctcaaaaagcagagtaggagctacagaggttgctctatgattaagagtacctgctgctcttccacaggaaacctctctctctctctctctctctctctctctctctctctctctctctctctctctctctcatttttgggatagataaccctacctagaagcctgccgcctattctctgtacctaactgggtattcttgagacaaactaaaatctacacactctgtgtctttaaaatgagtggcctcaccctattgatttagttgcactattgaagtgggttagagttcggacagagaatcacactcgtattgcttactctgtgatttatatgtaattatttaggaatgaagtttccaatgtcttgtgatctgtcttctggttctgtgactaaggccttcttgttagcttcctaagaatttcctgtccttttctacagcaataaaagattgcatagaaaagcactccttcctcccagtagatgggcggcagtttgcacttgagccagcagacacacatatatttacccatttattgttgactacccactgagcggcagctggggatgtagccacgagcaagacagccaatattcctgttctcatgggcttctgtcctagtggagcaggcaggcggttagcaagtgaaataaataatcaagctcatttttcaggcagtgcaaagttttagtggtgctaaccgaataacaggacagttatggaaaacaaatggccattgccctacagctgagcctgtgggaaggaatgtgtgggttcaagtccgcagtgacacgcatggatgcaaaagacctgtactgttacactatcagtctagaaaaatcccaagccacaggaggaaagttaatataaaggctgaactaagctttggtgaattcagataccttgacttggggacctggaaatagcagtgtttttcatggggacagtgaggtcctctttaaaagagaaggcaagacagaatctaaagatacgctactggatttttagaggtactgtggaatgtctcaaagattctcaaatgcaggaattctggggttctaggctgtcctcttgacagatgacatgtctctgagccattgggattgactgagtcacatcctagctctactgatgactgtgtgtagcctctgccttttaatgttactgtgtaaagactgggaagacctgttagatctgggatgtggattaaattaactgaagtttatgatggatgttcttggtgtcataactagttcctattaagcgacagttgctattgtgctcaatgctttcatggctgctgttatcatcatcaagactgagagacttgctttagggatattgcctgttgagactttctctagggagtacaagtcaatataccagttgagaaacaggtgatgactacctggtagaaaaataaccaaggcctgcatacatgctacttatctccagactctgggcccaggaattcacacaaaaaagaacaatatgggcagcttttctcaatgccccatggcagttcgtattatcttctctcttttaaactgcatttagtattgatcaaaatttgatctccctaggaaagaaaaatgtattggagggtgataaagggacaaatagcaatatgatttgtttagaacccccagctcccagcatcttccagatcacctcaatcacccagaggttgggagatgctctcagatatacctcttgaatcaaggcctaaatataaaatactgccccagaggggaagaccaaagatccctttagataagaacctgccagttcttttggtctgagatgtctttgtgtgaacattttcctgcagaggtgggtagagtcttgcaaactgaagtgtaagaaacatctggaggcagcccaggatgggaactgagggcctgaccggctgccagagggccagatgctaatgctggaaacctcttgcctcccagcttgtcatctgagtccgatgatgccatccaaaaggaccacggagtgggagggcaacgagcgattcatctcctcccacccaaagctttaattgtgagacatagaaggaggaggaggagggggcccaaggtttgatccccccaaccacagtttcctcatggaaacaggctttctgaaaacacatgcttctggccacccaaagcctagatggaatggtcccatcccacctcccttccttttcccatggtctaaagagaatgaatagagaaggcttggctctgttcagagattttcctctggacctggggatgtactgagcatttttcaccaactgtatctgtctttaccttataggatttcctggattgcaagtgctcttcctattaacagctttggagtctgctttgggccaaagcagatcattgcgattcaggggagctgctctccttttttccactgcagaagcaatcaagagcctgtgcatacggtgctcctaaaaggaaaatgatgaaaaccacacacacacacacacacacacacacacacacacacacacacacacacacacagacacacacacacacacacacacacaggacaacgaaattccagtcaagatgactgcttcatgcaatgcccaccgttcaggaatgcttttctgctttataattactcctgacagatgaacctacacgaatggcatagaaaacaaataactgtcacgtagtcttatgctgacccctttggcacccagggtagtctcagccatcgcctgttttcagtgtgaataccgtgtagtgtttttattctcatgtatgtgttttaactgacaaataattgcagcattttataggcatttgcaaggcagaaactttcattttaaggtagcacctgttggaatagtttaacgtgtaatttccagtctcacataaccattcagttgtattattatatcgctcaagaattgggggaagattgtctgtagtcaacaatactgtggaaattatgctgcagaagtctaaaaccttgggctacaatagttctgccttcattaggaggatgactagggtgtcttgggctgaaacctcgttatcgctgctctttgcaggcggatggtggtgtgactttggggaggggcttcttgaaacttcatatccaatttgcttcctgctgtgctgatgggatagccacctcaggcagcattttttgtcgctctgtgacataggttttccatagagtttcaatgctagtctgtgctgcctctgctgtagagaaactgggtgcctgagagatgggggggaaagataatgcagagcctaaggtaggggtgatggtgcatttattgatgtgacactactggcctgatgtctgagattttgaaaggtagtggaagtcagggaggaatgaaaatgggttatgaattttatagcttcgagttgttcttttatatactttacagactaacaaatatccccagttagaaaaatcaccaacgttgggtattttggaagaaaacaaatgaggcagcatagaagaacaaaaagacacatcttattctaaagatgggccaaaggctttgaggcttagttaaacttgctcctgattcttcttggtagtttatcccaggtctcaggatcttgggcacatttgagaaaactttattaggggcaagaactcttggtgcaatatcaggaatcttcagcctgattttacacgtttagtaataatagtggtcagtacaaatactggccagaggacagcatctacagagacgtgcagacaaattagattatggacccttcagatccaagatggcgtactctgatttaaaagcagctaatgtgaactcttcaacaatggtgtcatttttggtttattttaaaaagtggttgagagatcaagggtaaacttaaaagttatggtccttaaatagcaagagatgaacgtcctaggggactggacctaagcaaaatgttctgcttaacacagttttacagtcaacaagaacctttcaagtatatttgcaccctgggcatctcaccatgaaccttctgtgaattattatcatttcttcttcacaccaacaaagcagaaggcactatgggtgcctcacagcatgagtgttgcctactcttcagtggtagacagtatttccctttcccaagctagtcagcttgtaagaagaaagtgaaagtgccttggtcaagtgaccatgaggatactggtagaatgtgatgtcaaagctacgttccatgaccctcctatgggctctgcttggcactggaaggtgacctcgttgaaatcttattctatacagacagctctgtgtgcttggctagtccatctcttactttcacatgtacattagttattctttctcccttgataagaaaatgatttttgttttcctacagtaacattgaatactaatggattcttcataaatataacctggctactcaaaacagctccttttgggtgtatatatgtgaatgtgtgtatgttcatgtgtgtataagtgtgagtgcaggtgctcatgtatggcagaggtcagaggtcaacctcagattacatttctcaggcacaactatcatttcttggtggcaggatctttgattggcctggactcggctgagtaggatgggcttgtgccaggagtgacccttcctctctagcgctgggatcacaagcctggctctttgtgtgagtgctggaaattgaatatagggctagttgcttacacaccaagtacttcctaactgaggcatctcttcaacctcttcaaataactcttgagttaatgtgtcttggtccttaatcaaggacctgaatgtgaccctcatttcttccatgttgtataccctctacatctctgtaataatatgtggatcacgtggacaatctgtgctttttgcaactgaaggtttattaaaaaaaacacattaaagtcatggagtccagaggcaaggttaatggagtaatggaggaggatggcaagatgacagaaaataaaggagccacccaggagcaccaaccccccatgtgtaaatgggcacagcacacatgcataacatcagggaagcaggcaccgggaaatcccacagttggcatcccagcctctgtcacttagctgtgtggtcttgagcaaattacttaagcttcttcctcaggaaactgtgggcagtcccagcccccgaaaacaagacaaaaatgagagaattatatataaaaaataattcagcccacacatggtacattcctagtcttcaaaaatggcagctgttatatttttgttgagtaaactatttgttgagtgttcactgaggatggtatgtaaaaaccaagtcaaggcaagaaaaagaacttctgcttcctgagtctgaagggaaataagctatggcctttgttattagagtcatgccctcaataggagagaattcatggacagtactgtgatctggggtccacattggtgacaccaatgccttgcaagctcttttttttttaccttaagagattaggcacattcgattttagttgaaagtgattagaaacgtatctgctgtgaagggttaatggtctgtattctttcattgtctaaggactctttccttttcctgtctgcctttgctcttcttttctctctctctacatcattgtgcagaagagattgaaatgcctaatttatttttccaccttttataaactcctcatcctctctggctccataccacgaagaacacatttcaggagaagtgattgtgtgtgtcagtagttcctaaagtctgagttggctgatgcgaggcctatatttttaggacttggaagctgccctcaacagctggctagggagccttggctttggatatgtccgcagcaaagaacagtttccatatctatctcaagggatcacaggtggggcttctgcccacttgtcctcagaatctcagttggctgggtaactccctccatgacaacggcttaacttctcacctcaggaagaaactggcttagggaatgcctctgagaaggagacatgctcttctttagtcactgacctgagcagttgacatgcattctttaacatctgggtttccttctgaaggttatgtatgatgcttggatattgagcaaagcaatacatttacaaccctaagggaacatagtaacactctgtaaatagtagttaatactagctaataccgatgttatcaagttccacttttagggttttgtatttaaagtacaatcagaatattttgcccagcgactgctcaatgaatcatgagaggactcaacaacatctcacctagttttctatattttcagttggctaaagggagatttggcattttttgagatctttgttcattttaatgttaaatttatatgttttactgctgagatattaggaaatgtaatgtgtgtcaaatatgtaaaaaattatctttctgaactttaaggagttccaatttctgaaatacaactaactgtgatgggcctaagtgaaggaactgtgatgtagagatgggaagagatgtgtgtcttcatgctctgcccctctgattgtcggaaaggttcattgaaatgtggagggcagttatgagctccctttggcatacatgggaatggtagagcaggggagttagatgaccttcccatgtgacaataagtggccgagttcccatgttctctttacccctttccctgctgtttatgagttgttgaaatagcaactaatccttctgtaagcccatgggagaggtgaccattgaagtgggatggagataatggcttggtgtcctgatgctacaaatagccagagaaaaggaggagtcgtgagctccccttacctggggacctgggagtcatggcgattagtctgcctcttgctataacttaacccaggttacctaatttcaaggcgttgcatgagaccaaaagaaaaggaaatgttggcagggcaaagatgttaaattaatattaggtactgcgagaactttctcttttatttctctgtccttatatgtttgtgaacacagtggatatcaaacactaacagagaagcaaaacattaactgcctttcctctaattcagacttgaaaaaagtagaaaccagatttgatcctgattgcctattctcccaccttctggtcttccactgggaatgtgcccacggcttcattgtaccagaagcactgagtaggctctgccaccctggccagagaggcactcagcagtggcaatttaaatggaatgataattgttttgttttgtttttttttaaattttgctgacaatttttcctttagccattctaggatgtatattttggccaaaattgcttaaaatatatttaaaatcaagtttccctctttcttaaaaagaataacacaatcttccatcatttaaaatgctctaacagagttctttgaagaataacaaatctctggaaatttctcagataatattgccctacacctggaacacagacccatttggaagcggtaatttggtccccgaagggcccttcagcctctgccctgactgctggccctgttcaactgtccaggaataaagcccaagataaatgggcctggatttatgcagagtcgtttagagcctccaccgaccgtcatctttctggtggagcatgcacttgcagaagcattttaagtttgaagcatcctttccccaactgattttgtgatttctggtgttcccccccccttcagatcctctattggaaggctgatgaaccttggcctcggccaaggattaagtgagcaggttcttcatgtaataaatctaaagacatattaaaagcaaggcacagggatttcccatgtgttttagggggatttataagtgccaaaggctaaacaacttacaagagaagtgagattgcccccttttccaacctggccgtgttctaatattgtgacatctcttagaattaagctggcttactaagtagaaacatgtaatgtaattgaaaatgcacagcacagagaggagttctcaataccgtgatgtcctgttgtgaagattacactgatttacaaggaatggcttctctcctaatctcagccaagcaagacctagagtgagacttttataaccagggagggagaaggaaaaggcttactaatatatatcccccaaattgaatataaatttggtcttggtggttgaataagccactcatttctcataaacaatgtaacaatgaaaacatttttagtttattttgacaggtggatttccaaagcagccaggcattctccatgtcagaaatgatggggtggggctggggcggggggggggggggaggggggaagctggattgtggaggaggaatgaaaatgactgtgagataggccgggtaaacatctcaggatggaaagtggcttctgaaggctcagccaggccgggggagcacgcgttaggccggtgggaatgaagccacaggaagcggcttctgtgcgaggcagaggggcctgggttgaatgcggaggtcggaaaatcaccaaggcttggcgttagaggaggttaaggagtaaaaagagaaactgagtttcttccttcctctcttccgcctccctcctttccttcttccattgtgtttaaaagacaaaacaaaacgaaacaaaaccaattacgtgtgtgtgtgtgtgtgtgtgtacatacacacgtgcatttcatggtgcatattgtggaggtcagagaacaacttgcaggagtgggttctcgggatccaactccaggcttggtgggcggtgcctttgccttctgagcgaccttgacagctttcacggtgttatcttcatacttgccttttgacttccttcctccaccccccacttccagcatctcatcaggaaaaatcatatctgataagaaatgtgcattttgagagtttgtttatacattacataagcagaccccccaaacctagctactctttcctaagtggcgtgttgatttctccactctaagttttcccatcttacatgtaaaatggtacaataacgcgcacattgatgctgcattccatcagatgcaggtgaaagagctgaattctgggatctcaagcctgtagatgtgtatctgagaacccacaggttccacatggaggtgaagatggagggtgatgagtcccggtttgttatccagccctagtaactggtgatggagtcgatgaaagctctgctgaatgcagacatgaaatgcagctcttggacgaaccctagccagttggcagacacaaacaaattaataaattaattatagttaaaaaaagagccagttttgatctctgcttcctttgcttttccttgagatcagaagaatgaaaaatgaaatccctagtctatggcaattggaaaggagagctgaatattcatcccactgccaaggagaattggctgagccaagtggtggctaattaacatgtgtgcacacactgtatgcacacatatatcaacacacaccacagatgcatatgtagcataaacagatgtacatgcatatgcacaaacacacacacacacacaccacacaaacatacatacacacacacacacacacaaacatacacacacacaaagagagagacagatatctatctatctatctatctatctatctatctatctatctatatatatatatatatatatatctagagagatgagttctgggcctgtgatagccctgactggtagggcttgagttcactttcaatctgaaagaagtaatggggagctgttagggagagctactttcagggaattgaagatgagggggaacatgtgtgtcccatgccaatacaaaaggataggggcttttctaccatagggcaatgggcttctatccagcctgttcctcctggaagtgaatgctcagaagcctccacacctgggtttcgaaccttagatgccagcaaaatacagatgtgatattttcaaaccaataacatacagtgatgcacataggagagagacacggaattgacaagaatgtaataccccacatgagaacatgatggtattcaaatagagaccaaagaaatagcactcaatagcaagtacacataaaagggaagctctggtgtcccctggttttagaatacgtgcgggtgctttagtgtcagagaaactaaggcagccatctggatcatggacggacttcctgaataataggaagtctgtctcgtgtgtccaagagttaaggtgttttgttttctactgctcttggcaggggcacgagaacaagaatgggactttgaaggaccaaaataagagagatgctagctgaggacacagtgcaagagtgtttatattgagctgggaagttgtggcatgaagacttggctaaaggcgggtaaaatggctaccctcggagcttattaagctttattttaaaatgttaagcagaaaacctacaccccaaggagggacccatctccagctaacggggagaagagaggctctcggatgcaggctgtacaactcttatgcatttgacaccggacttaacagcagcagaaggagaagggatggaaaaccaagggcccagacaaaatgaaaagtataagtagatgtactgaataaatggaggacattacggtaatgcagagctcagatctcagctccatttgtaacagtgaaggagagatgatggaggagcatgagataaagttacagcagtttggatagcaaaagaaagatagagtggaaaatgaacagccctgtaaagaggttgcacagtctggctctgtgagagtggagagtggctgtgtgttaactgccagggaaagggatttttttttaaatgagttagggaatgtagatcatctttgactttccttgtaagaaatcatagttattgaatgaagatatcgtggcagaatttcataagtgagatatttcaaaatattttaaggcttgggaccgtggctcggtgcacagcacttgcctagagtgtgtgagactttggtttgtatccttaatcaattaataaacatttagatgggaaaaaaacaatcttgcttgcttctttgtgaatgccctttgacacctttggctttgcacatatacctttgcttaattcactgtagggtttagggagagaggacaggattataaacagtgatgggaggggaccagagaggtgggaatggggactctggggttcctgattttgctcattctatctttttacaagtttctctaaagtgctctgagtcttattggcaaaatggaggatccggaaaaacagttgctaaggtctttcttctgagaattctcagtcacacagcttcacgaatgaccgaaaagccaaggctgaagtcctcctctctctcggttcagcatcccaattcccttagaaccttttcttctgaagcttcctgttcatgtctgatacctagtgacatccgtatttctttcttttttcttaatgtctcagtgtacaaagttaggtgctagagaaacttgtaggacttgtgaagattggtttttaaaatgttagcctccgtgagacatggcgatacagctcctcagtgaagaccctgttttccttttataaaggaactagttttcatttccagcgagcaccctgagtggatcaccactgcttgtaactgcaactccacctgatctgatcttctggccctcacatatccaaagctacatacagacacattgaaaaagaacgcaaatagatcttagggagaaaaaatctaaccccaagcaagacaatgtgtgaatatcttcatgaaaggcccagttaaaatccattcttagaagaattttagaggatcctcctttttttcccccctaggcacactcctgttgaatgcttctggtctccagaagtatcaagtgttgcagttgacatttcagaatgctggtggtgtttgaggttatgggaagcaggattagtttgggtgacaggaggaatagggtttctcagtggggtacatatttgaaaagaccctagtgctgtcagaggaaatgtggtgacaagaaacgtgggtgagatggagaggaaggagctgagaagtatctagtgtacctgagcagagacagaggggcaagctcttgccatgttagttggaaggatgctacatttatcacaagcaataagaggaaactctagtagagagggaggagcagagccacggttggagatgggagtgggtcctcctgtggtagtggaggcctgaggaggacttcgttacaggaggggtgaaggaggattggcaggagcccacaagaggaacgtcgtatagagacatatttcagatcctcttgggtatttatattccaactgcagacttttctattgaaaatatatcagaaacagctctccagtctttaatataatttgccaattttactagggcccggtggaagtatatgttttacattgaagaggtatagttttaggaaatattttcttgccaactcgctgaacaaatatcagcctatcgagtgtgaatgcttgctacagctctgtagatttattactgagatgactatacgtcgggctcacattctggcctcttaggaatgcaccagactttctctgagaacaatctggcccagttacattttattacccatcatacacactggccatggtcaatactatgatatatttttttaaattttagcttacatatcgaatctacattctacgcacacacacacacacacacacacagagagagagagagagagagaaagagagagagagaaaataagtgcattttaagagcctccttaatttcctcaccagctgcgaataatggaaaaagaacttagccacagtacctgccaatacgcgttgctttttgcagctgtcttttgtgatcaaataaataatttgtaagatatggatggcaaaaagatgtgacttctgcagagccctcacctgccagcactcctccatgtggtctgatctgcagacagaagcagaggaaacaacctttcttctgtttcccctggaaacagagagccaggctgcaaggttaatcattggaattttgcaattgtgatggaggcaaaacagaaatcaggcctcacctgggctgctggaaatttgtcttcaaactttttagagcccaatcttatcttcttgtctgaagccgggacaggaaatgctttcaatgtattgtttcaaatccagatttcccacagaagcgaatccttctaggtgatatataaaaaaagctgtagcaatcacttttaggatgctgagttggagggaaaataaatagaggtgtgtaaatggcgtctccacgtgcagagcaattcactgggaagacttgtagagtctggcaggagtgaatctatccattgaccaaatgcttttcttaaaagtattctggaaactctgataggacaacaatctaaggtgatgcatattaaaataggtaataatcacttttgataaacaggatactccagagtggagcttttagcacaaagtttattagttctagtctggggacagtgcagcaagcatttcaggcacggagaccctaggtccaatcagaggatcacagaaatattggaacctgtttttagactctaacgtagtagttcagctgtataaatctggcagggagggtttctagggtcagagactgtgtatgttattagtgaagctctctctgtacaggccaagccttgggaatatttctcaaatggaaatacaacaaatgttcttagaagtctaatgaaagttataagaacagcagcataacacttactcattcattgaaaaagaattcattaaaaaccaacttgatttttgaggtccttgtgccagaaagaaagggaaagcttgaaactaggatctgtgaaggatctaggtttctatgcctacaatgaacaccctctcctgtgttctctctgtctctctctgtctctgtctctctttctctctgtctccctctctctatctctctgtgtctctgtctctcccctccccccaactctgctaattggtgttaataccaactttgcttttgtcaagaggtttgttatattgtctgtgttttgtaattttaaacatccttttcttggggctggggagatggttcagtgggcatgaggacactccaggaagactggtgctgttggtgccagagtcatgaggctcatggcgcttactggcccacagccccactccaggttcacagagagaccccaactcaaatgagtcatgtggaaagtgataaagtatgacactcataaatatgtctacctatggcctctgcaaaaaaaaaaaaaaaagaaaaaaaatgtgtgcacacattaccttcctcccacacattcattttctccaagtggttagaactgtcctaagttctagttttccaacagtaaaggaacaatgtcttaagcagatgttaggacaagattaaattctttttattttgaaagaggaatagaaacacatctttttttcaattggttgaagacaaacagtctaggattgagttccccaggatgataaccctcccatacccatgagtctgcagagagatgctttaatggaaggcctgaagctgtgaatttttttggacccaaatagagcaatgcaaagcaaatgcccctccatccatctcgaagcattagacttcagacatagcatgagatttgtcagttattgatggagattgctggaagacactgagcccttggcttcagaccagcccttgatttgccaatgcagtcaacgtctgttagctttctaaaacttgtggtgtagccgctagtccacgctactctcttggtgtgatacttgggtgacagaaatacttcaagctgtggcttttctttcagtaggcaacatagggaacagttgtattcttgacaatgatgtaggggcatcaggcattcgctgggtctctttgagagaactggacatggcagccactgccttcacatccatagggagtggaacactgccagcaaggccaggctctctccttctccctacctggggaactgtctccttccaacagtgcttggagcagggttgggggagtcatggggagggtacaggtggagaaagaagtttcagtcaacatgtcgggtaggagacacatagaattcaatggcatgtgacttgacattttgctatgctgggaacagaaagataaagatgttggataacaccgcagcagagaataatactggagaccttggcatggcagactgggttcaactcctaggtctgccttacagatgtgcaacattcagccaaattacacaggattgcatgccttgtgtctgcttctgtgaagaagccagaatcctcccactgacaaggtatgaagatttgttgaacaggtgggcaagagcaagctgagagtctattccgttgcaaaggcttagtaaacctgagttgacatggtatttgcctataccatttctgttcttcatagtgatttgatatgtgtcttatttagctgatcccagctctaccatccagccagctgggtcagctcagaccttgagtgtcacctgtatttagcttgttttaccacatcttattttggattcagttctctttttccttgatcctttgccttattctcccaatggtggctattaccccaatagtcccctcttgcttttatgtggccctgttttaatatgtctgcacaaggcagccagaagtctgtgtcctgtcacttgcatactcctttcagttgaactttgaaacttgagtccctttgtgaccagttcaggctcaccactccttagcatccccaatggaggcacagagctggcctccagctgtgccagctcgctttatctagtgtacctctacccttcttctttcttcccccagatattgtgatttatgggagagacaaacagcatgtgtgaaggtgatgacctagggccagggcactgtgtctggatccccactctcctaccaagtagctgggactcagtttctcatctttttaatgtatttgtgtgtatggaggggacagtatgtgcatgtgaatgtagacacctacccaagccttcagcattggctcctctagagctggaggtaaagacacttgtaagctgcccaaattctgtgctaggaaacaaactcaggttctctgtgagagtagtacacttttaaaatctgagtccagtttctaaacttcatggataataagactagttggtttgctttttagtagacagtaattaatagatagttataaactgttaaaatattccctgtatgtagtaaacaattaatataatagtagttatgtaattgctactattgttcctattaatttctagaatttggttcagagattctttgtgtgtgtgtgtgtgtgtgtgtgtgtgtgtgtgggtgtggtgttgatgatcaaaccccaggccttacatatgtcagacaagtgctctaccccatctctaacacaaatttaagtctgttactattatttctctgatgatgtatgatctctttccccctcgaggttgaggttgactggccgtgcctctgggacagttcccttctgctctgccctctctgtaagagcattcttcagccctctagctgaatgtctgtctttcctccactcaaaggggatcatcttttcttctttaacaggcagatacacagacccacaggcacacagaagcacacacacggacacaggcacgcaagcacacataaatgcaagcatatgcatgcagagcacctgggaggtagaggtaggatgatcaggagctcagggctggctttggctgccttagaccatctcgaactccaccccacctgatagcctcaccaaattaatatctccagcaccaaaaataatgcttggcaagtagtttgtgctaaatatgtgctcgttgaatgccttatcttcattagacagataagagaagcgagatagaaataatttgagaagtttattacaagtgtttaaagaacttaccgcactcatatttctcatttgccaaagaagtagagccagatacacggcaggcaggaagggaataacctgttatctggctggcttttcactctttgctcattctgctaccccacaatgactgttagcaaactcttagcacgactggcattgccaattttcttgccttggaaccactttcttctttgaaccatagttaacatttggaaacacaacagcggctattgagagtttcgggagaggaaatggtagcaagtaacagtgccacgtcacttagagatgcgctggggacttgcttacttctgaacaggaggatgctggaaaaaaaggagatgggacatgtgtgcaagggagagtaaaggtagcaagaagatgcctggtcctcaagttaccagtgagaccaccccatgctccctggctttttctcctggtgagatgatgtatttatgtcccttctgttgtggaagtatctgtgaacacctgcaatgaagggccaaaccttcctttttctgtactgggtccttgcatggtgtttgagaggagggtgcatggcaggaaccatagatgaacacacaggctttgagatcagaagaatcccaaactccttagcttatcagctgccctacccgagaaagccacgcatccctccaaagtcttagcttccccaggcataaaatggggttcaagactgttctaggattgtcaagaggattacagattgcggcgcttgtcgggtagagtgcacagctcttagaggtggtttcagtgagccatctaaggaatgctgttgattcctgtgagcacagactgtggcttttcgattggtgtactcagcaggccatgtttttttgttaactgcccacattacctgagcctgtgtttatttctactgagatgtgtgtgtgtaggttcaggcaaatgtgcataaaactgaagagctataagaaaaataggaactcaccctttttatggatctcatatgtgcgtatacacagaacatgttaaaaaacgaatgcctcattctcttggatacatatctcccctttctgtgtatctatgaatatatgcccatgtacatacacatacgaatattacacacaatattgtccatttatctttaatttttccttttccaacatcacccacattctttgaaggagaatcatgactgataaaatccatggtggtcattaaagatattgaacaacatgggggccgccttctcttcccgtaaataacatcaacaataatgaaggagtaaaggagagagcagagccaggcagactgagtgggatactctttcagggtctgtgctgtgacctttaggatgagtaagtttctaacagtcactcagagccatgcatgagcagtgtggcctgtgacatcgcaggttgtccttatgtgtaatgctaggcaccagatggtgtgtgacacaacagcccacctttctccacagttatccctatgctggggagacttcttagtggagaagctatgttagaggaccactgtctttgtagtccaaaaaatcaatcgtttctttatgaattattgagttgtttgcattgctttcctgtccctttttattagaagggtgcatagctgacatcagggcagacagatttttttcctttctactttacaaaactttatgtatttttcatcttgtattgtcacaaaataatgaaagggaccacttctctccacacatctcttttctagcttacgcatttaaatgttcagatgcttggagtgagctcagggtggactgtgctcctagcttgttgcaatccaaactatgtggcaggctctagggactccaacttgttttaaggggaaaaacactcactttttctgtgacaatgagcatgacaattgcatgcctgcatccagtattgccttgtggcttttactccaaacgaagagacagaactaaacgagcatttcttactcttgtgtaaatagatggattaatggcatcaagtgaaagcccagcctgcctgaaatgttaacttccttataggggtttgagtttctcttatttttgataaatggaccaatctggcaataaaattcttgcacagtaggttaataatgtcatagctgaactatgaaatagtaatgtgtgtaccatccttcagcaaacaataatccttgaagcctgataaatctattctcagcccaattgcatgttcattgttacccaggactctgtctttgcaaacacaaagcagttctgtggcgtgcatttttaagcagaagcgaccagggagtcagggagacacaggcgtgtgcagcctgtggagacaggtggacaggactgcttcctttccagctttaagctcttgctgcccccagtgtccaaagtctatcctcatgtgctgctggtaccagaggatgctggggccacctccgtgtccctagggagctaggatcacttatttgctgccgcaggtacttgaaagattgggacgaaggaagcaaaaatctccccacccagggccttcagtttctatcgatcgcttactagcaagccaggtttggtctatttagcccaaatccctaatgacaagagaagacgcgggagactcctccggatgcggacttcatgcagagctgggactacagaacctggccaacacctgcaggctgctgccagccagcagcacgggcagaaagcctgcagaacatttcagcacccgggctgctaaacaaaaggcagccaaattccctccgtctattaaaattgaggaggagagaggccctgccacccccatctgggaccagctcagggtaaaattgatactgtgttagtaagaaggatagcagtagcctaaatcagggctgattttcaggggagtatttaagcttcaaaatagaggtagcttggggcagtgggcataaacttgacaaacaggctactttagacctgtctgactgtatcagcataatagggcaatgaagcttttattcattcaaagaaaggttgggtttgattggcagggcagcccgcttgaacgtgagtggctctttccctccccaacacaccacagctatcaattaccgttttgaatacgaagtgtttctaatgtaaaataatgccaacctctgcctctgccctcaggccagaaagcttctttgtgttatttattcccagtctggtctgaaccttcctcacttctctggctcttttttttccccctatccccttttctttcctttcagtatctaaatgatgtaatatcgccggcagaagtgaggttcatgcagaaaaaccttcctgctctttattttaatcaatacccttctgggtgagtgacatttccaccttagtaatttaaaatcaggagacccggggatgtccgcgcttgtgaatcaccctgggttccaggaacaaaggaggcatttttgtgtttttgtaatttccccattcgctgtacaaacaactgggctctgaagctgacttcgtttagcagtcaacttctgtctagaaaactgcgcaccgccgagccaaccgccgggcttatttacatcagcaagtgatttgtctaagctgccatctgttggccacttagctattttaatttgatgccggggacattacctgactttgtatattccattttgatctgcgtcgtgtttgaggaatatttgaaaatgactctaaaggagaagacttttgaaggatcccactgaacaaatatgtacatatgttaaagccatgctgggcaggagtgtgggaagaggcgagtgcgtgtgtatacagagtgggctaatcatctctgcgggcaaactgacagtacatcctctagaattccttccttctcatttccagcagaccccctcatttgcccatcgttcagaggctttcccacagttccaaagcggctgtttttaggtggttatgtttataacccttgtgagccagtgcaggatgctgaaggaggcacagtggaatatccatctgcaagggcccaaggttccagtgtggctccagcttgttcttctatcttttcatcatttgtctctctcatagcaccccagttagttaagagtgagtacttatccagaccctctatgaaagctccagagaagtttgaaattttctttttgattccccatgttgtctgccatataatattcccttctgtataacttctttctgtgggcttttgtgatattggtgttttttcctcctaccattcatcagatgttagagtatttccaattgaacttggccttgcttccaagcagcttcctggctacactggtcttacactggcattctcctcaagctaacatgttgtgtacaactgcaggatagctgtccacagcagagacacataggcacctccgggttacacactccccactgtgcttactgagagcacagaagtgccaactaccctatcccagacatccatgcacaaaacattcagtcatcagatgggaacagatctaatgctaaccccgggcagagtggacagttaggcaggcaccaggaaagagtgagtgaaaagatgtgaacaggctgaagagagccaggtgttgggctttcaacctccataaggtggagattttctcttcgtgtctattgtacttgaagaatatgtgaatctgctcaaagtcgtgaaagtagaaatatataatctaggaaatgtgacgctttatttctctccctgaaaaatgcaggcagggaagggacccacaagacccatgtcggcacgagactgtaggaacagagagaatgagattaggtgagattcggcgcttgctcaggggtagtgagctgtgaagtctatgttggtcttacagacattatcaggtaccattatttccaaagcaagatatggcagacagaaacaactgctttcctaattattctaacgaagcttccggagcactaggacaaagggactccatcaaagtttttcactgtccccaaacttcatatttacagtctagcataggtccaaagaagttatccaaatataataccagttggaaagttgctcatgttctctctctctctctctctctctctctctctctctctctctctctctccctctctctgtctctctctctctctcgtatttataaactactgtcataagctagagtcaccaaaatgtctctttaaagagagagcagtctaacagtaataaaataatttagtctattttttatgaagcaataatatttttgaacagcccactgaatgccttctaagttgcctgggtgcctaaagggcttacaacgttcttccgtggagataaataagctgtcaattcatgatgaggaaaatcaaacccacagtgttgatcttggctgagatgcctgttcaagtatgagagaaattgttgccgagatgtagctgagcccatgtgttagcagttagcactccagtgccacaatgaggctctgctagtcttttcaaaagataaacattgctgtcaaaataaggaaagggaaagattaacccgttcaggtacacgtaaataataaatgacattccagctccctggagtcctcacgaagaaaagagctaaggtccagagagtgacttttattggcttacctgagtttctttttcttgataccttctggagccagggatgggaagggcaggaggaccctctaaagtaaacatagctgaatgctcagtagagggtgagacttcaaagaggtacatgcccaaagcccattggtttgctgggggttcttacacttctccaatgtaaccgtgtgtcttacacttctacaatgtaacagtgtctctctgaccctgagcgctaaggccatgcatttttggagtactagcctaaataagtaaatgaaataaaataaaataaaataaaataaaaaatcagcaaagaggataatttggtgtagattaaactggtgcattatcataaaaggcttgcagatatcattctccatttaggaaaacccagtgcagagaaagggagaggagggcattttatactgaacatcagctgcagtggtaggcccttttcatctggttgccctgggaactttgggtccagaaggtcccttgagtggatcggaactttttaaatggaatcataagcgaatgccaagtatttgatgccggaacaggttgttttctaaaatgtttgtggtataggttggggaagccccacccctttcaaacttgttctcagaagtctgtaaagggataggcacaaagacgaagggttcaagtgtgccctgtgtcttccataaaaacgcagtggtttcatgtccattgaaaggccccagtgttcatgaccattaaaagggtccaatagctaagaccaaagaaaaggattctgatgtagtttaggagtccactccaagggaggggccttgggactgggggtgggagttatgataacctatcgaggccttattttcctcattttaaaacgggaacagttatagttcttatctattagaggcatttgggattgaaggagacagtgcttgcaaagttccaccccatcttatttaaaggccacattatatgtatatagtctcattactgatttctttctcttgatctgctaaggcactacactttgtattattatcggggcccactggttttacatggttcagtgcttccaaattgccggtgggatattagtattattgctgttgttataattttttgcagagaatcttctaatctgcaaaatgaggtgattgggttgagcgatctctatggttcctctctgtcctaagaatcaggatgccttaagtatcattctttctcttgtgattgagtgaaaaacacacaaaataccaccaagagtatcatgaacttgtgagtcctcctgacaaggagctcagagctttaaagggcaaaaactttaaagttccaggattgtgcgacaatggactcaaaggaaaggtgctcttgtctcggtacatggattggacccagggttttaggaaagaggcaggtggcaacggttgaaagggaagatggatacaaatctctgtcaaattcaaatgcatattaactcctgttcagatagcagaagcacgccacaggcaaaaatcagaacatgaatttgtatgttcccatcccaccttccccaggctgtgtgcacagtcacggttacagaagcagcccaggactctcaacattgccatttcttagtagaatatgatgtctggcttgtgcctttaaatgtagtagcttgtttgcttaggcttgcggttcagagatatttgttttgccttatacatgtagtgaaggctgggactacaggtatttctctagtggtaattagaacgaaatgtagatttatacagaggaagtttgcaagtaggatgcattcttgtttaagaggcatcggtttcagtttcaactggtgccatagtacttggtgcttctttgcagagtccacttggagaagttttttaaaaatgcacgtggaattctcctgcacaaatttgagttaaaaatggcttgtcttcctgcttcaagccctcagaccttattggcacagcactgcctttattcttctgcctttggagttctagaaataaattcaaatggaaaatgcatggctctcagcattgtgtgtatgtgaaataaagatgtccaagggatcaaggagaaggcatgtctacatacagtttggccagaactccctggtgtgtgtgtgtgtgtgtgtgtgtgtgtgtgtgtgtgtgtgtgtgtgttgttcatctctccatgattcattctgagggctgttttagccttcataaaatattcatgctagttgtgcatggttctataattgccatctcaggccttgaattatttatacgttgtactgttcacatagtctcatttactgatagaggagatatcgccacacaagaggatcccaaacactctgaggcctgttactttgcattaagtagtggaattatattacagtaggtgtaaaatgctggccttttttcctcctctccctttaatatatcatttttgtatttataatatgctaattgtcaggcggctgttaagcctcataattcctaccgagttcctgaaaaaaaaaatcaagatgtagttgagatgatttagtttctgatctgagaatgattgttctaggaaaaaagcaaaaaacaaaaaccaaaaaaccaaaaacaatgtctttacacacagcagaatttattgagatgatgcacgagctcacatgtgtacctaagcacttttgctttgtattattgatcagtttgtgcgtctcagtgttaatccacatgcagttggcttctgtaggtgctccgaggagccttgcatgcttactgtccctaattaagcactgtctccactcagttgcgtggcagtttctccacagctatgcattcggtcttccctgttcctctgcctgaatcattatttctcatacaccccactattttgagatttatctgtgggtgagactatcttgtagctgcaatgcttacttctctctttctctgctttcaaaaatccatgttaatgtcgaatagtaacaaaaccctgacctaccccagagcatgcttctctaccatttcgctgtcattaatccacatttgaagaaggggaactagaacatttactgctgtgcagaacttccggatgctctagtttagctttctcctatagaagtggaaaccatgcattttgtgatgctctaggactttccagatccttccaaatcaaagctcttcttcatctcccctccctggacagatctgagttttccttccagctgtcttctcctctacataaggtgtgtactttctgaactggtaccaggcagagggctgcttgctgccatggtatggtttgatgtttttcagttaagctggtttttaagctggtggccagatggttttcagttgaatctgtaggtgagttagtgtatgttgggagtgggcaatgctgttctttctccctttacttcctgagtgctgagattacagcataaactatagtgcctggtttcttgtaggacaggtgatctaacccaggcctgcatgcgtgctgccgaaaacatccaatgagctcaactctggcccttaaagctcaaggagatgtattccaggaggcttcaagtctcccagttgtatgctgcatgttgtaagaggtcaatatatacccattttattgactgaaatcatgctaggtaccacactctgatttgctagtgtatcctaaaacaagtattcagaaaactaaagtgtgatttaagatgaagtaagaccagtatctctcgcaaagtaaatgccatgtctatttgattttaagtaaagtatgtgattcttagcggctaatgactattcacttgactggagagtgctaagcagggtttcgaactcatcatcatatggctttttgtgtattcctgtttccttgtatcttctcactgtgtcagaagagactgagacctagaatagacagatgagtgccctttacagtcagaggcaagttcaaggccaccttggggctgctgggtggtctacatgcccacctggtctggctacttggttctgtctgttttggcaatgcggttgggttgtgtggtgttttgtttttacttttctcagccagagttctgcaattccagcgattccacacctgctcggataacgatgtgtctgtcttcaggctctcatccatgtactcttgagtgttccaagctggtgtctgtgttttcttcaagttcaatttcagagaggtgaactgggtacatcaccgtgggaagaatcctttgccaggaggacaagagcagaggataggcagaggtccagttctgccactgtcctctgtatcatcaagcaatttcaactccttgctccttggctacagaaagacatagacaggagattctgcgctctaacattctgtgtggctacttcttcctgttagggcccatggagatgaatttcagagccgtagtcaaaaacctggtgaagcttacatgcgatctgcattgatttagaccaggtagcttgttaagcgtgttttattcttcctctctagatttttgcgcattcactcaagctattccttggctgtttctaactattatcgctgttcttcgtgttatttttatgtaattatcttgctaacggcagtggatctaacgcaaggatttggcatttttctaagggggtccaaatgtaaaatgtgaccacaatggtacctagcaataacagtggaggatggtcgggaagaactgtcatttttatgcagaactcttattttgtaagtatctggtatttggttttggtgtattaatttcctgcagctgtgtgcgtgtcagaagatgaacccctgggtgtcaaaccctctcatattagagtctattagaagaagtgatggaaattgtcacttcaaatactctatgcacatttagcttaagaatgagttgtccctgggctggaaagatggttcaatgggcacaaggcttgctgtgcaaccatgaggacttgcgtgcggtcatacctccagccctggcacataaagtttgacctagtgacatgagcctgtcatcctattccccctctgtatttcatgtgtacacacatgtgtgagaacataaatacatacacacacacacacacacacacacagacacacacacacacagacacacacacacacactttaaaagagttgtctcgcctgcttcaggctcttctgccctgtttacttgttgaatctttcacctgtcggtctgagttctgccctgtaaactttctcagattaggtctgaagctctgtctcaaggggaaatgattcaagcatttggggaaagataaggagttgttatgtcatcgagtcccgctcccccaccctctgtatgcatcagtcttctaaccatctccctttgacattattttatgctctctgatccctcgagccctctgcaccctatgtataagcaaagcacaagggcactgggtcaaccagaggtcagcttgagctccagatgtacctctccccttgctgtgaagctgttggatttcaggttcagccccaggcttctcattcttaaaatggtgacactatctgaaaacacccagtgtcatccagtgtctacaggacaggctaagtgacggttcctttttttccttgaagcaacacgtatttcttccttatgtctgtcatgaattgtggtgtccagaggtgcctggattctagtctgctgggcagtaagccaaagcattcatgtcacctcggttctgaccgctgtcgtcctatgatggggccagaggctgtgctgcctttggtgggagtcaggggcatagggattcctatcccaagctctcagtctaggccttcctgatgggttttggcgagaagaaaacaggacgacaagtagaaacatcttgtgttggcatcaggtcttcagcttttagaacagaactttctctttcatagacaaaacaaaacaataaaagagtattgctctatctctatcactgtgtgtgtgtgtgtgtttgcaattgcctaggatgtgagtgcacatgtgtatgtaagtgttgggaccagtgccaaagttaagggtggcgagaactcaaccagtacggctaactcactagagaagaacaaacagcaaagcctcattgttttgttgaaactcggggggggggcgacaatttcatttctgctccccaaacctacacagcaatgccttcttgcctttcctgtaatagccatggcccggctgcaagcctgttctctttctgggcatcaggctcctttgggtccctgggaaagcaacaccgcattgttatgcaaattgttcctattcccagcagagaagccctgagcctggtgaagctctctctgctgggaaaagctttacatctgtctcctcctggcttgatatctttatagagccaaggcagcagacagagtctgcagttttgttccatacggtgcccaactttctcctctctctctctctctctctctctctctctctctcactctctccactctctctctccctctcctcctttcctttcctttccttttttttcttcttcactctagcagaatgaacatacagccctaaccagtgccttctcttctgtccttctgaagacactagacctgagaggatgtgcagagttccacactccataatctcagagggaaagggtacaatcaccgtctttgcttcctttatctagggaccagcatcagccctccttcagtcctcagtgggtttcaagaaggcattttgcatcttttagagaggagtaggttacaggctacagcattccacatcagccatgtgtaatctagtcgcctacttttgttcttcccatactgtatcctgtccccattcccctcccccggcccctgtcccgtagcatgagactattgtatggtgttttcaaaccctccactttcttaatgttgtgcaaacgctccgttcctggaccaccctagtcatcacatatcaaatgagaccccttagcctttccagtacttgggagccacacttgtggcctggtagcatggatctccagacgctactttgaaacagtttgatggagaaactgacacatggcccagtttacaaataagaagaaagctcactactcttgcatcactgagcacttctctctgacctgttagtgggagtgagggtgttcaggttagaactcaactttctcagaccccagaaaaacaaactgggcaacaggtctcctggcagaagcagcgcagggcagaagctttcctcagagcttggtaatagaagcgtgcccgttgccttcctatcttgacttcctttaaccttctgatgagttaaaactttattcttacattgttgattttgtgtgtgtgtgtgtgatgccacatacgtagaacacagtgaacaacttgcaagactcatttctttccttccattacatatacactatatgagaccctagcatgaaactcagttcctcagactgagcagccagtgcacttacccactgccccatctcactgagtttttccaacaggaagaaagtatttgtctctgttttttttttttgcatatacattgggagaaccaaactctcagctatatgtgcacaagaaaataaacactaaaccgtgggctcttaaagcacaaatatgtatctccatccttatatctcaaggatattatcaattttaatttaacttgggagctatagctaaaggtttgtatgaatcattttttacttgtttattggggaactctgacttgaatcctgactgctatatttgagctaaatccttgcaacaaaattgcaaaaggaatttccaagtatatatgtctactttgcagaggagaaaataatgtatatacagacacacacacacatatacatttatacaattgtatatataacatatataattatgtatattataattatatatatataatataattattgcttcttttggtttatatgactctaggatgtctttctttctttcttttttttttttttttttttttttttttggagacagggtttctctgtgtagccctggctctactggaattcactctatagaccaggctggcctcgaactcagaaatttgcctgcctctgcctcccaagtgctgggattaaaggcatgtgccactatgcccggcttaggatgtctttcttaaacatctttccagtttatattttgagacagggactcttaccgaacccaatgcttttcatcttggctagactggctgtctggccatctgtcccggatctcccatctccattgtccaatgctatggtgacaggtgcataccaccatgcctgaatttttaatgtagttgttggggatcaagactcaatacaacaagtcttttacccatggagctatctgtccagccctaggaaaatgtagtttatataatgacttgtagtgtcaggtggtaatgatggtatcttacacagtttgtaggcaactagacagctacaggtgaagttgagggtctgagaatcttatggatgaaagctggcaaagaagatgttctaatgatagaagccctggaggttcaactccaagtcttccaagaatatggttcttacaatcttccccattctgtttgtacaccaagtcaaatgaagtcaaggcagaatggctgggaaaagaaagtgattcactacatggacattttggtacactccccctgaatgagaaacggggagctgtttgtttagcaaagccaagcagatggagacagttgtgtatgtatggcaagaactcaggcccccaaactatcacccaccatgttgcagacccccaaagaaatcactagccttcctgaccctaggctgtgccacccaccaggtgttggtgctcagcatgcagggggtgggggtgggggggatgggagagcgggnnnnnnnnnnnnnnnnnnnntggggagggctggaggggcttgctgaccagagctgccttttcatgtggacaaaggaagataaatagggcatagttaaggcagtgccatctcccttcttgaaccctgagttccaggaaatggtggaggctgagtgctccccacttataagctgatgacattgtgaacttggacagcatgactttagaaggagatttcaactactcaggcctgtttagaatcggtctggaccctcttccactctaacacccaacgatccgtcaattttgccataaaaacgcaggctccttctccaactgctagagtttcaggcagcatgtgtgtcctctgatttccacccacatgactgcaccttcattattagtagggctgttgggctgtcctgaaacctggccaggagcaacagaccaggacttagagcaaacttaaatttggcagtgaccacatttaggggattttcacggctcctgttttaatgttttggtttaatatttaagtttatttattatgtatgtgtatatatatatgtgtgtgggatggcactgcatatacggggaggtcagagaacaactttcaggagtcttttctctcctttaccataagggtcttggggaatcaaactcatgttgtcagtctagatacgaatacctttatctgttcagccatctctctagccctatgtgtaatatttggagacagtggtgcagagacgattatacagtttttcctccataagcaccatatttatttcccatttgtgactgcatatgcgctggcatgctttgttacttgccagtgtgcctgcgaatgctccgatgtatgtaatatgtagttataatgtatatacatattactagagtccccagtgtatagtttatagtttggaaagaaatcatcttccataattcgtcactgcctagctgttgtagactgggccagaacatcatttgttaacagcgacaaagccgcactcataaacgccgacatgttacattaatttataggcactgagtgacttattaaaagtgacgtgtgaaatataacagggctcggcatggatgattaggtttcgggctttgaattgttgacaaggcaggggtaatgaattgcgggacactggctaccgtgtttccccctcattagtcagtattagctgcattaatagtaataattggatatattcatcatttaaaatgttttaataaatgtttggacagtacctgattggagctgtcaaatattacactggaagggtttgtgacaagaaaaacaggatgttattcctgaggtgagagatttatgaagctttggccaccccagcgttgactgccatcttcctcaggagttctgagttcagaggagttggggctacatccatctgcctcacagaaatttctgccaagaaggttttgaaggagaacaggaggacatgacccaaaagagccatacttgctattgggtctttcaagatggctttctgagaaggatagagagccagctgtggtccaagttagagttgaggctctatgcaagtttctcagtcttgggagactctatttctaagctactctatgtgacttctggccttattggaactactactctgtaaaggtaatcattaaatgagatactagatgcctagagaagacttttaacaagctgtcctacccacccttacttcctagaattgttgaggtttggtcttgtgtgtcttttgtctgggaactgcatgatcaaaggctgggttgaaaccccaattaaagattaaatatttacgacaacaagtatttattggagattggtatttcagctctgaacgggacatgaccctctcttacccctagagaggagactcccaccagtttccgcatgcgtagtatcatctgagggatcagaacactttctgcaatgaccagagactaggtgtatctcaagttcatgattaaatttgatattaatctttctctattagggaaggctaaggttccttcatctgcagcactgtaaatttcaatgtaaatttgtactgttagaaaaattaacccatttgagactttatggtagtcacgacccattgaacttaacacaattctcttatttatcttcagagtagtcttccaggtacaaaactaccagctgccaatgaggagtctgaggctcagagaggttggatatttggcttaagggttcacagccggcagtccataggatgcagattgtcagtgagtttgagcaagttcatgtcttaactcctctgcctcagacattctggggacttacagagttctgttataattcagaaaggctgttgttgacccgcagtatatgtctaagagtttggatagaatggagagcatcctaaggtggtaggagaggagagcatgtttaagagaggcactttgactcctgagctctcttcaagtagaaagggatgtcttattctctggattcagactctgaaatggaatttgtgaagtttggtgacagatgggcaggattcagtgctcaagaagtaggttccatccagcccacgctagatggactgactcgcccaatcaccagtccttggagccagtgctctaactatctatactaagggtcttcatgtacattctcatgaaactttggtatcatgtatgtaaagcatatttagaatgcagtggggaatgacccagattatatttaggagactgtagaggttatgtttataattatagttaatattcttcagtttacaagaagaaatcaagataatatccatttagtatgaagctgtaagtgctcttcgggagtatgatttagaacattccaacatttgagtgaccacaataaaccctgacacatggcacaagggcaaggttgccttggggactcctggtggcctttggtttctttgttttgaattctccattatttctgagctgtagacagcatattctcctttgttcttttcaggatgaggaagatataaatctgtttctgtgtatatagatatgaaaaggcagtttatatcttcaaggctctttgctttataggtgggaacatcaggaagtttgggaagggtctcccaaagacatatatgagatgcatgaggcccatgggctgtgtggttgtattgagagtcgtatttgactggagggactcggcaagactctcagaggaagacctgcagttgtaggagtcttgaagtcttgagacttcttttgggcccagcagaaaaagctgggagagagaacactggagacgtttaggagagtttaaagggcttaggaattctcaagtggtattaccttttaaaaacacaataaacctagatagggtggtaataggtttaactcaccagcttgtttggggggcaactcataatatttgccctttctgcaaaaagtgatcatatctagattttaaaagtagtgattatattggaggttggttcaggaaaaccaaatgccaccaagattccgaggcaggctccctagaactgaatagtttgggaatgttagtgtgatgaggttctgatgttcccaaaggatactcccatcacaccatgtctaggtaattttaagaaaatgactctcactacattgtctgtcttttgctttgaatttccctgcaagcacagcctcctaatatagaatccgagttatactggatggagtttctcaggcctgagataaacttctctgggttagagatatccacacactatctttctcctcaccctatacttagcatggcatcttggtatgtagtgtggtgcagtgtgcagctcgctttgctgtggttatgccgttctgtcatttctgtggtgggcattgggagaagagcattgtgaaacagcaaaggcttcttttcaggcagcctgtatgtgttataaattacaacccaagatgatgcgtacactgtcaggggtatctacatagtccatggctgtaggtaaaataggctgtacataggagtaaatgtgcaagacatgctatttgcttccctgtggttagtttatcttttatatacttgggtgtctccaaaaaaacccaagctatcaaaaatccctgctctataggttatagagaggactagtttttggtgttttgtcaacttagtgttattggatctcagattacggtggcttttgccagaattgttagaagaaacaattttctgctcgctcaacagtttgccactctgagtcaatgaatcctgctttaggcaataattttaaagaaattcttagatttgcaaataaaatcctacctacagagatgttcaacaaaataatatttataatagtgaaaacttggatgtaatcaataatggaaaattgagtgatgatgtaataattttacagagatgtcactgagtaaaactaagtgacactttgaagattactctaggatataaaattatatatgtggttataaaattcatatacacatttaaaaatagaagaaatgggcagtagagaaagtttttatttactattaatttgggaggtttgtctttttattgttgtatacacacatctgtgcatacctgtaccacagcagtgtgcctatagaggttagaaggcaactttgtgaagtttcttctccctctttatctttatgtgttttgtgtggcaagtgcttttagtagctaatcaatctcacatgccctcaatatatatatttttttgaataaagatattggtcttcatagccaggaaaaaaatctaaacattattttaaagtatagcatctaaaactgtcatgtgcataatggcacagaaggcagctaatgccaagtcaagctagactgccctggccctgggagcttgttagacatcagaggatcatctgtttagagcaacgtttgactaagctaattccggacatttctctcaacccctgagctgccggttttaagttgcaggaaagatttctggctggggcaatgaaagagagtgcacataaacacagggtttattttgtcagggatgttcttgagagacttcattctctactggttttttccccctttctttgtggccatttatttactttagaaaatactccagtagatcctcacttgagtgaaaaggagataagttctcattgagaggctcagttgctgatccagagggctctaagaacggactgaacatgagtcagagacggatttttttttttaaatattacagttttggcttcatgtctgtaaatgggtgattttgcttcaaatatattctgaaattcccacccaaagtttctttttagtgctttgcctatgacagaagacactaataatacctttcttcccttctcagtggagttttttccttttctttttctttttttttttttaagcctgcctttgcatgaggctcatgctgacataagttcttatccactgcctccatttctcaagggactgaagggcacaggcaacagaaaagggcagccttgatcctacccatccctttagtgagtgcaggaggagagaggagacttacagttaagatcttaaatcagacttggctgttaaaagtttttgttgaggctttagggaggctaaagctaaaacttagagtcatcctggaggttaatctacccagctctggaaggcatgtcttctgctgtggaagaacagctggaggtgagaggcctgggtttgcatctgtgcagggcactggggtgaacgtgagggcaatgatgccaggattttggaggcagagatttgtgcctcaaggcagatgcatcaggaacaggggttgatggagaaatagagacagtcagcacttgtgcttgtttgttctgcagagactcaagcaactttacacgtttaatccgatcttgtagactgagcaagggcagcaaattgagggagagaggaggctgggagacttttatcattctaaatcaaagaggactcagctgcattaaaagtaccctgctaaaatggcagccactccgtgatccttaaaaaccataaaaagcgactctttttcgcatcatcattttcatactctgaatgggatcacttttatgctctagagcctccctcttggccaagctgagtaggtggccagggagaaatcagccttccctgtgggtcttcactggcatgcccttgactttctcggtcagtgagatagtgtgctcaactcgctcgaatcttcattgagacttggattcgagttagttcaagatttctcataaaccatctctatgacatcagagtgagttaaggctggcctggccaatttagtgagaccccgtcttagaataaagaatgaacagggggctgggatgcaggtccatggtagaggacttgcttgccggtgcctagaatatgcaaggtcctaggtataatcacaatacagaaaaaaaagaaaagaaataaaaagaaaaaccagaccctactaaatgctattctaagagttgctgtgaggatttaatgaagtaatattagtaaaacctttactaacttactttgcatatagtaaatacccaattagcagtgatttgaataagatcaataacaaccacgatgatctcattatcactagatgaaatttattggcaattcattcgtgaatatttgccccatgtctctgtagatcataaaataaaatctttgaccactgactattctgtactctgtgatgcacaaagagccttcaagtgagcactgtcaaggacacacgattgtataaagctcagtcctgagggcagatgagcaactcctgggcaacaagggatcagggcaatatgagcaaagcctgtgggcatgtagatgatgctgtttgggtcagtgtggtcatggtgatcatggtggtcatggtggatttggtgtagcctcccttctattagacagaagacattctgagcagaagaaacagtgtgtcatagcttggaagtgggaaatgacaaactttgagagaacaatgaggtatttggtccaaggctatatgaaggcagttttggaagaaaaaatgaattagttttagcttggagaccctaagtgttgtccttgaagttacacagaacctagatccccgcaaatctcttgaaggtgttcacaaatgtgtggatggtactaagataccataaatatgaaatgatccaggcaaataccatgagaaaaagatacttatctaccttgaacacttaggtacatggaggaataaaacatttactctgaatagagaaatcagcgtggtccaaaattatcccagtcagacctagaagtgtggagggacttcaagaggcagagcaatgagttgtgggcaaagagaataattgagctaaaacttggaagacattctgagcagactactgagacaccctgagaagaatgctttccaggtctgctgcgtgttcccttggtaaaatgggtgccactctttttccacatcatggggacagtgtcttttgtagtgaggatggagaagagtccaggaaaacagaagtggcagctgcactctctcttccatcctctgtgtggctcaggcagcagagctttaggactttccatttcagagactcccaggagaaggaagtagggcagccatccatgctcgccactgtctgactgtttctagctcagttccactctgagcatcgctctgaggattttcctttctttaccagtgaaatagctacctctgcatcactctatatcttttcttctaaccatcttcctgactatggtgtagaatatgttaatattgaataaggtacacattgctttattttgtgttttggaaacagggcagcagacattcagcctccactaaatgtttgtcatttaaaccttggcttttctgtccctcatacttagctgccttaaagctatttttaaaagggttcaggaaaatggcttcattgataaagttcttccattcaagcatgcgaaactaaattccttcatctctggcacatacaagctgggtatggtgggagtgtacctgtaattcctgcactggggaggaggcagagccagggagatggccggacactgctgaccagctagtacagttgaataggcacattccagattcaaagagagaccatctcaagagatacggtagaaaatgattaaagaagataccagacatagacctttgctccatcagatacatagaggtgcacacatatggacatctacccattaagagaaaaaaaaaggagggggagggaaagggtataggtatatagatatataggtagatgtaggtgtagatgtagatagatagatataggtattaacattggtaatctaataatgactttactatttaagggtgggttcattttgacatacacatatccgtgtatgtgtgtatgtatgtgtgtgtgtgtgtgtgtgtgtgtgtgtgtgtgtgtgtgtgtgcacgtgcgcacacacggcacaaatacatcatctgtgagaatgcaccatgaaggaggttagcctcagttctctttaaagcagtgtggcctctcggcttctgagtttcttagacacccgaaccaatgcttgctcgccaccacacaacgccgctgaagtgccagcgtcacattacaattaacagtaattctggtggctgtcatcacttcctcggaacagaggatccctagcaaaagcatgatgctgtcacacctgctaattcaaaggcattgtgtgaactatgacagacctcagcgcacttcttctgcttgttgaaatgaatagagtctggcgacttaaatagagagggaagatggaaaaaaagaagttttaacacatttctgcagatgagcccaagaagggtcaacttgtgggtagaaaaaaagttgtgttaaagaaagtaattagagagagacagagagctagaatattagtgcctttactgagtaaatgaggataaattctgttaattatgtgactttccctcgtactaatgtgataataaagtgctctcattctggagaagcttgtcacaatcccagcaaagacattgacccttctactagtggagaccaaaaaacaacttctaaagcactctaccaaaagcaagcgatcggtgttcaatgcccagtgcccccctcgctgctatcaaaggctgatacttgccatgatcttgagactgttggcgagtggactgtcttatttgaagccctgaagcacttaggccagcttttctgtttagtttcagaaggaagaactgggaataattcaaagagtataaatagtccaaagccggcttccagcccaatgatgaacagcaccaaaaagattgtgtttggaatgttggtaaaaatgctggtcttccaaacttcattcagaccaaaatttatgactgtgtatgtcattttaggcacagtagggaaatggaacatggttgtatgtttgtgacattctgatgatggtggaaacagggcagagattgggatattcatttgggagagtcagggggatggcgagacctttgatatttgaccgtgaattccctgttatgttgggaaggaacccaagagctaatttaacaagagagcattctggcagcaaatacaatagaatagagaggctgctggtgtgaagggggaaggatagtgtgactagttttgtgagctctgaagcagaaagagaggaaaagaaggtgctggggtagattttagttgacatcgtggaggagagggatgattgctttgggggcagaagacggttttatttggttctgttcctttaactagatagatttatggaaagttcactgcacagtgtctaaggaataagaaaaataccatatcgttgtgtgggttgactgctggaccttcccgtggcaatgagtatctccattcacaaagagtcctgctctagttcataggaccacagacaaccccctgcattcaaattacatctacctctgccatgaactctctgtgggaaggcaagttacttaatatctcaatgattcagctgctttttatctggagaactggggcagaggtggagagtgggtgaatggttgagggagtgggaagcggttgtgaagattaaaataaagcgtgcactaagcatgctacatcgcaagtagtaacctccagttgacatgagccatgactcttacaaaacagtattcattttccaaagcctgacacttaggtaagtattctactagtctgctttgcagcagtcttttgaagagaaataaagtgaccatcgtggaaaggcagtctgtgctctgagtcatcttggcaaagaaagaactgtcatcacgccagagtgcatgcaaacttgatcccatagttcaaggcaacctacacgaaatcgcatgtcttcccaggctgtttgtacttgggaagaggttgtcaacatgactatcttcatatgagaagagttctctttactaaaaatatttgaaacacttgaagggctcagggaaatggttgtgggtggagactgcctaggaggtggggcataaactataggcactgtgatcttatcatacctgttggcataatttgaggaaaagagagccaacagcaggggccatcctggagagaggcaagaaaactcaaaaagagacacaggcagacctattgtagctttcgatagacctagtttttgtttctttgtttttacaaggctgctgagaatctgaactcagatcctcatgtttgcagggagaacactttattgacaaaaccatcttcccagcccttcagtaacaactgagaaattaattaatctatctggctattgattactcttaaaaaatatttatttcagtaagaacttagcatcacatctcactcttagtaaacatgacagtgatgggtacacagagagaggcctctcaaaggaagggtgcaaggtgtgtggctggagagatgctctctccccaggggaacttgggtcctccgaaggaatagtcctaaccaacgagccatatctttggccctagtccttttcataataataataataataataataataataatacaatatatatatttaattttgaaattgatacagaaaagccataccacacagccttatgatttgcttcttgtggtgtagagtgggtgttgtaggactcttctcacagggttggtctagccccaaacttgtttggaacattgagcaatgtcatactttgtcaacagacgtgccaagcttctcttctgtggggaagctttgacaacactacttatggagtcagatagctggggagatttgagctgttcctgttgacaagccattgctcctcagttcatacaattttgggcagtccatgggtctctgggaagcctggttgattctttgatgttaccagctaaggctccttctgacatgagttccaaataatctattttaaaagcctccgagattttgagagtacacagtggttctgttatgaggaagcaaaatgtatttaggtgtgtgtgtgttaagaatgtggacagttgagcatccctaatttgaagaatcagaaataccaaatgctccaagaagaaaaagaattttgagcaccaacatgaggccacaagaagaaataaatgccacatctgacttcatgtgatggcttagagtcaaaacgcaggtgcattaaaaattgtattaaattacattcaggttgcgtgtagaaggtataaaggtgtttataaaatacaaatgagtttctagtttaggtttgggctctggtttttgagatctctcattatgtatttgtgtctcaagcctttgtgtaaggggttgtctgtctgtctatctatctatctatctatctatctatctatctatctatctatctatctatctgcttaatttatgttgtatatgtttttaataaatatatgtgtatttatgatagagacttatgtgtgtcattgtgaagtctgaacttaacaaggactctgtctttgagctttctacttgtattttctgagacgttgccttctacccaatctgctctgtgtggtcatttggtcgacatgtctgcctaacttcacctcaactttcttggagggcatttgtgggtgagcgtcctctctaatcccttcttccccatctgtcagaaataaagtttgcccagtgagcgcctttatctgcataataggctgtgttctctaaggattctctctaaggcactgggatttcccgcaactccacttcatatctttcttggtttagctgtaatagaaggaaagtcattttttccaacttcttaagacctgcagctggctcagatggggccagacaagcgtgactaaatacatgtccatccctaaggcagtcatggaactgaggtctgtggtgtcctgacccaatgtgatacattttctggaccagtggtagccaaagaatgatgcttttaaaatgcaagaactcttgagtgcggacaaagtacttgaataagagaacaagggactgctattataataggagaaaagggaccagggtgcaaaacctagtgccttggagaggaaggatcctaagagaacacagcctattatccagataggtggcatatgcctttaatcccagcaccctggaggcagaggcaggcagatcccgagcaatccagcatatactcttttcttgagaaccttatagaccatcgtacagaataacatgtgtgcacaaactagcatctcacattggggtattcaaggacattgtgtcacccatccagggactcttgattaagacgacagcagtagatgacgtttaagccccttcttcatttagcatttttacttagtaaataataatggccaatttaggttataaagtggaggagattttagagctcactctcatcagtgtctcacgttgaaactgacgctgtcccagagtgacacgtcgtggggagggtgagtgacctgtgagcacctaagcacctgcagaaaatctaaatggtgtcattcttcatctgtgagactgcttaatttcattttccaccagcaaccttatgatatcccgagaagcagagcttaataaagtgttgggctctattttgcattctgatttcaatatgatgaatctctttttatatttttttatggaacagaacatacagacttattggattgtccataatatgaactatggaataattgggagctcatgagattactgtcagtactctgtgggcacaatactttcctggtcattttcatttgaagactggtccctagctctaaatccaaattaaggggtcacttgttcatatctgagcccatcctgtgaggcgtgttggagtgcagtgattgtgtgcaatggaagccactgctcaaatgaaattaattatcccagtgtgagcccagaggatggcaggcagcacatggagatgctgagattgggagaggggagtgtgcacctggaaaagtgagtgggaaagtgatggagactgtcgaaagggtgggcaatgatgattggcaatcatttctaaataacatctatgcttagaaaggcttggttctttttcctaaggagggaagttacttagagggaatttcctctctttctcttcttcattcctctttcctttctagaaaaatgagcgtgttccttttatttacataataataataataataataataataataataataataatagccagatatcatccatccctgataatcttgtcccctttcttcccctgtgacacatgcttaggataagaaggaaggaatgacatgtctctttttaccaatcagggatttgatttaggttgttgttgttattgctgttgtttttttaatttaaatttcagcgatacaaggtgatccgttcattctttcactgtacgtctcaatttcagttcataaccgaaacatagtgattagaatagaggactggagtgttcactgatttctaaagtctctgaggaaattctgaggaaaactgcttgagacctctgtagtgagtcttcatagcaatggtggctgtgtgcacgtgcttggcaagtaatgtgtgattagtaaatactgaactctggaccagaagcatgaggaaaggaatgacccaagaaatcagactgagcgaagacatttcaaaacattgagagttttaagccacagactccatgaaagtcagcagaatggcctgtagaattttggagaggagagatccattctagtctattgataatatggccttttatccctttgggttccaggtaaatgttttaagaacaatgacaggcttaacttagagataatatgttgaactttgatgtcaagacactattaagcaggacatttaaggacaccagcaagctcttgcatgaattatgcatgtatgaaactaataaatggtcacagaccgtgagatggatagctcttaactatgcttgctcgaattaaatggcaaatcttagcacacagagactttgagagaaccacttatcatttttatttcctctgttacccatcgcacaatggagaaacctcctctaggctcaggggtgaatgatatgcactttgatttccacaacactaaaattgtctgtttcctccctgggagtattgtatacacatggaaaattcaaaactgcagaaggggggaaaagagacaaatcaaccccgtgttatgattgaaaattagctgctattaatatttatgttcaatttaagtcaggcattcatttggtgcttttcaaacacagcaatcctgggtgctgtgggaacctgaaggtccctttaagagccacagaggtaactgtagtcacttcaagaagggcccggctactactacgatgcatctgtagtagtgaagaacaatgtgactaattctgcaggaagggtgagggaaggctcaccggtgcagcccatttagactgtagctgaaagacaagcaggagtatgggaagctgagatagtgtgggaatggagaagatacctcagacccagggatgcaggcaacagcgaagggaggaaggagacttcatgttcagggcacaaggatgcagcttgatgcggcagaagcaaagaatgatgggaagagaagaataagggagcaacacacctggaaatgctcactactgacactgtgaagcgctttaggatttgctgatctggcccctgcctaatagccacctcagattaatagctcattccaaggtattcagctttccttggcacaattactcaaatatattgtcttaagagtcaaagattttcctggagaatcaaacttacatacttttcttttggagaaaaaccttgaactgaaatcagtagagtcttagtagccactggcactcaggagaatccagtgtaccctgcgttctccggacgtgagtacgtatctgttaagtgaatgaatgtgtacttacaaaactttataagtgtggaaaagaatggaaagctaagagtccggggaaggctggatgtctcagtcactgtggacttgaacttcttaatccctccagggcatctgtcaccaccacagaagacagtcatagtgaaactatccgagttcttaaaagggacaagtgaaatgcgaacatcagattctaaatgaatgggcttcacaattttaaagacacacacattgaacaatgaggatagtaaagcctttcattttccacctgtggctttttgtctgcatgaaagactttcaaaggtagccactgtgaacgtagaatgatgtatagtcaaactaaacccttaagatgatgttcgctgacttcctccaaagatacccaggctgtcttggttttgctttggtcttaattctccattttgctacagttaaatattccagccttttcagcagggttaaaatgcgtttgaggggggaggtcacacataaagtggtcaagagcaaacttgaaacatattagaattggtaattaggatgacttgaattcaaagtaccggaattccttatgttggctttagctctaattttagttaacctggtgatggtaaggtgtattgccagatatggtcaatgaactacattcccattaagataataagacatgtgtttgaatatgtaatatattttaattggcaatttccataacattcaatatagtatctgtaaaacgagaatagaaccagaactccacagtcctttgaatgagtaagagaggcaaccaagagaggcaaagcatacagcttcgcaaatggtcttgtgccacatttttttttatctaaactggtaagatgaaatcctgaagccgggcgtggtggcgcacgcctttaatcccagcacttgggagatagagacaggcaaatttctgagttcgaggccagcctggtctacagagtgagttccaggacagccagagctacacagagaaaccctgtctcaaaaacaaaacaaaacaaaacaaaaacaaaaacaaaagatgaaatcctgaggatcctccatctcaccctgtatatctgactctctaggagtcatcactgaggcagcaaggaagcacgtaaggatatattttttatcttggataatactctacagtggtaacccagaagtcccaaggaccaacactgctgaaagctacccaacatctatagatgtcttaggtccagtaatcacctgtagaccgtgctctgtgcagcagaaatagtttataataaatgttgcctgtccccttcactcagtcccaagcaggccaagcaagtacttggttttgctatctgtgatatgccttctgtatattaaaccgtgtacactgatttcaaacatccttccagggacgatttgaacctttatatactctggcaagaaagccttggtacttaggagtgctgcctaaggcttctctcaaaggtttctgcttctctaaagggtatctgcttctccgacatacaatggcttgcagacttgggattctatcattctttctcacttcatggtcagtgaaccctgccatgagaatcggctggactgggtcagcagaagtcagtgttaagccacagccccctatgagacagtcattatgagacactctttgccctggggtccttggctgttttgatgctttttctatatctgtcaggtatgacacctagcttaagggccttatttgcaatgggtccttttcctttaaactatttttaaattctttaatccactgctatgatattccaacacccatccctttaagttctcgctaattatgtcctctcaccaaagccaaattctgagctctgaggtaatgaatccttttcaaggtgatcatgtttagctctttaggctgcacacactttccagaaatgcccaagatccaggaagcatctgccagggagggtaaacttcttgaagtcagtagccggtaataggggcagccttgtgctcttcctctggggctggcgagatagcgtcatggctgaatttcagcttctcttccactgtggagaacaaaatgtcctcatggcttcaggtgtgtgagctccctcatagtctcctccttccctctctggcttctgtatgtcacaggcaggactgtgaggactaagtcagacagatcttcagttactatcgagtctcgttctagaaaaggtcggccctttctgaggttagcctcctagcctgcccttgtggcctccctgggatcttggctgacttttgggtatcatgttttctcatggatgaactgtaccctacagcgtagtctgtgaattagaagccaggaagttttctttgaccttgaaaatagggttttctctttctgtttggagctgtcctgttttcaaggcagctgcttccaatagtgctggtgtgggactctagcttccttcctcaaggagtgctggaacatttgagagctaccacgagggcatttcttagacagcttcaagcagcgcaagttgtcttgggtaagggcaggtactagacatctatatactttcaatttgggagaatcttagtattcctggaaatagttccttggtgatatagtggctggcagcctgacaccaaagcaagctgtcctccattgaggtaaaggtgatagggcagtctgtcactccagaaaggtccttcgaattacaaggtctttccctgtcctccctccagatctccccagaagggacctcacatttgtttttacacagctgtttcttgtatcaggccagagtgcgtccgagagttctgaataccattgggagggaccgtctgccacctcaccatctgcgggcataagtcaggggaacttgcagagagtctgaagctgagaactgggattttacgtctccgttcggttgtgctttgacacttttcccaagactgcacgtgatgaacacagctgcaagcacacaaacgtgctttttcagactttgggtggggagaggtaaaaactcaacctgttcagtccagatccagggcacttgatttgcataacaattaaaggctaggcaggctgtagcttggaagttctaccatgaacgcccttcagttctgactagctggagttctccatcatttaagcccctgccttgctctgtgtttggaaaagctcttcttgccttcctttggtgatggtcccatttgttgttttccttctgcacgccatttgatgaagcctgtagcgcttaccaggtacccagagcttcactgattttcttagcttgcactctgccggtgaaatgatacttctcatatctgaaactattagcgtcccttcgtctaggcagcacgcccctgctccagataaccaacagcagcaagcattattgtttcttctgtgctaggtttcagtaccctttaaatgcttactgactttctaaaacacgtctcgatggtttctccattttacaaatgatgaaactgaggcacagagagattaactccatttggtgaagagcacacatttagctaagcaataaaagtgacatgtccgatgaaagccacccagttgtacgagaggaaaaggcttataattctcatgttttgttgacatctctcagggtcacataattactggtcttgacctatgcttgtctcatctccaacaaaactgccttgttcaggatactttgcgactgtctttattgacagctttgatttgtatttaaaacaggctctagattctattctgaaatctagtgtttactaaaccacactattttaggtcccatggcctccattatgtatctgaagacatgggatggtgtttgtttgatttttcatacactcatgtaggagtctgattatgttgcttaagtgattttctttctacaaaccacgacttattttggccacccatactatgctagttacatggatacaaggcagataacggaaacgattgcttggtgagtaagaaagtatattaccaaatcaacaaatatgttctataacacgtatttgtttcagttacctgaaacaatgaaccattgtcctacatcagcctgatcgatgaatgaatcctacacaggattttaataggatgtcacttccggtttcctttcttgatggaagtgtagactcaaaagttcacgtgcttgagtgctggcctcttgttggactggggtgtgtgcatggaatgcagcgagggctctcagagcccctggaagctgcaagggcatccccttgcccgctgaccttcctttttctcacctgtgaaatggggaggttaggttaaggggcggcttcaagtcaattggaaagtcctcctgtgatctgagttgtggacatggctcacaagtaagagtacttggtgcacacacctgaagaccaagacctgagggcagatctcttggttccacttcaaagtttggcccttgatgtccctagaactgaaatccccagtactgtgcagggagcagataggagggttcctggtgcttgctggccacccgtctagtggaaaaagagtaacaagcttcaggttccatgagagaccttgtttcagaggaaagtggggagtgtggttgaacaggatattagacatcattgggtgcatgtacagatgtgtgcatgtacagatgtgcataaaccacacacatacaacacacacacacacgccacacacattcaattcctgtaataccatggctagctttataggcaatctataatactatttttgaactctatgtcccttatttttgtcgagtctttgtgtattgtattccaggtcagttagttccttcctggcatgcctatcttaaaggatttcagtgggggattcagagagaccctgggaacttaaatgctttggataataacccagtgaaagatgcattaaataacaatgacgtttacttctgtagaaagttagctgaaagctgttgggtttcccaccaccgcaccatgccacccctccaaaaaagagcaaagctaaaaagagagtttgatctcagactttatggaactcctcggaactctgcggtgtcaatagaggctttgtcctgctgagggtcaggttcccacagttggggtagggcaaccatgctctttcccctgacgttttatcaaacacacagaatggggcagttctttagacaaacatatggttttgtgtcccaatcacttccactttgttaaaagacccttcgaatcggagaccttctacgtggggtagcagactccagacacacatgtccccaagttaacaggtgccttatatgtttacttgtgtaaaccatcctacaagtttgtgtgtcctgcatctgagtcagtctctcactgagggtatttttagcacctccttactccgttgagctcctcttaggaagtgtgatccaaaagggtcagatacttggcctgtacttaggggaaaactttgagagaattcctaaggccttggccagggactggctttccccaaaagaactggctcttcacagcgtctttgccacataagggcttgtgtgaggccctaggcaccggttgacggctgtcttacccgtgacagatggtcaagacttcagtttcagcaagtgatccgatgctgagggggtaggcaggggattctgctagcaggccaagtggcagggcagcttaggctaacagtgatccaatgtgtgcccggcatagctttaaaggtgatccaatgtgtgcccggcataggttttgtgctaacgatgagctgctgacaggcgcccgagtcctgctcatctttgagacagaagatccctggctcccttgatgtttttctctctggcaaagccagtgtcctgtttgccttgtctttcaaaacccattttggcaccagatggaacccctcacggtggctagcagttgtctgagttcaggatgccagaggatgtgctgacagctccttctaacacaacctgaatctggctgtcaggcctgggctcaaatggcttaaacacgtacaggcggcaagtattaccaaccacagggagacaggcaggggggcccattggagggagactggcagtgatatccctccccagcttgttgttgccttgggtgggggatgataatcctatggttcccttagtatatattgctatagtttggatgtgaatcccacactgggaacttttataaaagctgtggcttttacacctctctgcaccacacaacacaaaatgtcattgtcgttagaatggggatcatccctctccggacctgggatgattttcatatagaacccagcccctgcaatatgagtatctcattaccactacctttagcatagttgataatgtctgaaagccacatgtaactggtttggtcaccttctgaggctcagaagaacagggcagtgtaagtgcctggttgaacgaggactgattgagcgagtggctgggaagctaacatgcacagtggcagagcagatctgggcatggaggaggcccagggtggattccgttctacacagctggactttagcagtgagtcattcatcctagacagaggtcgataagctttggcctctgtggagaggccctggaagtaggggtgaaccattatcagaggccttctcattgatgggctttgggagttgtgtcattctaaatgacttcatttaagaagactcttacactgctaagtcttatcattttgtttgaaaaagtcattgtttctcttcaatgctcctacatattccctcccattctaagggagcaaggagaacagttattgttctaaaatgtgtatgtttgaatgtggtgtgtcttcatgcagtgcctttatgacagaggatcatgggctacattgctgacagacatttttctcaaaactaaattcagatggacacatcatggaatgctagttttgcataagttattgatactgacttgatggttttattctggtggggctctaaagtggggcaaaagctaaagacgaaggtatttctagaataatttcattgaccagtattttaatgcattccatagagatatcttggctctaaaagtagaagagtatgtagaaaatagatggacataaaaatcctctattactcccagatagaaaacagatggaggggtttaatggaagacgaccagtatgaatgtcccagtgcaaactctccattatgggcttgtatcactggagtggttacttagtgggaccaagttctgtatcccacacatcagggaatttttgacaattaaaatacattcaccaatttaagtgggatttctttaaccaattggagactgtcatctttacaaaacaacagcaacagcaacaacaactataaccaagcaaaacctgtcgctctcactatagaacttattcagaaactaaggtgggtggagagacaggaaggtctaagttcactcaaaaatagcttttgtttaaggcatatatctgagaaaaaatgatgtggcagtattggagaagttggaaaggtttagtatgtcattccttctacccatcccagggctgctaacttgaacattttattcggagatgctaagatttaaagcatttacagtctccttgcatttatctagtgtacactttgccattcatcacctgtgaacttataacacgtaaattataggctgtgcttggggaccatgggaattctcaattagatccatttggaccccatgttaaattatgatgaagacttgctctctgaataaaaacactcccttgggaatttttgcttcttttgtgagatctgttggtagtttcagagtgttcatttcatagaaaaaaaatgctccctgggatgcaatatcaagcaagacttgtgcctcaattataatatggattctaatcccaccctgagttttgcaggaaagccaggaagagaagagggtgtgtaacctggaagcgatttctgactctgagttccttgttaggattgaaacactgaccacgatctttgtttctccacaggttcttcctgaagtttttccttaaatgcaaccaaaattgcctaaagaatgcaggaaacccacgtgacatgcggagattccaggtgagtccctcttgcttttcttatatcttaatcatgacttgaacatgaagatgaggggaaaacatttttttttcttttctttctttcttttttttttttttggcagaaggtatggaggataattgtttctctagaggtgaagagcaggtgaggctactggtccccaggcatctctgcaatctcagagttgtttttgttagacaaaaattggggctgtaccacctgcgcccactgatgaaggcagctgtgtccttagagcctcatcttggcttcctgtatggactcacgtgatgagacaggcacagattaagtcaactacacagagacgatggctttatttgctaaaatttttgtaagtagagctttgctgaggaagagcaccaggaagtgacaccaggaagccccaccatgattctctactgtctctcacaatctcagcagctgctagcaccaactacagcttgtaagtggacccttgagaagcagaccatatctataccctctgttctgcttcaggaatgcccctgtaccccacatgtacattttaataaatatcttccagatctgctgccgtttaaagcacactaacctgatagaatatgccaaaggactgaaaacctaaaatcaaatggagtgacatctcaaacacgggtgttttaagaatgctagacacaatactactgcaactttacgtgttgagaatcccctaggaccttgttaaagtactgattgggatgggggtagggtggggctggaattctatgtttctaacaagctcccaggtgacgtagaaccagggaacagatcgcaagtagcaaagttaagtcccggccctgcactgctctccgtctcactttgtgggtaaggtatttgccctgtcaacgttattcgtgcttgctcaacctgtcacagagacagcttgctgttgaaagtttgctcctacgcctgtttggtcagctcaaagtgcagtttaaagtgtataggctccaaaaggtgcttgataaatttcagctacgggatctctgaagggaaataaggagtttctgagcattgattgtggatgtcaatatcatagtcttcaaaatgattttttttaaaagaaagtgagacttattagtctcattaaagaataaatcccgtggaaggatgttatcgtctcctgagatcttagagaatttctataaaatcatgttagccttaccacatttagtcttgatagagctgtatctggagaatccaataaagttttagtttcttagaaaccatttcctgtccacctctgcctgcaaatggtgatgctactgttttcaaagtatcttttttcagcttatgctatttgatagcttgctgcagttttcagatgtataattcctttggtcaagtttgagtaaggaacaaatatatacaggcaatttgaatgaaacaatttgtgtataataatcatgagtttgtcatcatctatactatatccctcagggcagtagaactggatggactttggtgatactgggggttgctgcttgaagaatatttatgtagagttttacaggacctgctagtgagtgtgggtcttagaaatatagctctgaggcaagacaagaagtcatttcagtattttctttttgagcattgggaaaaaaaagccaccacttgtttataagatagtgtataaatgataaagtttggctttgagggaaaatttgagggataaatttaattaagcccttaatttaatctagaacttcttaacttgggcacagtgagtctctctctctctctctctctctctctctctctctctctctctgtgtgtgtgtgtgtgtgttgtgtgtgtgttctgtgcattataggatgatcacttatatcacagtcatggaatagcaatagagaacagcccattttccttcacatgactaatgaagggtctctagacattattagatgccattgataagaagaagagagacaaagtaacccctgatggcaagctactggttcttccctacacttgatgacctttgactaagttcacggtgacaacattggtgctatagtaactgcatcctttgattaggaataattgtcttcctacccaaggtctatactgacctttaaatacacatgactgatgtgaatgctggcagcgctcttgcctttttgacccccacagagattctaaatagaaagagctttctccaaaggaatagctaccttggccaccacagacacaagcccaggattcagagaaattgtatctttatcagccaggacaaacttcttgttggatcttgggttcaacctactgtgtttccatcacccactctgagcagtgggaactgtgggctgaaggtctttgaaacctggttcatggattcagtttagctgtctagttgcttggttgaaccttaagcctatgacctccacaatgaactcatgatctccctcatttattttttttcctctccttgtcaaactggattctcctcctttcttctctgccatggtttatttctagctaactccattaatttctggtagatgactgttcataccagtatctgtattcatttaattccatattcatatgtgtagatgctatgtctacctttaaatatatccatggacattgctgttgataatgatgataatgatggtgatgatgcagaagaagatgaagctaacattaattgagtgcttatttcatgacaggtataacgtgaaatgttttacacgaattatagctattgtcagagcatccctattaaaaacatgcaaatatggattattcccatttcagcaagaaaaaagtgagcttagagcagtaaaggagttctgttgaaattatatccctgtcaagtggaggttcaagtcacacactgtgacttggctattacctaatgctttgggacaacaaagaacttatccagagtctgttgctagatacttggtgaggcaaaaaggatatctgtgaacatccaaaatccatatcaacaccctaggaataactgatagaatcgcaggagagcttagaaaagtcttcccaaagagacttcatgcatgtggattcaacctaacccaagttcatgaaacaggtgggctacagccctgagtagttcctatttgtggggaaatttggaaattcagcaactatatgagcataactcttgccacaaatggcagtttggaccaattctctaggacaagaaagccccctttgtgcattgcaatggagtggggccgcccttagacatctagaggatcttgaatttgaggttcccaaatcttagaatctcaggatccaaaaaagggaagggtgtgtacaagtgcacgcacacattcctgatagtgactgaaggttccctacaaacaagggatatttctgtctcttgttttcatagcagagacattgagactctggttttatgcactttttatgtccctgttgtccatgagaagaactgaaaagggtctctttggtatgaacaactctgatccactctttgcatataagtaatattgaaaggccaacttccagaaagtactgacagatgcatccttcatggcccaagagatggtattcgtcagctgtccttgatgtggcttctcttttgtctcttttgtatgtttccctcatcagtcctatcttcacacagtcaagctactttgtgtctcctcagaagagcaatcagagacccatgtaggtgtcccagaaagacataagaaaggttgctgatctcctgacgtgtgaagacattctgtaaggctgacttagccttacagtggctgaccttctgtgtaaacagagacttaattacacaggtcatgtcaattagtgtgacctgagtgttctaaaaaattaatcactttctgaaaagcttagggagtgtggcataagccttgtagaaaacttggtacaatctctttaaaaaaaaaaaatggatgtcttctttttgaaatccctaggctgcagttaaggtagcatacctgcttaaatacaacagtggatacaggcttcatttagttgtggtgggtgtgggggaagggcaaaggaatgagaaggggggcaaattagggctagaaacagctcacgacacagggagcaattcggtgtgactaaatgagcccatttctctagcctgacagtaaaaagatgctaatgttaagggaccatgttaaagccgtgtcacagtctggctttcaactgacaggagccagacaattcaaggttcagatttaaatcctggtccccctctttccttgctgggactggcagatgagagcggtgaaggaggagcaagaattgggctcaagttatcatcagagtagaaaccacaagactgggagactgaagtaaaatataaacttccaaattcatcttctcccttcagcaaagttttttgataggccataacttctgcatctgtctaaaaatgcgagatctgtgacaacagcatatatgaatatagatgtaggatatattctctcgttcatgtgtgcaagcactcagcagtatttattagaatgctaggtggtaagtctataatgacaaatgcaaaagatagagcctttgctctaataaaactgatattttggttgggggtgattttagggcaagagtcactcctgtaacttatagaccaaataatatatcctggctcacacgtagaccaaagaatttctaatggctcacatatagtagactacatgctggtggtcatgctttgaagaatagattccccccataatattttagagtctttttgtctttatggaggcagagaggggtgggggatgcataaacatagtttacaatgtctttagagtcttggcttagaaataggccttgtcaaacctactcgttttctattggctagtagccagtcacatgaccagtgtgggaggtttgccaatgcctagtgataaagcaggaaggagagaaagtaaatgtgtaaggaatgagtttccattagctgtcacaatgaagatatgtaaagattaatagttataaataatgggaaagtgtggttactgccataaagaacatgaatcaggatattctgacagagagagggaaaaaaatatacagaattagagatggcatcctaccttgaagtgtgagatcaaggagggtggtattgaaggtcagagcttcgtcttagaagtaccacagtcagttcttcacacccatggattttccttctgcaggttcaactaaagcatcataaaaaccatgcatatgagctgaacatgtataaaactcttttggtcaccattccccagatgcgcagtatctcataatcctagtgtccaatagtctaagtagagatcctttaactatatgggataatataatgctaatgcaaaatattgccattttaaaggatctctgctttcttgtatgtgtgtgtgtgtgtgtgtgtgtgtgtgtgtgtgtataacaacttttcgcagataccaagagatgactttgttacatcattcttggaaaagccagaccagggccctgagcagagcaaacaactagaacaaactcattttgtcctgtctaaacattcttccttcccttcgtcatttggataggggataaaagaagtcattaggttatttatctcagatttctacaacaaaaaaaaagtgtttttcttttcaaaactgttttgacacaggttatggcatgaaagggcaagtttttaaagtgagtcataaaatggagaattttgttatttgctttaaaaagccagggtcttttctaatcaatattttataggctgtgattatagcattcgtattatacacgcccatggtgaagcagagtgcttgaaagtcacttaacaaagaaggaagcattttcttctcctttgtcctccctacttccactctcttccccacttgtatccactgacaaaacaatccatcttacaatgaaattctttctcaacagaattctgggagtctgacctccctcccccttcccctctcccttctcatgaagaataattccaagaggtagcctgctgattaattatactgaaagcaactctatggtagcttcagaaaacaagattaattcatgaaacatggtcaaacgtgaggaatcttcaacctggtctatgaaatcatcacagctcgctgggccaatctgtatcttggcatacgccttgttctgagccttggcagacagtatgcatcactgacaagggatccttgggggtggggcttgatgagaggtggatgtgcacttagcagaagtagctccacattaagtatggctgcctcagaagaaaatgtaaaatgcaaacaaagttggttgtgaagtgtttggctggaccagtgactgcctatggctgttgttcctggagtggatattggcataagagcttatggaccaaactattctacttttaaacttggaatttagcaggctgtggctattctttagtcctaattgatcctttaacctctctcttccgatgttaggtattaaactccaaaactaaaccaataggaactaagatctcgaaaacaaacaaacaaacaaacaaacaaaccaaaaactggtctgcactttgtttattgctacttctctagtatatgcaataatatctgacatacaacacacacaaggtagactcagtttattcctatgattggtgtgtctgtggttgcacactagtgagtgatgggcttggaatccaataacgactatctgatcctggaatcctagttgttgaccagagttactgtgtcatgttcaagtccacagatggtgcctgacctttctccctgtttacttcaatgaataagcacagagtaccagtgaagtaccagctacaccatcagaagtcatcaggaggtgtctacacccgctgtgtgagggatgagagttagcacaatctcagctcagaagccaggaaggccaggagctgatctggtttccacaggtttccaactccttctgtacagacgggaagtatctgctcctgtcatcctctccagagagaatctaactttgccctgagcctccagcctagatttaattcagttagcctctctctgcctccagcagttccactctgttacatcctggaggttcacacgtcctccataatttttaatgacttattggggaatctctcaaccagatagaaactagcaatcaggcacatttctgagaatatctcatttcttatcagtcaaggatattttaaaggacgaagttaatgaagacctaactgctgcagaccatttttacgtaaataatatttaaactgtcaccaggcacctccaaaccacccatttgtattggaaataaaccagtgagaaaggcacccaggtagactcaagtcaggaatccacaccattgtgagtgagaactcattgaaaagctggacgctttgcttcaggttcacctatgcttagaatttgtcctctggctttgaggtcacttcaaaataccccagtattgccatgatgagcagtgttgtaactatagaggatctgttaccattttttcccataggaacctccgtgatgatattacttttcaatctgatggtttttatagagaaaaaaaatcatacttcctattttaaaatgatttaaatgtaaaacctaccagctcagagatgatcacaagcagctttcccataccgtgttggcatgccctcaaacaagttaccaaatacttgtatgcagccttattttcaatatatcattttttgtatgattatgggctggaattggtatgtgcacatggggtcagcaacctgtggagcctggaggtgtcagattcctctggagctgcagttgtagatgctggaaaccaaactttggttctctgcaagatcagtaattgatcttaacagctgaaccctcttttctgccccagtgcagccttatgttggatgtgtttggcctctcctttttgcagtattgttcccctttactatgcttgagaactctaagccagaagccacgagtggtcttgagtctcttgtgattccactgtttgctggacctgctcaagaagtagtctttgaagaacatcagactattttatacaataatttaaagtttgcaaagtaacgactccatggaagttcttatatgtagtcacagtgtcattgccttggcttccctacagaatgatacattggtggtagagtgccaattccaggttatcaccaataactgaagcccaaggctatggcaggcttctctttgcattgtaagttcaagagatgagaacaaacaaagcacagctatgtatccagcaatacactgttatacaagatagtgtcactgcccaaaaattctgtcctctaccaattgattcatgcctcctgcccccactcctggcaagcactgattttttttttacagtctccatagctctgccttttgcagaatgtcatttacttggaatcatacagtatatagcctcttcagattggcttttctcccccatttggtaatatgcatttaagattcctccatgcctttttgtggtttgacagctcatttctttttatcactaaatgatatgccattgtatggattactagtttgtttatccattcaccctttgaaggacatcttggttgctgatgtcttatatttagttgaaaaaaaaattgatgtaattgtagaggcgcacagagttggtatgagtagcattgagaggttctcatgcatttgaccagtctccttcaagtttttacaacggtatagaacaatattagagccagaatagggaccttgacagcatctgcccatcttactcaaatctccctgaatgtgcttacactcattcctgtggggatattcttcagttctgtaaagtttcattgcaagtatatagcttcacctatctaccaccacagtcaacacattgagcatcttcttatccaaatcatgtctcctcttgcttttcaacagtacccaaccccacattctttctgggtgtcctaatgccctttattggtaggaaagtggtaacattggattagggcccagctcaatggcctcatttaatgtaataataaaagtcctatctagtaatcccaccattctaaagcactggggactagagatccaacatatagatttggtagtggtgataggaaactttaagtcctttggaactggttggttttttttttttgttttttgtttttttttttgttcactctgcataattctttggagattaaagcagctgtaccagtggttttctgctttttcttcctttgtagtgttccatgaattgtttctcagttactttttcattcaagtgcttcaagtcactgttttctcaatacctttgttactgagctgggggagatggttcagtggtcaaagcatttgtccagcaaggaagaggttgagagttcagatctccagaaacccatgtaaatgtagggtggtaggcatggtggcacacctgtgatgccagctggagaaagcagagacagggagaattcccagagtaagctgtctggtaagaaaatctccatctgtgagctctgggcttgattgagagatcctgttccttaatcagtagaaaacctaaagatgagttcaatgtcaactgtgacctccacatgcactggaatagttactaaaacaaaagcatgcctgcacacacatgcatgtcacacacacttttaaaaaatttaaaaaaaaactaaagaaaaaaagaaaagaaatacctgggtattagagtcagctattagagtccatagattaatgcaaaaatacaaaaagctgaaaccctagggaaagaaaccatgaaccaaaccaactgtgctaaacatttccttctatggagttaccacatgtaacttgcataggtacttttgaaaagtaaggcttgtaatcttccaaaattaatttaccagagtgactaatttatgaagaagaaaatatgttttgccatatattataaacttaaacattggcagtgctttgacactatgtgtgtcctctggctttattccagtttgagaaatgcacagggataggaattttgagtccttgtattggtcataattgcctgctccgtgcaagccactgctgctgttactgtgatcttctgcctgcccaccattgagtttagcatcttgtgtctgttttgaaaatctgctcgtgggtctgaggttctgcttcatgaatcttagatgatatagttaggacttacaaggtctctcgtgtgatagggaacgaaggacagcctgagaaatgaggaaggagaactcccatgacagaactttctagaaatcctgcctggggagaaacattgggaaaactagactactaagctgtctgttttgtggattgttttctaagcagtgaggtttcacttagtgtcaagcttagaatgtagcaggctaagatggagatgtcttctagaaagtgaaattattcaatccagtaaggacaatttgctagagtcctcagttgtgtcaactcatgtcgtgagaataggtctttcaaactgggagatccgtagggctgagggcatttctctctcctcttatttaaaatgccagtttcctttgagtccttttagtgagagtcgggaatcactgtgtcaggtgagctttatcagtccaatgctggtttggtcttgcctgagaagtgagaatgctccttccctgctactctggggatcaggagccaggcttaccacttggacacattcagcctcacagaattagctttaagaatgggagactgttctaaataccattggagtgtcagggactgagagacaggaaaggtgcattcaccttcagctggtggccaaggttgcatccgtgaaggaatatagctattttgtgtgcaatccttccaaactctaaagtgaaggagagactaataacaatgccttctggggtttctagatcccggaaagagtgcactaggtcagtttatgagctgctgataacacaccaagaatctaaaactacagtgtaaattctcaggaaagctacaggtagctgcagacctcccctctttcttgttctcctttcagcctcatagctaataccttcacttggagggcaggagcccagcagaagcctcaggaccatgtagcatagcaactgcatccctgaggatactgttatgaagagtgatgctcctgcacacatttcattttaaaaagccccctgattaacacacacacacacacacacacacacacacacacacatgtttagccctaaacctgtatttatttctatagatagaactcaacctccagtatgcgtttgtgaataaaatgtcccaagtgattacagagctatttcagtggaatgctagccagttgaacatcctggggggtttaaaatgctatgtttgtactgcttagtccactggcccccagtgcttgaaatgtggctacttcgactcaggaatggatattctacctagtgtaaatttcaatagccaccttcggacagtgaaatcataaaatttggaggggctgattccaaaagagtaaaattgtagccaccaccatcattcctctcactctgggaagaggagtaaaaggggaagtataagagactgtgaggtttgaatccaaaaggaaattagttttctatgttttttactgtcctaagtttaaggtgcgttttactgacaaaatgtggacaggctgtgggttcctttacctgccttcacctgccagcagctgactgatgctgtgttgatcgatgaggcttttttacaatggggctgtttgcccacctacaatggggctgttttcaaagttagcttggatttaagttccagcccctctttttcatctcacacattacttttaatttactagtgattctgtgggttgatttcagaaaatactttgtttaagactttcccaaatcatttccagattggaatgggggaattattttgggcttgggaagttgagtcctgggcttttgagggacatatttcctagttagttcctaggacgagcagcacagagatcatctgtcgccgttgtctggctagggttgtgctttctgttgagtgaccctgtcacacaggtggctctgtggccttgccttaccaagaaaagggaaatgcagatagtctagttttctctcttaacaggcttaggggtggggttttcttttgacattttttatttaatgtcagaagttagatgacaatgttttttaaaaagagagcagatgttttaagtgtcttacaggtgctgggtaaagtgctattgctctcttctccgaggacagacgtctggggcaaccactttccatttcctgacactgcaaacagatactgtttgggatttccttttatagcttgttcagctaacgactccagtgaccactcaattgtggtcttgtagtaaatcaacatttctttgaaagacccgggtcttatgtaattttcagtgtttttacaaagccatctccctaactaaaaagtgcttctgttgtcgtgacgatactgtcattgcatagggtcgggcttttttattttatttatttatttatttatttatttatttatttatttaataaataggttgttttcttttcttgtgccctcactttcttcttttaaattaagccaggattgatgagggacaaacactggattcagaccctgttacacctggtcagctagtgatgaatatacagagcacacatggccaactactgcatcaatctctggtgtccctgtgtgagtgacttgctctagatggaattttgactgactgaagagaacactcggggtctgtggtagattctgaattgtcaagtgtgcattttaataagatatttaaatcaactctgggagccatgtgtccatagcctgtagtttatggccagctcttagggaaaggatacttgccttatttcccagagtgcttttggatgaaaatgagggacataggatgttaatcgtaaaaggtagccattcagtgttaaaaatggacagttctagccgggcagtggtggcacacacctttaatcccagcacttgggaggcagaggcaggcggatttcagagttcgaggccagcctggtctacaaagtgagttccaggacagccagggctacacagagaaacaaaacaaaacagacagttctggacaaggtggcatgttttgcccctgctcaaaaggcagagaaaccataacattgctcaagagtcttagaagcctgcgtcctcttagtcaatgcagagaaaaggctgccccagaagtaaggtgtaccaagttctgtaaagcctttcacctcctcagaggctgatgcctctcaaacctgagaacaattaaacggagagtctttccaagcaactgggggattgaacagaataactcaggactctcctgattttgctctggaggctggcctcattataagagcagatctattagcgctcttgcccttgtctttcatttctcaagtgaggtgattctaattaaattaatctgcatgtcaatctattggtgatcaatcaaagagcctgaggtttcccctatgctgctgggtgcttgtggctgacagtggctgataatggaggaagaaataagctagcgggcaaagttaattagtcaacataataggtggattaaacaggagctggctgattgctgcttcccctgtcaaagcatgagttgggagccaaagctacgattacagacaattattatatttggttgtaagaggtcacatgaataaacatatctctgtggggttcagttttaatccccctcccccttttaatataaggagatatgtaggtcagatctgttcattgttttagtcaaagttctcagaggcacaccttttcctggacccttgtggcgaggtgcactagtcaccattagatgtagcctgagcatcttgagttggcatcggaccagttctgtgtttttcccttttttctttgaaacagatctaagaccccctaatttgtcagggttccttttttggggtggggatgacatgatgataatagctctgagggaagtttggctctggttccctaaactaaaactaacatgggacaaaagaataaaatgtctgagaagcttcaataagaccccagggagaggaaatgcaggcagaccccagcttccactccaacccttttcatttccctatcttcttaaccctgacacagtagggaggatatattttaagatttaaaagacttttatttgcatgatctactgtgatatctacttcagtgtctaaactgaagggtaatttaggtgaaacacagctacccttgtgatatatatatatatatatatatatatatactgtgctaataaagaccgccttgtaaaatttatggttaacagggtaccttttgctgtataagtataaactgtgcaattttacttaaaacagcatcaaaagcgttccacgctgaagacccactcatcaatagtgcctcttgttagacgtgtacgacataagcaccagttattatgtgaaatagctgtgcaattttcttcagctcccagctgttatttatttaacttgcgtttatttcccaccatgcttttatatgaaaatgttcattcatttccctctcctgtctccaggtcgtggtgtctaccacagtcaacgtggatggccatgtcctggcagtctctgataacatgtttgtccacaataactccaagcacgggcggagggctcggaggcttgacccctcggaaggtacgccctcttatctggaacatggtaggcgaatcattttcattggttggcattgctacttgtgactgtgactttgtgtgatttctttccttcactgcaccacatttcctattgttacaaattttgagtgtcccattgaacacctctgatgctttttgctctttaaccctggacaataagaagctgaggatttagagaaagtggcatatcttttaaacacacttgttttggttgcatgctggactatctatgttggaatgctaatatgtctctctctctctggggagagagagagagagagagagagagagagagagagagagagagagagagagagagagagagagagagagagagagagacctggaccatggccattgttttgagctcccatttgactacaaactgagtaaatctgtaggtaataggaagaacacccccccccccataaacgtgccagtgcatatttgtgaccacttgttgattttgtttgaagatcaggtttacagtcaagggcatggtaccaggccaaatgtccttcctatgcctttaactcacactgccaacaactccctctttatcaccatgtgacatagcttattttctgtaggtagactttggtcagggagaactcactacccctgaggactgtggtgaatcattgatacccagaagaagactggaggaaagagaacgaaatctgtttcacggaaagggagtattactcagagaaaatcagggtgagcttgattgcccactaaacagctctctgcagggtctaggctataaatgcatctttccaccctcccaagattccactgcattcaaagcgtacaacacttcctcaaagctcatcagatgaaactcaacctgatcctctccctcttaccatttctcctgagctaggtcagcagggtccttttgcgaacattgccatacaaattatcctcccaaagtctgacttttactgtggcctacgagatatccatgacataactcattaggtagaaaactcccgttcctgccagcatcccaatttaataaacacacccctgtcatcatttttgcctgttttttttctacctgtgcttgaggaatgcacaaacagtacatttcattaattagcccgatgtcatactcttagaaggtatttttctccacacctagttttatagtctttccaaagtaaaccatcatcgttccaaggctgaggctttatgtttcattagtgctgagatggatggatattacattttgcaggaggccattcgaaacacctgcccatgattacatccctagctccacttctgtacttacaaccattctgatcctcactttacagtaatggtgcctccttaatacccttggagtcacggaaggcaatgtatgactatgggtgcttaggtgagaggaagaaggaaaacttgataaatactcagcaggcacagtttggagagcctgagtcagggatcaaaattgttgctttgcctctggctggttggttgcaataggagcctcctgatttggagacaggcttaatagtcagctgcatctgtagttcatggtttcagaggaagctctaaccacagatcccatgcctagcttccatgcccagctcccatttctgcccttaggaaataaggagagggctggcaggagggatcagtcaataaagtgtttactctagagaacctgctttcaaccttcagaccccacattaaaaagccaagtgagataacatgcttataatcacatctctggggaaacggacaggcagatctcagagacctacaagacaggcagcctagcctactttgtgagtttcagaccgacaaagagaccttgtcttaaaatcaaggggaatggcaccagcgaaactatacctaagattgtcctctggccaatacacacacacacacacacacacacacacacacacacacacacacaccacatatacctgaaaatacgctttcaaagaaaatggaataacctcatgacaccatactatttattcctgcaaccaagattccaaagtaaaagcaaccagctaggatggatgcctccaaagaggtcagcgacacttttttgcaaggtggtggtacagagaaagaagttgtggagtaggcactagcaatttcagattctatttgttatctcactctggcctctggccaaccctggacaagtcagtttagtcttagggtcctttttttcctcttggtaaaatgaaggtggctatctgttagggataaaacaacaggtcgtttctttgagtgagggaaggggatgtggataatgggggtgggctgggtgaaggcagtgaagactgacctggatgtcctagctctagagtctctaatggggagagagggggccatatgctccaatttggcaaggaattaaagctgtcctactttttaattactaataactaattactatcatttaataactaatgatgaatatttaagcatagaagggaggagatgacactgaggaagagggctgaccactgaggtctctctatcaaaacatatccaaatgttgtcttagctcaacttttccctctttaagcatacagaataatgtacaagctgggacatcatcttatccccagactgaaggaaagtactttcctcttctttgtttacccatctacaaagaatcttattcaaaacggtggtgacatttcaatgcagaacaatggctatctttcactggagaggtcactacacactgtgtccttcacactcaatcaaaccctgactctacttcccccagtagaatgaaaaggtagccatgttcagattttgaataccaacagtgcagcaatgcagaaatctgattttctacagagtgaattaagtagccatacatcaacacccactcacttagtcacttcaagcacatgcataaatatctactctaccaagggtgactattgaattctcttgctggtaatgtgtgggagtggacctacatgcgaattcatgttggtttgggggggtaatatttctatctttccattggaaaaaatcatatttaaaataccttgtttaaggactagccccaatgcatgattctgtcactttgtcctcacaatgtgtcatcacatcttgagacctgtagattcttcgtcatcccccattctgggtcttttccctacctcatttacaggtagcctgaattattttgagcaacactgcacatctctattcatagcctgtttgtaagccactgggaggaaagtcccttttgtggccaatctttctgcatttctagaaaaggaatcaggaatcctggtttatgtgcatacacagtcttccctggacagcccaggcacgcagaactccggggctcagattaatgtctctggatttcaaatatgagggatgacaaaggcagatttattccctagaatcttgcaggatccaaagaggctggaacttggaacactgtagctcatggtaattgcccccctccctcccattttcctctccattcataaatacgaagattttctgtggctggatatttatagctacatttattgagctttctgctttaagcaatggcttcatggaagatgtacagttgtggagagagggagcctcacacgcaactgctctcaggattctaatttctacaaaagcataggttggggaccaaggggcctgcatggtgtccactgtcaaacactggtatgtatgtgtgcacctcatcttccaatccagcggctcaggcaaatttgtagggactgcaagggagtccttgaaagggcttcagggatgctgttattatcaccagagttcaccttgagcttcaggttctatttacttgaatttaaggccaattgtggcgtcagtttctctctttctttcccctgtggcaagatgctgtgtcctcacagtgctggagtgcaggggccctgtcagcttgcatgcgctaacactttattatctaatgatctaatatgcaacaaggcagagtgcctgtgctcatcatcctgacacagaatgccgggagaagtgactaaattactttatgtgccattagcgcaggcagctatggtgaactcaccggcagcatttatgcaaatgcctgtgaatacactcgagtggctttgtcagggcgctgtctgacaagcagtctaaatgctcattttttaggatatatatatatatatatatatatatatatatatatatatatatgaaatttggacatgcatatttttccccttttctgtccctttctttttggagactcttagatgtctttcatattatgtgacaactaaggaaagcagagaagataactaaagtcccatctgtagggtctttgccaggagtggggtcatctctgctggtggtgttttttgcatattgggtttaaaaacaaaaacaaacaaacaaaatcaacaacaaacaaagaaacaaacaaaaccccagctcttatgagcttgtgcaacctctctttatatttctaaggaaagaaaaacattgatgatattaattgagtttttcataaaagaacttttcaatagtcatgagttctgaccccaggtcctgcgctgctttgtgactcaaatagagattgaaaacgaaaacagaaatcaaatgtactttttaaaagtgatgaatatttagcatttgtggtcattggatatgagtgaattaagtttcccttcaaagcagttacagagatgaaacgtgcgaacataacagaatcccaaaataaaagaagtcaaaataagactgggctttggttaaactacattttggagaataaagaatggtgacaggctcaacagatcatgtccccagttgtaattacagctttataaggactaaaagtgggtctgtgccaccaccagtcagctctgaccttttggtcccctctccctggcaatatgatgttagtcttgctctttagtatgtaaccttcttaaagcctctagcttcaggctggacagtttttgcttctgtttcttgcctcagggtattcatcctcactgtgtgccctctgcccagctgtatttaaatgtgttgtggacatgtggagaaagatgatgcagagtttagagaattaccctagatagagaaaaacctgtgtgataggaccctgggtggtatgtaggagaattccagtatcctgaaaagtattttgaaacatccaattgtctggctggagatttggagtcagagtcctaactttggctttacgtatttgtgtgagtttgggtaggtccctttgtttatgtggatttcagttgcttatatgcccacttaattggatcatttctagactcctttggaaatctgaacttcagccactggcctttctgtagcagggggtggggggtgggggttgaagaagtcaggctttttttacaaagaactccattgtctagatctctagtgaatgaagaagatatcagtgaagtggatttcaaactatttactcatcataagcatctattagatgccacttactacatagagtagcacggggtagacatggcccttgtcttggtggagtttattatgtagatgggaaagagagacagtaaacaaaactggcaactaaataattatcctagagcatggaagactagagaagggaattgctagaggtcagggaaaactttaaggatttctcatttatgaccaaactcgagagacttttacaaggaaaaggaacagtgtgggcaaagatgtttggcttgggtgacttggaggaatcagagagtgggaaagatgttgctctcaggcaaggggactgggccaagccttggtctccctggggcaattgtgagatggtatgcagggccaacaggactttgatgaactcagtgtcaattatgtggccttcgcctgtctcatgaaagcctggggcaagatggtgccgagttgcttataactttgctctcccctactggggcctcagaagctcacctgggagttggctgcgccttggaactggctgcctgattacttctcaatccatcaggagtgtgagagtttgatacagataacccagtattttgagagttctttttgcagacagttttgttttattgagtttactttctcatacatttcatagaaagatttttttcctgtggacgtcattgtgagggccttggagaccttcacgtttagaaggaagcgctgtggcatcttgcaagatgtatattgcttaccacggcccactccgaagaaacctaaatcactgagtcaataaaaatgaagtaaaacaattgagaaaaatgtaccttctcaattcagtaatttatctaaaatcataacactaggtagaattcaacctgggatttgatcctatgtcttctgaactgtatgaaactgaccaatgagtttacactgaggccctcttttcaagcacataggtatctactatagtgacaagaaaaccagggttaaggagaaagacatttgcccagagtcacatagcaggtaacttgtagatctagggttcagatccacaaacccacgactccgctctctgttggtactctctgcatgtgtgttaaactagtttcatctcctatcctgttgaaattattttgttttcctctacatgatttaaggcacttgtgttactatcttaggttttctaaagttagcccagatcgtgtgtgtgtgtgtgtgtgtgtgtgtgtgtgtgtgtgtgagagagagagagagagagagagagagacagagagagagagagagagagagagagagagagagagagatgtgtgtgtgtgtgtgtgcgataacgtaactggtcatcattttggtcaggctggcaggatcgcggcggacatctgcgttctgttcggcgagcnnnnnnnnnnnnnnnnnnnnagagagagagaggtgtgtgtgtgtgtgtgtgtgtgtgtgtgtgtgtgcttgctctcacacacacacattgtgcatgtgtgcaggcctccaggacagtcagaagagggcatcagcatctttggaacaggctgtgtaggtagcagtgagcctcctgatgagtgctgggaactgaacaggagtgcatctgctcttaactacagagccacgtctccggacgttgatctgttttctataacactagcaagagcaccaggaggttggtaacacctatttccctgcagagatgttcagagtcagctctcattaagtaccttgtggattatatggactctctggcatatatgaggtggggaaaggagaccgtgagaaaaccaagagagcattagaaaacgtgtaagacaacagctgtatgattaggaaactccatgctaggaacaatatggaaaattgaagggctcaaagcctttcttataaaaatgtcttggcctactggtcaactgtgggaaacttccagcactcattatttggttggatctaataaatgagcgaccgcacttattttaataagttcactgtgacgtgttcatttgaggagtggtggtgggggtctgttcttgttttggccagagatgacaaaacttttttgaagctatttttttgtttgtttgttgttctgtatttgatcaatcatgtgtcacaattccaattgtgttcatttgtatagttcattgttccaagccagggccctccgttgctctggcttttcattggagactccctcatgtgagaattcaaaaggaatcacgcagtggcaatatggaaataaacacttccatgtcctgttcctaagcccctgtttataacgtggtgtgtcggaacagttaggcctgaagtaaagattcatttgatttaattatatgttttttaatgcatgtgtttctgtatgtgggtacgtgagtttgggtgcctgaggaggccagagcttcaggctactctggaggtgtagttacaggcagctgtgagctaccagctgtgagtgcagagagctgaagttgagtcctctgcaagagctgtatgtgctctacaccactgtaccatctcttcaatctctaatttttctctttattttgtcagttttacttacggaaatttgttaagatggagctttctcttgctttcatacatggctttgaggatggactaggaattctctggccctttgtcccctcatcattaagtggaggtttgggatcgcccttcaagctctgatgattctgtgagaatgtctctgacttcgtgaggaactacagacacagcttttcggggtagcgacccaaacaccgaggtgatagttctgccgagttaaactcacaggctagcatagtcaaaatgtcaagctttcagttcagtgagagactgtctcaaggggatatggcagaaagtgagagaaaaatacccaatggatattctgcttgaccattcgtatgtaggggcatgcatacctgaacacatacaaactcacacaccaagatctcattaagcagcctaggctggctccaaactcataatccatctacctctgtccctgagttgcagggtacaggtatatatccccatgcatgacttaagatatcttacaatagctatatgcctatcttaatccattagggaaaaaaaccacagctgttacttcaaaacggtgatctcatggacattagtgcttagggtaagatcaagcttagagaaagtattagatggttaaaataaaaatcacaactcgataaaatcaagtaagtaattgcctacatggtactggaatgtagcaaaattatgacttaagtttgaagcatgctgttagaaaggctttaaagataaaaaataataattcattcaatttaataggaaacatgtaaggccctgggaaatattcatttttattttttcccaataaaccctgtgtttttgtttgttgtttgtcttttttttttgttgttgttggttgaaagaaagctttttaggttcattttgccattaaggtagagtttctgttctagagaaattctaaaaatcaaaacctctcctaagatattgtctctatttttatttttaaacaagcaatctctgtatgtcagaaggcagagaaggacacgaagcaagagcaagcatcgagcagagtccgcccaggcagcgcccgcccaggcagcgcattatgataatgtgcacagaaccagctggacactgagttaagctgacactgtgttgtcaagggcagcatcacccatcaatttccgagataggatttgagttcaaatggcagagagagcagcaactctgttgaggctgatgcgtgggggaagggtggggaaggcaggacaggaacccagcacggcttaaaggcaggaagtcctggtgcctccggaagccggtggctgctaccttccggtgtctgctaccttcccttctaactttaaatctgtcagaaagccccacctgggtccttgcatgattagagtcttcttcatggggtgggggtgggatggggtgtgagggggtatggctgtgtgtgggttactgatactaattttaactcccaagagaatggggtaccagctgcttgaaccgaggccagcgcagcccaggaaacaggactctacgtggtctcttatccatggaggaagcacattgtgggtatagcggcaatcgtttgttttgtttgtttcttgttctttggagacagggtctcccggagcccaggctatatagtcaaagctggctttgaactccctgctcttcctgctcctacctcctagatgccacattcacaggcatgagctgcccagctttgtaagaggtggtttgttagtgcaggctggaaggatcctcaacttttactccacccacttcagttctttcacaacgtcagaccatcaatgattgctcatttgctttccattcggtcgtttatctggtcaacaaatatttaccggctctctgcctactatattagataagagaggggcagaggagagcaaagccggggccagcactaacatgacgaggcacacagctatgtgtacataccaattcatatgcaggaaacaatgataatctcgatgatttaattggcaatgttgataagggctgtgaaagagaaatacaggttgctaagaaggcttaatacaagggacccagcagagtctgaggagtcgggaagcttctcatatttgaatgagtagcagttagtgaagtgaagacgaaaaaaagtcaataggttgtttgactattacattgggatagaccattagacatttgaggggagaagggtggtgtaggtctaagaattgcttctgagaagtgaacttagaaattttacatgtgttagtgtctctcttttggttggacaaagaagtccattgtttcctttccaatcttgtggtgagtgctacagctcctggtccaatagattgcacactacagatctgggcctgtgtctctagggatgctgattttgctgctggtgcatgtggtctagtgatgagtgttttgggaaaaaaaatatttttttaatgctcttaacagccaggggagggcaatgcagttatagaatccacttaaaaataagggaaactgaggccaactgttaaggagttgggtgtggctaaatgaagagtcaagttggtttctgcactctttaaacttccaagttgctaacacagttgctaacacatggctactgttctttcccattgtcaagtcaaagccgctctctctgcggagtggacttcagaagtagagagaggctcttgctatttgagcccgtaatgtaaaacttgctccagttgaaacaaattgacgacattactcaaaggcaaactgaaaagccaggtctatgctcaatcccaagggtgagttacttggcttgagtagtgatacatgggaaggtgcttttctgggttaagataaaaactcttggtatcacatctcgctatcgggcacctcatctccagctccctgggccagtattgcaacctgaaatactcagtgggcagaaatgaaactttatagaaattgggtgatcatcacccttatcagatgaatatgacgccatccgcaggattttaacaaccttgtgtgtagggaagggggcagtctgaggatcgtagggctttgtagcttccctgcccaatgcaagttggcaggacagtggcacagcttttaagatccttctgtagcatatgtgcaggccagtcatagcagaagcgctgatgtgggaagcagaagcaccagggcaggaagagaaaatgaaacaccaaagtaacactctctacaccatggggcacacaaataggtctacatctacctaacacatatctgatcattaaacatgaaagcagaactctgctactaatagattcttatcccaatctgtgcaattgatcaataatttatacatgaacacatgctcctctgtggctggcttatttgagggttttaagcagccagaccctagctgtttaaaaccacaacctttatctgcagttctagtccagaatgacttgggggacagggacagggaggggttcaaatctgaaatgtcatcataccaggctcttctattgactgtaaaaatggtatgatatctgccattgtaaaacattgagtggatagcacacagtttggctgttatttagaagatcattaagatgagcatgtgtgttataaaatgaaaagtttctttcctcccttccctgcttccttaaatctcttcctcttcctcatagtccttcatctgtaaaccctgctgctgcccaagtgactaaaccagcagtgtcctttgaggagctatcatgtgcagcaaatctataaactcagacctcaaattttagaattggcattgtcctaggtgttttggattcagttctttggcataactcaatccttatcggggacaaaaatgtcagtgaaattataaaatatcttcaaggtattgtgtcaggttaatctatttgttaataatgttttatatttttcttcatatataaaaaagtctctaatgaagatcactaaaatacacaacattcgggtctcaaacaaaagtggagggacactgctttgtgctgtgtaaattcctcagagtgctggtatcatttataatagatgtgcaaattcagggtgtgtttagtggcccttgtaacttgtaacactagagatgtttctatgcctggaagcttggcagcattttcaatgttactgtgtttaaattggcgcctgtgatgttatgcaagggtgccatttttctgaacttggaaacagaagaaggaaatggagagattttactatagttcatatgtgggtctgtgtcttaggggagaaataactttacttggaaagggaatagtaacactctgtgaaggtaataagcatccaccctctacactggggacaaggaattacacaactggtattttatggaactttggctgtatttataggatcaaagtgaccattttagccaaacaggacagatatttcagataagcaacaaaactaaaggggggctgggcttcatcaatcaaagcagactttgaaaatctcaagtttgaatgtctcagagctgcaacttcctcattcgtagagtagaataatctatgtgagcttgctcaccactcaaagttaatatcaatggtgaagccctgcaagcactaaccagtgttcaaatcatcaggcattaaatgccaagtaccatcagcatccattactgtgccaatgggtgcagttcctgtctgcatgagatgtgttgtctggttagcctgattttctgcacacatgtacacacacacatgtgcgcgctcgcgcacacacacacacacacacacacaaaactgtgcataggagtatgtctacatacagacattaaggttaagctcaagaagagcaaagggaagggcagagagtgactcaatgacaaagacagaagagtctgagactggactgagttttctagactatgctagaaaccaccagcctcatgcagtagctgcatcttttcagaaaggaactgtgtggaagcaagcagaaactttcctgaggaagaaataccaggaacatttcacctgcatttgcatttgtgcatgcccccatcttgggaggaatcgctttcttcttcatcattcttattcccatctcacatttattccccctcttactctgaacatcaattagctcatttaaattcaccgcagccctcgtgaagtgggcttttaaaaataattattatccccaattaaagtggcagaagcttggagttaggaaaagggatttgcacccagaggtaaagagcgaaactggccaaggagctgtgagggtccctctatccacaggcagtgttgcatctgagcccagagctacctctagggtaggataggggaagtcagccatactcaaaacggcgaaaactgccatccattcatttagctttggggagtaactggactttgaacacaattatcgtgttgtagaaatgaattggaaaagacaaatatcttggcttttcttctcacggttctggcaggatagttcagatcctgaacagtcctgcaggaagtttaatcagtaccgcagaaggcttacatagagatggaattcccactcctcgtcatgtgcagataagtttgatgatccacatttctgtccttgtgacgtcacagatcatcaccacggaaacatctgtgctgtaacaaatgctggcttgcagcaccactggccatgttagggaagagaggaaactggctcagcatgataaggctcccagtcatgaaagttcactccaactctcctttgccgtggcagctgtactgtggagagaaatacaaacagcgagttatttgcaaaagcgaaaaccatggcccatcagttattgttaaaagttgggcaaggttgaaatgcagctcaagtacaaaacacgggttccttcaaaagtcactatctatgctctcttgcataatgacagtggaaatccttcagggcacttctgcccaactgcttgtacaaaagctgtatgcatacagcaggagacacgctcaggagctcagccaggctctcggagcagatgtgaaacaccagagtggccatggtaggctttccagacttgtttgatgagccagtcagtggcagcatgagtccccgcagaaatgaactgctcagaattaagtgctgacttggggaggagtcatatgctgtgtgcactggtgggttatgggtgggaatctagcctttagtcctatgttggcttgggctatggtttgcataatattttgaattagcaagagggtgacatggtagattaaaggggtcgtagataagggtcacagatagaaacagattaaaatgacatgtgcatttgcaaatgccccagtgagttttcattgcttcttatactaactttagttagaatttggttagaattctgttgctgacaaaaataagattatatagaaaaatacagatgcaaattctttttataaactaaacagctggtagtgcaaggcccatatactccaagggcagcagttatatatacttcaatagtattctttttcctgttgaagtaactccctgcctactcctgtgaagacttgctttgtagtccttttggcaggatttgaaggtatcactcctaacagatctcctggaatatgtagggtacctcatgactggcaattatggctaacagttctaggcttggttatataaacatggtcccaagatctgtgctatccaatagaagatgaagttctaccagtgtactgtccattagctctttcttctggtaatataaataatatgagtaagtaaagaaaatttcatagtaattaaacattgaataagttgtttgtggatagtggctcctgcagctgggctcaacaggttaaataatgggattgaattacatttcactagccccattgatgataaaatatgagggctaaactctgagcctatgcatgagtagattgtgtgtgtgtgtgtgtgtgtgtgtgtgtgtgtgtgtgtttatggctatggcagtggtggtggtgggggggggggggagattcacagcttagcaccatctacttccagaatgggaaccacccctcatcacctggctaaaatgtttgtaagttgaagggatcggagagtgtttctacccacacattctagcaacatactaaaatctggataggaagttccattgttctctgccatctaagctgttcagtgaaggcacctacttagacccaaaagctatgccaatatctggaaaggctaacttatttgatggtctgccgtgtgcacccaccatgtggtgtggagttactgtgaaagggtggatgggatgtccacagatgggtgcaagagtggatgggatgtccacagatgggtgcaagagtggatgggatgtccagagatgggtgctagagtagatgggatatccacagatgggtgctagattactatggggcccttccttcctccatagcagttattgtctctcacagttctcttcacaaacatacatagaaacacatctactgatcatatgtctgtaaaaactgatgagaaaggctctaaaatatccttcactcgggtgacatagccatatattcatctcaggtgtagctgggaagtttctcatgtccctcttctctaggttccttgtcattgagggcagaggtggtgacactagatgcaccccaggcattgcctcttggtgggcctctggatgctaccctgaatgctcccataatccaacctgtccagttgaaaggttctgagggtatatgcagggagcaccaaccgaattcagctccgtttattcaagatggatatataaactacagcctcccccaggccttatcccaacaacaacagcaacaacaacaacaacaacaacaacaacaacaacaaagtttttcaagaaacatacaaagcataacagaaatgacagtgagaagagtttcagctaattggttttaaaatgactaatactaaccctcttgtggtgggaggtggggcacaaagcccaggtgtctgtcttctgcctgaggcatccattcagaaacatacatcatctgtatatatctcatttttgttgcaaagttaccatactgatcttcctgttctgctttttcaggcaaatgtcaccatccatatctagactgacagacagtacattaaataaaccctcaaatccagtaaggagagtaaaccttgggacaaaaaaacaaagagtagatttgaaatgcttttaagctttttagcacatttttttcgtgtgaaccaagccagatccatgtaatgtcaaatcacatgcacacatctctctgttccctggaccctgagtcctgctcccagacacagggagctgaaaattcatattcaactgaggagagggaagccttggcgaacagatggagcggagttcagcataaaggtttaatcctatcagaccgattcctgtatggccatctggataatcccacacacacattcacgtcccgttaaaaatacgactccagccaagattaatgtcacagattttccactggacatgttcatatttgactttatgattgtcccagcccaggaagattgcttgtgaataaaggctagtgtactccttgaagaagtggttacatgattttattgttgttgttcaatctgaaaatggtttccccttttcttactattgggtgttcgtctgtgtggctgatttccactgctttgcctccctggctcaccttcctcaaactgttcctacagcaggttaattaggagaagagggtcaaaatcattgtgtgcagaaaagtttcccttcttggaaaaaaaattatttactcatggtgtcatcagaggcaagcagtttcactactgctgcgacaaatagcacaatcggatccatgaataattcatgctgcgggcttgcctaccctccatgcctgtttccccatattacttagcaatggagtggctgacaatcacagaacaaggggaggagagagaacgctcgtggcgacatttgcctttcactctttcacaattagaattctgtgcattttaattcccagtcacatgtgcaatgcaagttggaactgaatgtattcagccctcttcgagtcacaaaattctgagcttctgcttgtatttaacaaacaatttttgtatattatgaaacaatgctatgttgcctgtcattaaatccaaaagccttcaacaatctttcaagtgcaatttagaagttataggcacatcaaaatgtcaagatttttttccccacagctaaattgtttaaacagccctgaagagtgagagtgaacagagttctggttcttggagagacagactcagaaagtcagaagcagttgccctagaaggttccagaatacggttgtgaccacacttatggccttctcttgctcaggcgctgctgtgctcactgatggcacttggaacttcaaaagaaataggaaagcagaaaattaagtaggaagtggataggtggtgggctaggtctgtgattggcaggtggcatcacttgggccaagtggaggataaccgcttcctgcctttataggaacagtctttggagcaatgtttccatctagtgactgggaggttttgcctttcctcctttttcagagccattaatgctgtcagagtaaagggtttttctgccagatgaagtcactttgggataaaggatgcaaagcgcttgaaagtctcaatttcctcatggaatatttaataggtttaattgcgtctggtattgagaaatctctatatcatggcttacatttccctttaaagtgacaaacaccacacacacacacacacacacacacacacacacacacacacacacagagagagagagagagagagagagagagagagagagagagagagagaaaagagaaaaccttatatataaaatactgtaattctttgcaaagcaacatctagatattttgctagacaaagcaataaatgcagatcaatagcaaaatgaaacacactctaataagtgataagatacttaactacacagtgcgattgcagaggaccataaagaaaaacagaaccagcctcccgtaactcctcagagctgcatgtgttgctgctgtagcctttgtgacagggctgccacacttggtcacttcctaaaagaatttgtttcttatgaattggggggaggggaggctgtagtggtgtttgcattatgcacctgggactacttccccatgggtggtagatgtctgatgtagtgttgtagcagctactagcttctcaggcacactgttggaggacagttggtccaatatcaggtcctgtgcagggtgaagacagagatggccagccttacaactagtggcaaacctgcttgtctttaactgtttgtttggaaacaaaggaagactcggggaaagtaatcattgcactcaaaaaaaagtagcatgacaaattattgcggctactcactgggttaaaatagggctcctccatggcccaaggacttctggaatggggttactcccaaacacagcatcactcaaatccagcagataaacaggagggagcttttatgagcagacaaaggagctcagttcagactggcaagatgactcatcaggtagaggtgcttgctgccaagacttagcagcccgagtttgattatgtgcagcccacgtggtggaagggaagaactaatcccctcacgtcccgtcaggccgacccccctgtggccactctgccctctacatgcataccctgacatgggtatgcccccatgaacagacagacagacagacagacagacaggcaaaaaatgttaaaaattaaatcaaaggaatccagcttacaggttttgtgttttctgccaagcatcaaccattagaccattaacagtaaaggtatttcgtatgaaacagttctgatacatttcctaatgagcattcacttcagacaaatgtctttaagaacaaacacaaacagtgacaactcactttactttgggacattctggcgtcaagtctacctattcagtccattgagctaacacattagcaagtagctagactaaacacttagagagggtttacaataaaactcaagacaaactctatattataaaaatagacaaactctaaatggtgaacacacaggacactgtattaaagaaatgaactccagttaacaggaggccaatgatgataataacaatgaatgattatggcagaaactagggtacaatatatctgatacaggtcagcatttcctgtgaattttgtgtcaaatctgtgagacctccacctctggaacctacaacagtctccatggagcaagtgactgtactaactggtaaatgtagaatgatagaatcaatgttagatgagttgttggtcttcactaagataccaataaaagctggtgccgtgcttgccatctcctttgggagccttaggtacttgtttttagaattgcttgttcatagagggttggttagtggaacgttagaaaaaagaatctgatctgtctcatgcacagaccagagagcaactttgtacccatttcacaattcacagtgaataccattaagagacatagactgtgattagaaacttcgtaaatttgtacattttgccaattggcagagaattgtttgcccatggtatacaaagagggagaaggagggcgcagaaccatccaacacatctctactgaggcttttggcatggggcaaaaatggcagccaaacactaattttggaaacaaggtctcatagaccttgagcctgggtcatcgttatggcctccctaataagtgaggcatcggtcagaacacaaagagatctcagtggcaaaaacaagagcagccccaggaccctgctgataggcacacacactactaattcatctcaatgggcaagcacctctgagcacaattaacccttattctcaaggccacccataaaccctgaggtaaacaccgctctcgagcccctggctttctatcaatgaaataggtcatttctactggaggccaagcttgtaaattcaccttgctgatcaagagctcagtgcttctggttgcaagggagcagacaggcctagcatcatgtagcattgattctggaagccagacagttttaaactgctgagggcatctgtggtttcctctgccttctgaggcgatttgaagagaatatacatgttctggaggtagaagaggtgatcaggaatgtccccagtgcaattgtctgcacacacgctccttactggaagcgaaatgatctctctctatttcttcttttttaaaaaaaaaatcttccttttctttttcttctcacagcagctattgttcaaaagcaaattggaaatctggtaattaggccctgactcacggtgtagtattaaagtcctgagccaaagttcaacaccctgaaatgaaatttaaaccaattaatctgttagatttttatcgcttgtccgtgttttctcagcaattcccccagcacgtggcctttgatcaactctcatacaaacgctaaaatgtgtgcctgctgctagcaagacggaatgacattaacatggtcctcataaaacaatcagagcggagaggccctcaaacaggcagggcatagtaatatttaataaaagcgcacacataatcttcagaattagcattttgtgccttgcagtacctttgggagaagagcttttatttgtggagtgatcattataacaaagaggcgctacctaataattcccactttaattctgcaatgtgccaggagcatttcagaaccattatgctaaactggtggggtaatcatgttattgtcacagtttgaaggaaggaaaatctcgactttggtggctggtgaggggtgggagaggcattagagaaaagaaggggtaaaacttttatttttaatgaaatttagaaccagcaatgggtctgttgcccttgtggacagaatgtgaaaatgtgtggctggaaagaagtctttcattaattaaaccatgaatttttttttctgattttttaaaaaagtagtcctgctttcaaatctgctcctccacttcccatttcataatggtttttgggagaaagaatgctatcgattattgtggtgtattattgaactctgtaaatcgccccacttgcgaattctactgaatccagctagggtgagagctaacgtagtgaactctttctctgcctctgtgagtagatggcatcaaggcaagtgaggccatagctgctcagaggatcggccagcatccttagacaacttgccagtgggatgcaggagagtcccagggtctccgagctgcccagctgatgttaggtgcttggctggattctttttagtattgatttgctttaagaagtacaaatatcatcacgtgtcctgcttcattgaattctttactcatatattaccataatatatgctcagtggaaaagctgcaagccatataaacgttaatagagtaaaaattagtagccttcttctcctgtcaaacccaatccagtcatgttcccttttcataaggacccactgtggacaactgatgtgtatcctgtcttctagacctttgtctagaatacctggtcacatgtaacctggaattacacacacacacacacacacacacacactcactcactcactcactcatgcacataaaggttcactagatataatttttcaaattatttagaacattttttattagttcataatgctgttacctttcaagattttctctctgaaatccagaaagctagtatcgacattggttccttactcttagggatcaatttttttcttctggcttctgaacagctgttcctagtgtttaaaagcatggccacgttccttaagttcaagtgtttccaagtgtgtgtatatatactatacacccatacactctacactctcattaaccctcttatccaagccccccacatccacatacacccagactcccccccccccacaaacacacacatacagaactttctacttcattaataataagtggataaaccaggacaggagtcaggtataaagtcatcaggtcttgactacgtggttgtcaaacccctcccatagacagatttctcttggatgctctagtatgttcttccatgtccttttatgctctggtgagaagtttggaagagacattaattgtctgaacacttatgtctgtattgcgaacatatgaaataaaaacagaaaactctaggttaatagatgccaacatgaagatcattttgcattccgcacgggcaaacacaggcccagcatttaataacaacactggagtccttgtttttcaactagatggggttctaacatccagtttgtctaaaccaatatctaatatttacccaaggcatccagagagagacagcaacatcttatgtatgggaccttagcacctaagtatattgacttataagtcaatttttaaaaattgggtgatattaacaaaatgttttcaaaatggttgtatattatgaatgttgcatagttgttaactatagcttatctgttttagaaacaacttgaaatcctacattgtattatgtcattacctcagaagcccttaactgtgtgtgtcaactttttagttttcaagaaagcttttgtgtaagaaaaagtcttgtgcccttgagacacagatccccacccccaccatcccatgtagcaaaaattggacaagaatacagttcagtcatagattctttatatgttcttgattaattgctttgtttggggctaaaatacagaaaagtaaatactcgagctgccccgtttcagctgcagatgcgttcctgtgagttcagccaacaccaaatgtttggtttggatgttttcagacttctctgtgcaacgttttgaggattaatttgaatgaggaccaaggccatcccacttgtttgtgtggtggcacgtggtgaacactggtccccctgggatacactcaatgttttctttgcttattgcagaagttaaaacaggagactctgccaattttgacaaagtccaatactaattattattattttctcagcacttccccctcacatttagaattaactgctgttctccttggaggcagcgtttgggaagtccgccttgaatacttaacgttccttaaagaggacagtctcccctctcttcttgtacaatatctcacttgctttccagccttgctgaaggtgctgtctgtggcagtaatcactattggagcaccagcatggtgctgatgggttaaagattctttgtggtgtccaggttccttcagagaggtttcagagtcacaatccttaccatcccatgtatgctagtgattctgttcagagtactcaatgctcattaggagaaccacctccagtctgcttgcagaagctttgcaaatgatttctcacctccaaaggccatttgcagtaaaaaagaggagagatacaagatcttggaaaaagtcagccctaggtttttatgcccaggaaacacaacacagccaaggtcatgaagacaatctgtggttcagccaggccacagctatttgtttgcataactcacctcaagtgacctgcaactttggatatataaaatgggacccatgacatgtatttgaaaatagttgcaatgattttttagtgagggttgttgctatgttaatgttacagagagaaaagcatggagcaaggatctttcctgctccagcctcctgctcaccctgttagctttccattggacaggaatgttcacccaagagtgttgcaattccaacttcttgaaatacattcagctttgaagcaatcctataaggcttccacagcattctaaactctagcattgttcagtttaccttctgtgttaaatttcccaagctttcaaggaaaattcaggtgaaatactatatgcatctcaatagaaacaatgacaagagtgtctttaagaatgaaagttgcaccccaggattctggtccttatgtggctaggaaatgctgagatctggagggactttctgttagtgaaaagatgaaagattttttttctttttctcaagtctcccatcattaaagtttggttctaacagcagactccttctctttttcatgtgcgttgaaaagcagctactccctgtatcaaagccatcagcccgagtgaaggatggacgacgggaggcgcgactgtgatcatcataggggacaatttctttgatgggttacaggtcatattcggtaccatgctggtctggagtgaggtaggtgttgtctgaacattaatatctaatagcttggtctagttgcagacactgtctatccttgaatttctaatagaatgtgtaggatttagtggtaccactctgggtggccctcctctagtccacagaactttggaaactggaaaagatgaactgagtttcccaggaggcaaattcttactgttggcatcacttccatctaacccatgaacaccaccagagctttctgtttggtggtttgtcctcttggatttgccatagggtgaaggcccttttgtataatggcaagtggaaagaagatataaggttatgaaatatataggaaaagctattcaagcctcagcaaatcaattatgtgtggatatttcatagatgggatctactgtgatttgagcttcagagactcctattcatatgtcagtcatgacacagggagctcctgacttactgactcagtgactctcatccagagtgagtcacctggagaccctgaagagcccagggttttccacagtaggagcatacagctttcaggtactttatagtgtgactcccaccacatgaccatgactgttctgtgtgttcagtgctttcagcagggtgatctgacctggatgacatgcctgggaaaccattagcatttatttgcgacctcaaaacaagagtatcatgatttcaggaggttatgaacagactcctttgttatctgaatatgtagcttaggtatcttatgcagaacattcaaagtcctcggttatctcaaagtataaaatcaaagcagagtcgggactacaggagaccacagaggtcacccatcatacttgcttaccaagtagtactacctgttctgttttatggagtcttgggatctaagcagtgtgctcagcacttgagagattgtaacacccttctatgtggactacaaccagcaacctcttggatgtagttttcttgttaagtatcttcagccttggagacaaatagtcattcaactgagagtagtgacccagagggttcagaaagaccaatgtgtttatattcacacagagaagtgagggtcagccttggagtgggaagcaagctttgtgacctctgatcctactggtcttagcaggtgccaccacttggctcttctagatgctctatctgttttcttctcggagggaccacaggaatgagctgagagttggctgtaatggtcgagcatatttttcctgactaacagaccaaagtggatcctgtccattttaaagctatccacacactctctgcaccagcagccaccggcttgatgagcagtcacccttgccagcatgctgtgcagccttggtagtttaatgctctggctagagcattaaagctcttataaagctgaatcagaaccaggcttctcagtccatccaactaactgttatctaagctagaacatgctgggatagaaaagtgtactaaacctgtccttgccaactgtactccattttcccctggaagcatcagggaccacatgagaaggatcatctccacggtttattttgttgcctgctggtgtcctcagccttatgggaacagtggccctgtacaagatcaggcttttctaggttttgagagccacaccttcaatatttccatcacttttttttatggtttatcaagaaagataggaatgggaaagaataaactcaaggtgcttccttgatgtgtgtgtcatgaaaatcaaacaaggactggggtaggaatcagaacgggcatcaagtgtcatgggcttgacaaaaggcagttgattcaaggcatcctgaagatgcccaaggagactctctctaccttaggttagcatctaatctaggctaagcagattgcttcaaaagatctgtctccacataatgaacttaatagaacacatgaaaaggagcatccacagaagcagagcatctattctcttccctcccttgatccctactgccactgccaagtgggtacctgagtcctgcttcacattgctcaggcaaggtggcctacaggaagacagcatcagggcatctgctggttctttgctcttctcctttgaagtatccttgggagctatgtcttaagttaggagttctgtcttggtaaaaactcatattgcactctctaggagaacttagcagatatccttgtagaattaacaagttcacatagccagatagtgcaaggcatcagatctgatccatacagtgtaatctttaaggagtagatgttctgttaccaagaacaaatgcaatctaggtgagggaacaatcaaagagagtggacatgcaaggggaaaaggtacagaataagccaaagcagagagtcgtagtgagagccagggtagaggtgatgatgacagataatcataaaatttaaacaaaagataatgaagcaaacatgaaatcatgtggccatcttttggttttgatggggcaaaataactcatcagtcaagttcaaagccattttgtcagggcttggtttggataggatcagagctcaatagtgtaagatctatgaaaagagctctaggaaaatgcactttaagtagctggcattctttgagcccctacttccagccaggcagcatgtcaggtgtttgtgatggctgtcatgcaagcctggggatggctgttctctttcagggacaggagctggagcttagggaacagctagtaagttggcctgctactaagtttttcagtgctaaggaagggaattctcaggttcacacagaaactctcaggtttacttgtggaggtcaacctcacaacgatttttgctttaacctggaccatggtcctcatctgaagatcttatcttccaagagttgtgtcccccccaccccttgccagcactgctttgtgttgagggtgtccctatcagtactgtaacctttgccagtcttatagaagtgacatgtacactcaaagatgtaagagggagattctttgctttctagatgtgtgtgctctgtttggagtcattaacttctatggagaatttatccttttcaaagcaaagacccatgctgtagccaaggagtaagacaactaaccagctttggcttcttcccttgaaatgggtccctgcttatccaatgtcttaattcctaaccatatgattgatgggcatgctatccgtaaaatccagttcatatcatctgaagtagattttttaaaaaatctttttctccatttccctggctcaatagcctggatggagaaccgaggcaggtgagccaggacaagcagatagtgatgtagattagcagttgatgctattatgcacagtctttttttagctgaagaatttaaaaaaaaagaaggaaggaaagaaagaaagaggcagagaaaataggaccagagtaatttaccctcacagtactctcccccccaaccacatcatcttttgcaaatgagtagtttagcttggctccctgctgtcccttgagggttgggagagagaggagagagagagagagagagagagagagaggtggcactctgtgggtgcctcccgtgtgccacacaggactcttctctgattacattttccatccttttgttcttttcttttttattgtttcttgcccttttccctgtcctccctttcacgcgattattttactggtattcttaagatcttcttccctactcccaattacttagaagaaaatgcattgtagtgttttatgtctaaattgaggaaaaccaccagggttgatgagagctaatgttgaatatgggggtgagtctttttttttaacttgaccagaaatgggcttgatgcttttactttaccactcacagggctgtggagcagggaggggcctgtgctactgttctctacagatcaccatcttttcagtatctcttctgaattccttcaattctgaaacaatgagtagcagttggcttgcctgccggttgtcttaacactgggagaggtaccacaggcaattaaagtcaggctttgtgggatctggtgttttacttggaaagacaacttgctcccatgaaacaaattagagagttgcataacatttatataatctagtattaaatttgtggcttacaattcatggcaaggttctagaagacagaggggacagaggcataagaaggagatggttcgaaaactaatcaagtcccagttatatttggatggttctgtggtggatattttaggctgtcacgatccttttattcaatcacagaaataacaaggaggaggcactctaaggtacttaattggcctattttgtttgtttgttttgttttgagtgtaaccttaggattggtgggcagtggtgagggtgggggttgggagttggggtggggcatactatattccaagcaatagtgtagatttataggggttaatcttgggcaaaaagagtcaaaactgggcagtaactcttgtcttattgcttagaaaacagggatttattcagtgttggaaactgggcttcagtttccccatgggaaaggaagattctacactgcatctttttaaaagccagttgtagcacgattccttttctcttgagcattctccccagaacaacgccactagannnnnnnnnnnnnnnnnnnnnnnnnnnnnnnnnnnnnnnnnnnnnnnnnnnnnnnnnnnnnnnnnnnnnnnnnnnnnnnnnnnnnnnnnnnnnnnnnnnnnnnnnnnnnnnnnnnnnnnnnnnnnnnnnnnnnnnnnnnnnnnnnnnnnnnnnnnnnnnnnnnnnnnnnnnnnnnnnnnnnnnnnnnnnnnnnnnnctcttctcttctctcctctcctctcctctcctctcctctcctctcctctcctctcctctcctctcctctcctcttcttttcttttcttcccttccaaccacacccagcagtacacatacgccatgcccatttgcaaactaattcttagaacatcatagaaacagtttaattagctccaacattgaatcttcctattgatgcatatccagttagttccttctctctctctctctctctctctctatgtctctctctctctctctctcctcagtctctagtatttgcaccaaacaagaagtatataccaaggtatcttccaaaatcttccaggtagctacctggaatgccagcttctacagatattaatagatgccccatgccagatgagagaatgaaactcttttgaccccattaacattagtcaatattaagtgaagcattcaacttatctgtggataactgttgagaccccatcaaacccggagtccttagtatgtcaacaggtctcaagcttctgtaactacagagccattctccttagggatcaccttacaggagagatattatctatgggtgacatgcattttgattttatgataatgaagtcaagttaggaaattcaatggtgagagtgatgagggatggagagacgtgagaaaaatcgcctgaaatatttgcagagtattatccagattagacctggaatgctctgggccatagttctttaatgctacaaggctttgaacagactttctctcatacgctgcatctggttttagtcagtgtgcacttggtgttagacgccatgtgattttgtaggacagctctacttaaagattggtgataccctcggctcagaatggagaagccaacactccagagctatatgaaccaattagcctcacacatggggtacatgctcttctcgtcagccagagcaagggtattgtttgaacctagtccctggagatgaagtcagaggaggctgccagtggggagagggggactttgggtggatggagttaggtaaatgtcagtttgcagggtctgggaagcaattctgcaacttgaaaccccaacctggaaatggagggtttaatagcactgtaatgctttttatctgtccgcactgtctgctctcctctacatgcaaagcagagaggaatggctatcatgaaaacagagtttgcttcctgatgacggatattcaggaacggatggcaatgacacatgtatataatctgctgcaagtttcccaggacactttgtccagccttgaattttactggacttcatggagagttacaaagccttcaggaatgtgtctcaggcacaaagtacaaccttcttactttgagaggaagagaagtctccggagtagaaataggacttgtctcgggagcgtgtgagcatctccatgctgaggttacagatctcacaatttcccccacagtctgaattctttctcttctttctttctctctctctctctctctctctctctctctctctctctctnnnnnnnnnnnnnnnnnnnnnnnnnnnnnnnnnnnnnnnnnnnnnnnnnnnnnnnnnnnnnnnnnnnnnnnnnnnnnnnnnnnnnnnnnnnnnnnnnnnnnnnnnnnnnnnnnnnnnnnnnnnnnnnnnnnnnnnnnnnnnnnnnnnnnnnnnnnnnnnnnnnnnnnnnnnnnnnnnnnnnnnnnnnnnnnnnnnnnnnnnnnnnnnnnnnnnnnnnnnnnnnnnnnnnnnnnnnnnnnnnnnnnnnnnnnnnnnnnnnnnnnnnnnnnnnnnnnnnnnnnnnnnnnnnnnnnnnnnnnnnnnnnnnnnnnnnnnnnnnnnnnnnnnnnnnnnnnnnnnnnnnnnnnnnnnnnnnnnnnnnnnnnnnnnnnnnnnnnnnnnnnnnnnnnnnnnnnnnnnnnnnnnnnnnnnnnnnnnnccccccaccccccccccggctcactgctaagaactcctcaggactttgaagaacaactttcaagcttaagtaattttatggggaattatttctaaatgagctagcatattaaaaaaaagatagaaatggtctaatgactattttaatatagttacacggttatatccatgctcactttattcttaaaagtgctttagtctatatttttatccttaatgaccaagtcacttgccatttccccctctctattgataattatgtgatactgaaagacaaagactttaagctgacattttcaacgagttcatgatgtgttcgggaagagtgtgtgtacgcacccattacttccaaccggaaaccacaggaacatgatgcgcctaagcaaagaggacccacacctggctacagccgtgcagcacctaggaagggaaagaaagagctctctgtgggacactgttgctttcctggacagttagtgctggggtttctggaacatccctccactctgaactgtgacttcctccttctatcacactcgccaggttcctctcccttcgtctttactctggggttcatgcagaccaccctgtggtgccttctttttcacatcttcacccgtggtctacctgagcttccctcctagtctgttgagtgattgttcaccacagcttgtgtgcctctgggttctgaaagcagtgcttagtctcctcggatagtttctcttatggccgacttcatccacttctctctgccttgtacccacctcactttaattcagagttgatagcgtgcgatttaacataattggcagccgttgaattttcctaaatttgtgcttcaaagtctatattgatttaatgtattaactacctattatatggaagagacacgatacagaattatgcgttttatttttgtgaatcagttacattaaacttggagaacagttttcaagccctagtaattttatggggaatcatttctaaatgagctagtgtctttttttttttaagatagaaatagtttaagagttgaagtgaaggatcttccctctcccttgaaggtgatgtccttgtaaaattcccctcatggcgcctcacacaaagccctgagtatcagcagtgttatgtttggtgaatgtcattaactaattcactcattccatacactcattccagtcctcagcaattgttttatctgacgaggcttcaatcactatgatatagatgtaacttagttttcattaatacacgtgatgttcagatatagttgtagcatgatatatatgtacacaaatatcttaacagcagtcaactggaaatgacgaaggttgaatagtagaaagagtagctctttttgaggtgttgacatgggtacttatgctacctgtaggtagtcgatccagtaccccacatgaagctaaggcctccccccaaagccctctaacctcccagatgcttatttgcaaagcttgggtttgaactcaagtccgtctgagtcctgagctttaattcaaagttgataacatgtgcaatttaacataattggcggccgtcaaattttcctaaatttgtgcttcaaagcctatattgatgtaatgtattaactatctattatatcgaagagacacgatacagaattatgcatttaatttgtgtggatctgttatacctcccagtcttctgataacataacaaaactcacaatttagagaaataatgtcaaagtaatgttaccaccacagaattttaggacgggatcttatcgagggggaagtggggaaggaatattattgcttttccaggtgcagctcacaagcagcactccagacccaggttgttaggaacaggctcagtgataggggaaagggcagccttgtatccagggtggaaccacaaagtttaaaaagcagacactgaaccatattactgggcaccacattgatgactattcataagcatggtggctcggctctgagtcactaagaaagagctggcagctaggcttaataaattctgctaaaaacagcaggttgtgcataatgtgtcctggaaagacttcaagccagagccagtctaggggccaccacatccaaagaggttctacttcaattttctctagagtctacttatctctcactctgaaggggcgtgcaaaataatgcattactgaatatatgtgtaaataccagtggatcagtatgcaaatatgaactacatcacatgcatattagatgattctatatcttaatgctgtggtatcctgtatacctttgaaggacctgaaacccctcttcgtggagctctcttggtgtaaggaagatttgttccctgtcagtactttgcctttcattgtggggttgcctcattccacaaagccgagtttccctgtaaactgtgaacttggccctttcgagaaatgcacctggccttcccttttcttaggctttaatttcgaagcaggagcacagaagcaggagcgcatgctagagtcaggagccacggtcgggctggtctgaatatcgctccctgtgtttcttagagccagggctgggctgcgctgtgagcctccatccgacctttgctttgcagctcttctccagctcccagactgtcaggatgcagtccagttttccatgaagcccagctggcctgagatctgcatcctgggaagggagctggaggaggtttatttaaacaacaacttacaaaataaataaataaataaacccacaaaggctggggcagttgaagcacagcatgtttattttagttcctttcttcccaatctgttattttggaaaatcgatcgcattgctgttctgttttgagacaattaactacattgattgagggtcacggttaacttcctggtccaaggaaccgggcagtggattcttttggaatacttaatgataccagtaggtttgtggtggccaagtcaaaagcttcttgtttttatttttatttatttatttttttaggaaaaagaaagaattttgaatggagtgggatgggtttttttcttctgttttcttttggtggttctgggattgaacccagaccctcaaacatgctaggcaattgctctaccctcggctacacccctagccttgatcatttcttttctgaacacttacacagaagtttattcagtctttaacttacttgtgagggctatttaatggcatcttgctatttggtcacttcagcgtttgatgagcagctcatgagaactaacttaatccaaggtctgtctgagtcccgggaacccagtaaaagcaaaccagatcaaggctatctcttcatggagctgatagtctatgcaaggaacccagaaaacagctaaaaacatcactctgtgggcctctagtccctatctgtatctgtgtctatattaagaaaattttacagcattcagaaacattactggctactccaaagctagggtgaactcccctatggaatttaattccggagacttgagtttcaaatgtctccttaccaagtttatctttagggatccatgagacctgacctcttttgctaaacattggttttagctgtttcttgaaaggaataaagaaaaccagaatgtttgtatgtttgtgtgatactccatgcatttgctcgctctctctctctctttctttctctctccccctccccatttctcctctctcgctctctctccctctctccctccgttcctcccttcttcccttcctccttcccttcattccctgagagatcaaattctgatgacccaacaggcactcttttggaatgaaagacctcagctcctgagagaagtctgattaggtaggaacaacccaaaatacatgaatgagcccatgaggcacatgtggaggtggaactgtgctgctctcattaatactctttgcattatttatttatttagaatgtgtgtgtgtgtgtgtgtgtgtgtgtaggtcttagtataacttgtggcagttgattctctattttcagtcatgtgggtcccaaggacttgaacttgggtcaccagacttagcagcaagcacctttatcccttgagccatctctttagccctgaattttagatacatctcaaaatgtcattcctggttacacaaagacgaatgctccagaaagaaagaacaacgagtctgtttctttggctactgacattcatatctctttggcgctcctaaggtgggtttggtctcaaagctttaattacgcgttgtgttagagcttccttatttaagtgtctgttccatgtccatcactcagcaccccctgcctatctcaaaagaaatgggtattatcattctaattgagaaggagggagaatgctgtgcgaattattaatacataaattaaaaaattaatctagaaggcgcgttagcatccctggagaagcacaacccaaacacaaaacatatttaatattattctgagctcccacagagaagatccaagcttctgtagcctatgattctactggtaaactgaggcatggaatgtggcaattgcagagcccagagtctgtgttcaaagccctttattgtacttgagagttttttttctgatgattagtgttaattagttttccataaacaataacaaactgccccttcccttttctctatcccgctgagtctttacactcgattttttttttcttacttgactttctaatgtggcagatagttagttcagggttgtgaagctggtgcgggaaatttggcattgtgtgtgtgtgtgtgtgtgtgtgtgtggtgtatgttctagttctctttttgcacatggctcagctcttcgcattgcttttcttttatataaagccagtggctagaggacacacatgtaggctgctggtggagttgcttctgagctctgctggggagctgttctcagcttagcttcccagagagaacagttgtgtgcttccagtgctccagacatggaaggtaaaggagctactagggatgagattgatgttttcaaaggcagagagagagggtaaagtccagaaattattgtaacatgataagcagtctagagaaagaggacagttgtggcatgatgatgacagccattagtcaggggagcttgctgcttctaattggttaggtttctaaaccttcctgaaattcactctccttacttatgaaccacttaatagccatgcctgccccctgaagtctatcgggcacaagtccccggaagagcttaggttagtgctgagcgcaccgcgagaaggccacaacaggtcagcgttgcttaggtcatcaccttcattattgagtacgagggagctatggagagcacatgctgttgttcctcagagaagatagctctcccaaagacatgccttcccccaggactctacaacgtgtttttcttagcactccaactgttcatggatcatgcctccctgctcctagtgtcctttggatgccacaagagaccacacacagacccatgcttcctctccggccttcctgactttgcaggtggtttcttcagactgctgcctccacagctgctctgcctgctccagtcctctctgctctttcccctgcttctgtcacgtagagccccatttctccacctccacatctggatctctctctctctctctctctctctctctctctctctctctctctctctcagagacatctttgccacccatagtttgtgatgagcctgtgtcttttgggcccacaccacagggctcttctggctctcctgtctgagtttggggtaaacaaacactcatataggcagctggaaaggaccatatttttgcttcctggtagctgggtagtctctccaggccatgaagactcagtccatgagtcttccatcatcatacagtccctaatggtttcccttgactgtaatgtgcatgtgtatttgctgttgaggggttggaggaaatagagagggagtcagaggaaactgaacttcaccaaagaacacttaaccaaagaggctacttctgttaacctttggagctttcctctgtgcagttacacatctaatacatagtactccacactggcattcttctacttttcattttgataatagtttcccacagtagtttatttatattattacttcctgtgaaagcagaagggatgagcacacatatacacaaggaagataaataaatcacatttaaagttgtgtaagtttaggaataaacactcttttagtgtagacattttattattactgtcttaacttcttttcattttagatttatttttattttgacttgtgtgcttgtgtgtgtgcatatgcatgtgtgtgtgtttgtgtatgcatgtacatgtgtgtgcagtaccccaagagacaggaagagggcataagattctctagctggattgatttaaaagcagttgtaggctacccaaggactttgttctctagaagaacagcaagtagttttaacaactaagccatttctcaaactctttaataccttaaaatatttacttcatttcttattgaagccacaaatgttgagcagtgttccttttccttaccatatagaaaccatatagacagcagcccgtgctcctgttgggatataagtgcaaagctagtcgagttgtcactttgatagtgagttatttggtgagtgttctaatattactgggttaagaagaatggattcctgtaagggtaattgtgcctactggagtcaaacatttagtagagttatgagcatatttacacatggatttatttcaggaatgtttagaatattatgtatggaagacattcatttcataacatatttttagatttgtttatttttattttttgtgtatgaatgcattacctacatgtttgtatgcataccatgggtacacctggtacctatggaggtcagaaaaagacatagaatcccctagaactggaattacatatggcctccatatgggtgttggatactgaaaactgaacccacgtcctctgtaagaatacctagtgtactgttaacgcctgagccatctctcctgactctccttagtaacttttaagaacagacatgaggattcaagagtttctcctggtctcacaaactgttcagtagtagaacgataaacaggaaattcttgatggcgcacagttaatagtttttttaggagtcatattgtgaatgttgtaatcatctgaattcctaaaaagaggccgcgactactctgactttggttgactgcatagagaccgtgtggtcaggaagtcagagggtagccaagcatgggtaggcaaagaaggatctggacctggtttggctcttgttctctatacagtattaaacctgatctccttgtttctatgcctatagattataagtgcagattagaagctgcagaggacaaaagcacagactaaaacagaagtcatttcaagtgcttaactgtgtggaagcattttagggttgggggacagcacttcatacttcagccatcactcagtgttttaatgtattacagcaagatgtaagacaggtgacttcaaatatgatcttggtttatcaaagttaagttaccttgcatgttctccatgattcagacagcattcaaagcattttgggaaggatttcaatgtgaatagaatacttgtttccattgttatctatttgtcgagaacttcacacctgtatacaatgcattctgattatattcagacactccgcaacttacacctagagatccctctcccaacttcatatccttctttttgtctctctccctttcttttttttttttttttactgagtctaattagtgctgaccctgtatacatgggtggggccattggctggagcatggttctcctaccaggggccacatctataaagaatatcgattcttcctctattaggaaccattagctccccagctagaggttgatgtggcttcctgattggcagggagcagtgggatcgagatgtaccatttaaggctgatccctccacagatttgttctctgcattttgaccagtgtaagttcccatatgaatcacagtccccttcacaaagatgcatttttaatgagagctgagagctgtgctcaccaatgggtaaatagaggcacatatttagaaggttgcttgatattcagtccatttagtaggttgtcctctagagtccaggagctccccaatctaatgtaaattttcaaggcaatatcattggtgctttttgtgactatatccttagctttccagaaaacacgagccatggcaatagacttggtctccagagttcccttatggcatggtcttagtgcaatatttctttgtgactctcagtttctagccagtaagctcagacttcctgtgtattcgagagaagaggatgaggcatctctgagccctaagatgacttgagctcagtgctttctcttatgtttccaggaacattttgcagcattagttgtggattttagtatgagtaactttctcatccttctgcctgtcacaaggtgctaagacagtttcccttggtggcaaccaggggctggatatggtttcttatcacctcacccacgattctcgggcaaaacacttcagctggttggttttcacacttaaataaaacctccttctacactgttgccatccaacagtataaacataagctagcattgactcattggagactgcccatagaggatattctagcttctgtatgttcagtccatgcttccgtgtttagctgtttaggccattgctgacttctcagagagatcccttaggatgcagttctgtcacaggtcaagcagtcaaatgccagggatgctcttcttctttttttttttctcaaatatctagataatgctcattttatgaccattaataacattttctttatataaaacgaggtaagagtaataaaaaataaattttgctttatagtataatttgattgccaatagcgttcagaaatgaacttcctcactgtgcatgtgcccctgcatagaggcaggctaagcctccagcagccccctccccaaccttcatttctcttttatggagagtctttagttcatccagagccctaagctattccaggggggcagatcctttgctcccccctttaaaatgctttgattgtgcctctggtagttaatgcgccaaatggtcttctggactttcatacgtgtgttctgcagctaattaggatgcccaggcctactgtttcctacctttgtgctctccacgtgtttaagagctcagttcaaacaccaggcccataccctctggaaaggcatggcaaagttctactctgatttgggcatctgttgcaaacaggttttccaaaggatatcctgtaggagataaaccatttcattaggccaggttccctttccaaaccgggaaagtacagggcctgctgtgaaggaaaacccagataatgctattgtggctataagcagagcacttgtaaatgttgttgccggcatcttttccacaggttccatccagacggtgtccactgacaggttaatgacgtgttttagagctctgtttatagagagctacggtagggcagctgggacatgagtcctttacatattccaatgacccttcctccttccatgtctcctgcagttgataactcctcatgccatccgagttcagacacctcctcggcacatccctggtgtggtggaagtcacactgtcgtacaagtccaagcagttctgcaaagggacaccaggcagattcatctacacaggtaagcgtgcctgcagatgggaaccacagagctctgttgacttcatgagatgttttccttgatcgtgtgcatgtgcgcgtgcatgtgtgtttaatgtcgcttctgttaagacagattttttttcccatttcaacaagtacatacaggaccgaagaaattgctttgattattattactaaaagttgatggagatgtaatacttaaagctgatggagatgtaatagctttgcatgttgaaagaattggttgcctacttagagaaatagagagcgggactatattagacaggaccaaggtctctctctagtagattggccagcttgttgttggagtttgcttatggagcagggttgaactttgacgaacagtgctgctttttttctagcctgccgcagcacttgaattaaacacatttggaaattttcatagttattctgggtcgtgctctctgccccagtaagctgcattttgtctgccccacccccaacagcactggcacacggacgtgccttgcggtaagcagctagggttacagggtgcatctgaaatccctcctaccaggcccagccaatcaggcagggacctgggctggcaggatgtagaaatatatgtaatgggctaagcaaacacccagggatctcatcgtcgaattcagcatctgctttggaaggggtgggcagactctttgtttcttacatgctcaaaggtgaggtgtaggctgatcacgggtgggtggtgtggtagatttgagggcccttggtttcacatgacctggctagctcctttcaggagccagtcactgcttttcttccccatttattattaagggtctgctaggcctctccatgtagatgggaagttgcattcacacagaggggtctggagcacagaagaagcgcttctgttagcacatcctaattaaaccacacaatccaatgggcaggtttcatttttgctctaacgttctacctcaaagcatcttcccctataattttatgctatgaagcaaaccaagcatgcttgatagccaccctgtctctctcacacaatgacagctcatcaccaacagacagagacagacaaacagaacgacaaacaaacaaacaaaccaagttaatatattttgaccctcggaaatgcctcccagccctttaaacaaaacacagggttggtgcctgcctgccgattagttttagttaattgaaaattataggattgacccaagaggaaaattttgtttgcactccaatcacttttacaaattaaggaaaattaccacaattttgtttagctcaggtttcacactgagttcacgaaattagctcagccatcccaacaaagtcagcactttgttagtgagcgcttgaaaaaaaaagtctatctggagttttgtggtgtatacaaacgaagcatagagaaagctatgatgctttatagaagtgggccaagtgtttttaattaggctcattggttcagcataagttttgaagaacaatcaaaatagcggattagctgtttcttttaaatctagggtttcttgccattcatttttcccatgagaacttgcagatagcactgtaaggttttttttttttttttttattctcttttctttctatttttttttttttaaaacaagcctcattatgggctcgcaggaaaaggaccaattgaaatttctgatactgtaacattccccaccgtcattccaaggggatgggagcttttcacagcgttccttgctggactcgcggttctggaacatattacaaaaccacagaggccaaatgttttctctgaggagtttggactctgtttttggccgaaaatatttaggcctcactggttgcttatttactctgctattaagaacaagaaagagaagaagaagaagagaagaagaaaaggaaaacgttggtggggcgggaggcaccagaagcagtcagccatggcttccgctttggtgacaatgtccttgctcagtactgctcccttttgtggtcaagtctcatttagaagaaattattgttaatcagtgtttagtaaaatataccctagagccacatggccatatatatatattttaaatcactgccattacataaattctcaaacaaaacgaaacaaagcacctcctcccctgcaaacaaacaaacaaacaaacaaacaacccaaaaacaaacaaacaaacaaacaaacaacccaaaaacaaacaaccaaccctaagggatcgactgatccaccattatttaagattttctaaaccgttcaaaaattgctaccaatttaagaaatcacatgttgggaaagctgtgtcagactggaattaagatcaaagattaaaaacagcagatctgcaagctaagggaaggaattctgcaggaatgtgtgttgatatgttcatttgtgggaatctaaataagagtggaaagaattcatgtcttcagctgtgggctactgacaagaagatgccactcttaatgtatcctaggaagaaatctagcctcttcttgtgtgaggaaaatagaaatcgagagaaatgaagacagagactccttgtctatccatcgttacagtgacatcacgtgggtttaactaggaaacttctgagccgcctggtcactgacatgtggcttgtccttgtggtgggccctcagtcatggctagtctcccagctcctgggccttacgctgttcacctctgcgctcgtcactcttcacaagtgaaggtgtagacaaaaggcctcagtgcctctacttctttgtatccaaacaactgcttagggcattgtgctcatgcaggtccctctccagcccactcccagaagttcacacctcatctttaacatccatactacgtcaagatgtgaggcttgccttcctggattggcaaacaaatcttgtttcttaatggaatgtccctggaatttttcccttaaaaagaaactagagagtatcacagaactgaagaataacaccccaattaagacacgcccactgctttccgagggtttaggacagactttggatataggaatgtgaaaggctctaaaaatctattttaagccaaaaccagaaaaaataaaatcataaaggagcataaatcctggtctagttgatgcaattaaaaacccactttttagaggaagtagtccaactaaacacggactgaaggctgaccccaatcccttaaggatgctggatgcaactctttgtcactggtcctcagactcgagtgttcctattcactagatgtatgatgttcttgcctttgcccaatcagagtcctggagaagaatgagtcctgacttaaacagaacacagaagcgccgactgcaccagccagatcagactttattgtgtttccttagttttatgcaaatgtgacggcagggctgactttacgttttacaggtttttaaatgaaagaaactaaaacctcatctcatcctagggttgttttcagagtcctacgatcttgtatctggtcagtcagtccaggtagatgaagtccaagaccacgggactcaccagatctcgctgactgtagggtctccccaatatcttcatgcacccccttgttttgtatgttttgtttctacagccgttccttctctaaatgagctgcttcctttcggagcatgattggtcctgctaaggcgtccgtgaacgtgggtgctaagaagagttccttaggagctgtttaactgtttcgttacaattcttacaactgggttttctaataacactgctttcattctggtaatttctcatgccccgggaaaatcaacaagtaagcaaacaaaaatttaaataaagaaggaccacgggatgacatatgaccaacttcaccccgttgatcagggatgtacttaaagtcatatcccttccctacaggctggggaaagccctgatgattggctggctaagcaacctatcagaacctttctaccaactgcggtcccattctaaccgtgttcacctgacggtggcccctgcaagagccaatccaaatagcttcttaactggggaatgaagctgcttcctgaactacttcctgtttgctcttctccctggtgctgcagagcgtgtagttctgcccgcaggatgggccttgtggggaaaataagttctgcagctcttgaggactgttaatttcctttttatttttctctcctgatcatatttgttttaatcctcccctccctcccctcaccttcccccccccctcctcttttctctctgtctgtttccttttttaattgccagtaatacagagccgcataaggattggatgtttccatttaaggcaatagatatagattgagctctgagctttgccatttactggagaagctattcctgcgatcttcatatcgtaactctgagctccctcatttttataagaagaaaaggataacttgctagggttgtttttagaatcagagaaatgtgtaacatctagaaagaagccaagttttagcattggcattaaactgtggctattatctttagtcatccgttcttaaaaaaaaatcattattttctgtgtatgaggattttggctccatgtgtatatgtgcaccgtgtgcactctcagtgccaatggagtacagtcaagggcatcagatcttctggaactggacttacagatagttgcacgctgcaatgtgggtgctgggagctgaacctgggtcctctgcaagagcacaaatctctgaagtgctgagcagttgccgacgccccacccattgatttttgggtccccttttgagagcaaacatttcacatcttgtttaccatcatcctcatcttcccagcaatctaagatttgcttttaagggtttttagtaacagaatcataggcaccaggacattgaagcagcaacaaatggaaaaggcaatgtgtggataattatggtaacaagaaactgatttttaaataattattccactttctgttgtcactacaaagcgtagactgagtgcttataaagaaaataggattatttaactcacagttttggaggttgaaagtctaagaccaaatggtcccatctttttggcctctggaaaggacctcatgagctgcctcacacatggtggatggcgttgtggagtaggcatgggtcagagtggtcacgagtggggagaccaaaggctggggagttcagatgtgtattctccatagccacctactctccgagcaggagcctacaaggagtacagtcattcctcccaaggtcagcacatccaatagcctaatcacattaatcacattcctttaggctctgcctcttaatgctgccacactaggcacccagtatctagagaatggactcttggaggccaaaccatggcttggatgagaaatattttgattatcagtctttggtactgatttttcccccaagaaaaatacatgggtttgctcttcttctctcctgcaatttccccctctcttcttcaggagagtgtaacatgggcatagcccgtcaccaacctccctcaggagagtgtaacatgggcatagcccgtcaccaacctccctcaggagagtgtaacatgggcatagcctgtcaccaacctccctcagggggcacaggctagaattagcttcaactccaggctcaggaccattcagctcacaaacctctgggctttccttcttcccctccagagcttcccctacaaaatgagagctgcctccttggggccaacaaaataattttctctaagcaggaggcagagagttagaacgggaagactctcctgttctttaagccttttcaaatgtggattcattgcttcctggatctcctgaaaagccaccatcttatcattaccctgtaggaagtgtccctgttggctcactagatataagctgccacataacctctttgcctggccgttcatggtccactcagccttgccacagttttctcagcttatgatgcctcaaactctgcatttacctggggattcatacttgccttaagtacaagcacatgcaagattttggtacggttctaattctgttcctctgatagtattcttaccactgcaggggagtagacagtgatggctgagacagaggcctgtagtatagctcaggttctgcactaaccttaccgagagacgtaggatagattcttacatgcactagcctcatcattatttcatggtaaaatggactaggtggagtaggtaagtttgatattccccacagctgatcttagttgacaggagactttctgacattccatctctcttgtgccatgcaattaaaccactccctcatcataacttccttatgctcacggctcttttcttctattgtttgtggataagacagaaatggatatagatccactaactcgataaaggaggagataggcttcctcagtcttagtgactttgtaagctgtgctgaagcaacttgacttagtatctcatgaggttttgataggtgctccctgataattgattaacatattgcccagaatcaatgggtcctcattgattgctgtaatctggatgacatgggctgtaaatagaatctgttaattaagaatctatccctctgcacttgacgttttcatgcgtataatacaatagttggggtttctgataagggaaaaatgggcttagatctgtggaataaatagttttcatttcctcacctgtaaaatgaagacattttaatggtatttgtgtttaaagagtaaataggtcaggcaggtaatgtagttctgatggtgcctgctctggtgggagtgttgtctaaaaataaactcagaatgtaaagagcagagagtaaggatgttgtttctgtttaaaagaaaaatccaaacaactggtcattggagctttctttgtttaacagtatatgcatttcagctttctctggcatgcagacactgtttcttcctagactacaaagttggactaagactatctggatttagttatgatttccccatgtcatctatttatatattacaagcatgtttgtagattccttttctagtctaggtgtgcgaaactagttctaggcaatgccctaaaacatagttgagccaaagcagactgggtctctgttttcattgatcttatgtcccagagctaatacggatgttcctacgtctgttatgttaaaccttggaaatacccagaaaaataagaacagggtttcaaataagcacataagaaaaggaaccctaataagtcagagatagtttcctcttagaagagatttatgagctgagattttaagcatagccaagcatcaactcagggattggtgcagggtggtaggcttctgaacagagagaatgattcagagatggagtgtttaagaagacactgaatgcaagccacaaagaatagaaccaaagacagtttccagagttcctgaaatggcagttggctgtgacatttataatttttgagaccccctagaaggagggactgcagaccaggatgggagttggaagtctttctcagagggttttgaagtcaccatggacgcagtctggcggcttgggtttaggtgattaccagaggagatcgggtgccccagagagtttgagagctgcagagtagaaaggtagggtaggtacgaagtgtgggggaccagggggcttaaattgagcagattttcttcttttctccaagcttgatgatggtagggctctgactttgctgtgtttcccaagggtctttgtaagattcagtgaaagggtgagtccaaagatgctttgtgcagggtgatagcccacagacttactcattgtggaaaaacacaggcctaagcagccattcacaaagaatggagaataggaggcaagaacaggcttgcttgcttgcttgcttgcttgcttgcttgcttgcatccaccccctcttcttcttccccctcccctaccttctctacatcagctggttttcactttggattcagttgcaagagagtgtaatggaaccctccctgtgcttctccaccagtgccgtcctgattagaaatgactcaatatgaaagaaaagtttggaggtggctgcttgtccccatgccttaaaaaaatgattctgagagagctactcatataaaaagaaggaattcagtgggagaaaatgtttattcccgttgttttggtgcgaagagtaaacccccaaccctcttctccaccaaagggaagatttattttcataaaatgtgattttccccctctctgatcttatatgtgttggtaattccgaatctgctggcatctgtacagttaaaccctgtgggtaccataatgggcacggcaagcaccatctgtaaaagtaaccattgtgcttcagtgacatctatgaaatgaaagctgtttcttcaaagaataaagccagtccgaaggaagcacattattttgcatattttatgtatatactctccaagaaatatgacccgtatttcctctttggagtggagtgtaatcaggacatgagtagctactgtaactggatcattaaaaggaatattttccctgacattagaggtctaaatggccacaaggcctcatatacaaccttggctttttcctgtctcctcagagttaataagtgataaggccagtagagagataaatcacagaaatccctgtccaaagaaaacatattgactatagccaagcaaataacagaccataaccaacgctcccattcatcattcatgtaatagggacatgaagtatttcctacccacaaaaccgtatagaaagaaaaggcagacaggcctgtgcctggatctgaggcatgtgatttggttattaaaggacatgaactatttgtcacatggctttaatctttaagacgtgttgccatttctaaactataaattgctggtaaaggattagagagctattaacagcgaatgcaggaactgtgtttcctatgggttctcagtgctataatgcaatatgagaaggtcttggtagctaatctttttagtgtgatataacataatttggttttcaaagccaataaagcatttggttggaagtattcaaggttgctttcttattttaattttaattttttttcaaactcagaacagtgataaattaacccttcagcttttaaagtccgtatctggaaatctctcctaagatattgggatgggtgggggaaagggcaactttatttctgtttgtcttctcataagatttattcccactgctcacagagccctattttctgttctgcttttccatatttgcagtgcggatcccctgttcattgttcaagctaacgacgagaggggcgcccactagagcattaaaccttgtttttctttctttattgccaaacactacatacttatgttagataatttaggaagcaccaattagaagtaagtaaactaatattaaaattgaccacattccccccagccctttaatcataaacactctataaaagtgagccagtaatattattttaatgacatagatcttgtctttttttctctgaaatgtctacctcattccaaaaatatcttagataatagtaagtgagatttgttttgttttgtcatttagcaatgcatcggaaagaccacggcattatgaatttaaaacaatttctaatctttgacaatcatttcacgcttcactggaacttcctaagatgcatccgaatctctattagaaacatcccgatcttcctattaaagtcagacagcttgaatttgtgttctagcttctttttgtttttgaaaaacctacagaacaagatcaatagtcctatactttgacgggggcatgagtaggagatgtcaagatgcagagattggcatattggctgggattcatcaatgagagtatgagcttcaagggcccactgtccttggaggtccggaccagctccccaaagcatgcaattacaacatgaagcattctgggtaaaacctggatgaccccagcatcaggaaattctggccaatgcccttggctgtgtcaagtaggactgtactttttgaagaataagtggaagccatctgaacccttcaaccatgctggcaatatctgtccagaactagagccctagacaggctgaagaaggtccctcctaccatctccccaggaacctgcagcatctgtgggcagaatggagagttcttctttcctccactcatttcccacactcctagggttgtttgctttcatctcattgttctttcctattccatatttcaccaataacttttctgtattagctaaatcttccttctctctgtgacactaaatgtacatacaacacacctgcctagtccaccctctaaagtctgccttagtcaggttccatttttagcccacttataagacaaggagacaggtagaggtgaggtaattccctggaggcttattcaggcttgtagtggaggaaggattcagacgccattgagggacacccagctgggcactgaggaaataaatccctgaggaagctactgacccttgagagtgtgtgcaatctcccaattccctgaaaccgggatgctgaagagggaagaacactgccattttttagaaaatatgtgccttcaatattttaagtaacttatatcatggtgaacacattgcaaagtcatatagatgagttggaattacagaaaaaaatgttatcaccctttatcccacccctgtgagataatcacggttagtattttttgagtgtcattattttctatatgtactcataagtgttttgtcagagagaaaaagatttttgtttttgtaattttatatcctgttttatagcttaagtcccaaaacaaagaggtctcctgtaagttctcctattccttgaatatattttagtggatatattgtagtctattttatggctgatccattatttacttaatcattcccctatcattggagagcacatttgtttttaatagaacacttaaataatattttcttgatgacagtatgatactgaatacaaagtattttctactttcctagtgaaaatttagatatgtgaggtttactaattacaataactatgatgaagtgtctacttatactacttcacatatttagttatggtacattttacaaatcaaacactgtacagtgtttatggacataaccttttctcgttttaggatttctactgttgttcatgttatctatgtgacctttgccattattatttttaatataaaagtcaaagtcatttgttgttcaaaataacaggtttcagaaacagatacattagcccatacccataattgctggactcagaagactaaagcaataagatcaaagcacaaggccagcctgggctacatagcacaccctatctaaaaagaaaaacgaagaagaagaagaagaagaagaagaagaagaagaagaagaagaagaagannnnnnnnnnnnnnnnnnnnnnnnnnnnnnnnnnnnnnnnnnnnnnnnnnnnnnnnnnnnnnnnnnnnnnnnnnnnnnnnnnnnnnnnnnnnnnnnnnnnnnnnnnnnnnnnnnnnnnnnnnnnnnnnnnnnnnnnnnnnnnnnnnnnnnnnnnnnnnnnnnnnnnnnnnnnnnnnnnnnnnnnnnnnnnnnnnnnnnnnnnnnnnnnnnnnnnnnnnnnnnnnnnnnnnnnnnnnnnnnnnnnnnnnnnnnnnnnnnnnnnnnnnnnnnnnnnnnnnnnnnnnnnnnnnnnnnnnnnnnnnnnnnnnnnnagaagagaagagaagagagaaaattgtgaagaggatgtgtaagtccactggattatcagtctttacgctgtctttcatcattgtctttgaggacacagttctctctgagtctgtgtactgtattattactggaagctttgccacggaacatgcagccatttgctattttttgaatttccaaacataatccctctcgccagtgtttttagacggccttccaaaggctttatttggctatggctgtagctcagtggtagagagtatgcctagcactcagaaggacccacaccatcagacagatagatcatccagctaacaaaataaaattagaaaaaagaaagtttgtaagaaactaaagtagcaagaggtcagtttcatagaaatagctattaaaggtagattaatttcctagtccaggttcttctcatgaatgactttcttacccgtgaggcatttcatgcccttgcttagagataatgtatttgaggaacatgcttcaagtatataatgaaggtatttttggaggaggatctatctctttttattaacgttaactcattggtattgtttaccttggttgaatcatctgctatgtgcaattctggttatgaactgagtgctctaaaccacatcacatttccagcattttcaactcggataaggtctgtactccctcttctgtgggccccattattcaggacactgaaagtgcgcatggttaccatgtaccacgtaaaagcccgagactttctataccatctcttgatggtgagaggcagcacaggacctgcctaaatcctgagcagaaacaccaagagaagagtccatttcccctgtctgcctcctgctctttgacgtcacatatgtaaccaagcagcttcttcctgttctcatcaaccacggttaacctcacatcatggcggaagggccggcctactggactgagctgcactgactcccagtcagtgtggatttagagctttgtttaaggtcagaaatattttcagatttaaatatcaatacagagnnnnnnnnnnnnnnnnnnnnnnnnnnnnnnnnnnnnnnnnnnnnnnnnnnnnnnnnnnnnnnnnnnnnnnnnnnnnnnnnnnnnnnnnnnnnnnnnnnnnnnnnnnnnnnnnnnnnnnnnnnnnnnnnnnnnnnnnnnnnnnnnnnnnnnnnnnnnnnnnnnnnnnnnnnnnnnnnnnnnnnnnnnnnnnnnnnnnnnnnnnnnnnnnnnnnnnnnnnnnnnnnnnnnnnacacagacacacacacacacacgcagacacacacacacacacacagacacacacacacacacacagacacacacacagacacagacacacacacacacacagagacacacacacacacacagacacacacacagacacacacacagacacacacacagacacacacacacacacacacacacacacacacacacacactacttcctaaacttctgactgactttgagaagagcttccaaggccaggttggcttctacaaggtccgggagttctgcgtgggtggctgtcagctgtctcagggatgcttataggtcttgtaccttggggcttcttgaagatgattaaaaaatactctgtgtcttgcccatctttgctcagaaggtctaaggggatcattgaaacacttagaatttttacataataaaattacaaacaaatgtccttggacttgtcaagacttgtcagtggccacagaacaagcctagccactgaagccctgtgtgtcacagctctcttcgtcttatataggtaaagagatataaacaaatttaaacacagagccataatgaagtggttccttcactgggctttaggtcacccgatgatagatttagtatcggatctatatcttcccaagttgattgctgttcactggctcagaattacatccaaatctgctttacactgattggttcagcactaccctttactttggatataatacactaattagaaagaagcttctagactctcaggcaacttccccaagtatgggcactttgtctacagcttgtgttttgattttatttttagcacttaggccaactaatatgaccttgatggtctgtgtaggtgcagctcctgtctctcaatggcatataaactctaggaaggaggttctcatctctcttactcactgccatgatctcaatgcctagcacagaacagggcatagtgagcattaagcaaatcagtgaatggatgaaggcatgaaggggaagcaaaaatgttgtcatagatgtacggaatggaagcctgcaggatgacccatttagccaactggctgagtacttgagagaggatgtgaactaggcctacagacatcatagacttaggtaaagtcactcagctggatggttttgctatcccattccctgtttcttgcctaccggctgtgaacacatcctgacatcatgcatacctggtagagtagacatatttggttattgagaaactagcctgaaaactcctgaaacttttctaattaatctgagacacctgtttcctcatcttcaaaacaagggcgtaacaaagctgttagacccatgaacttgctgtggctgttggttagcttcacaagacttgtattaggttaggtccatcaacatttcatcatgatgaaggaggggtcagtgaaacctacttcttcccgagagactattgtcatttgggagaggaaaagacatcttattcatttcttattagcaatgcaatcatcgatgggttattcttgctctcttgaatcacctcaccactcacacttgggcaagtagctaattattctgaatgcacaaaagggagacgtgaacacaggagaaaaacatgccgcagaggagatcagtatgagaggaggtatggaggacagaatggatctctaggtgaaaatggcaaaaaattcataacataagcatatgacagtgtgaaacaataaaacaatatatttttaaagagaaagaatctgcaagcacatacttcagtaaatctgagttctagagatggaaaactccccagagaccacctggaccaatcctggtactttgcaatagaaagcatctgagactcagagtagggaaaacccctcccaaactcatacaggattgatcttcgtacaggagcaaagcaaatcgtatacaacttggaatgctgttttgtcaatggattcttaaatattcaaatagctcacatcatcagtttgctgaatgaatattagactcattcaaacgccaccaccgtggttattgaacagctgctctttaatattttaagcataccagtctttgagcagattctcaatgaatgcttggttggagacctgtgaatacttgatttgggggccttttaatgtgtgatatttgaggaaaggctgttatagactgtccttttccaatctgtttccatccttctttttcaactgacaaataaaaggggaacttttcttcactctttggtaaatcaaagttctatggaagaaccaagtgccattttcactgtggtccagtcactcaggccaagggtgtttctttccccctgacatcatagatgtatgccccatgcatagtgttaggacaaaagggccactttctcaaacgttattcagggagggttttgggggagccttcctgagcttcccaatcaaaggctcacaaagaccagtggtattcctactgggccaggacctctgtgaactgtccatcttaccattaagcctctgtctttcagtcgacaccaaggaggtaagaagtcctagccgttgctgtgtatagtggttttcattgaccctgagtcagaatcatggggctgatgagaaaaatatttgaatatgatgataatcagaccaaagacataaaccatccttggaagagattcccatgtgtgcgagctcagtgggttgttcctgttatttctgaatgtccaggcagccagtgggaggctgattatgagtgaggctatggctctttggttggctttgcttcagttagtgctaaggatggcattactttatcagttgcatatctcaaatgcattaatacaaacaaacaaagaaaaaaaacccaaaccaatcaccaagattgtacaagagatttttgatttcggctttaaactttattagaggcttctactagaattcaaataaaagaaaatattatttaaggaaattgtgttcagttgttagtaaaaaagcaaaaacaatgaccagttgtccacggatgctcagtgtaatgagtaaaatgtaaaatatattccttccaatttcccaacagcagctaattaagggtagctcatttaaaaacagacctaatttaattcactaatataagtgttcaattaaagttgttcctactgctttcttctcagaatgcctctgcctagtcttacatatgatgcattcatagtatggagtcttctaagggttcaagtggtaatgaaagtgctctcaagacttcataattgcccaaattaaataatatgcatgtaaatggagatttgagtgtaaatgtgctccctgcgatgctgtaagaaaatgagaccctatatcccaaggtttctcagccaatcagaatgaagtccttgtcattttattctataccactcagaatagtttattacattattaaatacatgtaacatgaagtacattgttgtttaagactcattgatttaaacagaactgttcttataaagttccataggcttttacataaaagagaagagctcatataaaattataaagctttaatataatataacagcctatattataagagtctcccatttttaaagaacctaccaaaaatttttaatgattttattagaatgtctgtttgtgaattctggagtgtcatgtctaattatacttaatggatttaagcatctctttaatgggatctacagcttaactcaccagtattatgttccggagccttctgcctttacaatgatcttactttattcttattttgggtggcattaaaaagaaatgaaagcctacaattctgtctcatcttccaatggatatagtgaagagtacagtgcttattataaagttaatgtgaattaccatgtaattgccactgactgcactgtaatgattatttagtcaccactaagaattctctgccaaataacatacattatttcataggagacatagaattcactcatcatcccggaactcatgatggggaacgtattccccatctctttagtggaatggaaacaatgccgatgttcacatctaaataatcaagcttggggcaagccaacagcagcctaggatatgagtttatcggatctgatttgctgatggtttaaacacttaggagcagacagctataggagccaattaaacctctccaaggtgcacagaaggatctctttgtgagaaatgatttaagggaattgcattggccctggaactggaggggagcaaaagcactagggatgaaatttcagatgcacagcactgagcaccccacctcccttttttgtttttgttttttttaatttttttaaattaaaaaaatttttttgttagcttcacgctgtttgggtggctgctgttttatgggacgggtgtgcacttctattttgcaagctgaaggttatgctaaactttttctctgtgaaaatttctcccctttggctattgattatgatggtgcctttaaacgaagccttgtgtctaaaagagtaacacaaaaacaaaaacaaaaaaaccatgtcagtacattctgttcctctcagatattgcatcttatttagtgtaccggaattcccggtttaaagtaatgacaaaatttatggagaaacggataaaaaaggttgtaaaatatcgatttggggaaaataataacacaactcatctataataagaagaaaaatgaagcaataattcagggggtatcgagcggcttgctgctggcagtattgatccagccctttacggcatcggatcgtacctgagattgcactgaaagaaagaagagcattccttcgctcattagttctcagataccatcgccttgttacatgggtcctgcagagccagaattgttgcagctgggagaatgggacccgcagtaataataaataaataaataaataaataaataaataactcgctcagaaatctatattgccttaaagccaccgtgcctggtcttaacacatgggatcccggggtttataaactcttccttgccttggagcagctaatgacagctcctatgctatgtagttcatttagggcccaaggagatcttcatcttatataatggggtcctgtgtttggaaggaattcctgtctctgctgagggattctgaatctaatgtatttcttgttatgttactaaacggaaaacagtacatttctgttgctctgggccaggggaagttctgccttttgattcaatgagttactgtctaatgtttgaagacacatccttttgaacgagctaggagtattacttttcagaaagtctttgcatatgtgtttgtgttcatccattgtgaatttgtggtctgcagtaaccatacatttctaaatttatcattagttgttaaggccttgagagacaaatcaaattggtggtgtacaatcttgacagaaagccttcagaggcaaactacattctgtcattcaagagttctaagttctttctaaattatagaattacctgacatgaagtgctgaggaaatgggaatgtctgggtctcccattcttgattgttgttttggagggaaagtttgtaataatatgcaaattccaactctataagacccttctgagtgcttctcttagagtctcttagaggcttgtaagtactctgcagggtaagactcttgttctcaggctacccatgtcctagaaagaaaagcaaaggaaagaaaggcatggcatatgagcagagaatcaaacagtcagcttggagatcatttggagaccagaggcatagatctggttcttagcatcctgggaggcaggctcctctaacagcctctttcttgcacatattaaaagagtacagtagatacttgcatagcaatttgagccagtatctcgttacccaggtaaataagcttttgtttccaagcctgcctggactcttctctagtgctgaagaaatgctgtcatttacccagaagcctcgctctccttgtcccatcccccagctgctccatgatcattatctagaaacatgagccccaccagctgcctatgttctctgcagatcaggcttcctgaaatttcaataagcatcgatccatgtcattgtaccagatccttgaaactgtttctataatatttgtttctgtttctaactctaaatggaggagggggaagacctaaattttccaaagaagtggagggtgatgcccggtgtcaataaaggtagatgggtagatggaaggggacagatggagaagcagagagaataagacatctaaccatcaagactaactccccaaatagctttcaataaagtacaaagcacacacacaccttctctatccacatagtaagattgaaagtcatcgctgagtcctaaactgtagatattgaaatcatgagatgtatggtacatttagcagaggcgttggtgaagtgcagaagtcattttaactttgtcttttaattttaaagatttattggctgcaaggcaagggaatatttataagcatccttaggtattcacaaaacatgtcgttgccaaacagtgtggagaatggaaagaaatcatcattacgaagccggatgattcaggaaatgtggctataaatacaggagtgacaacatattatctcagcctcttccagctccattttttttgagtcatgattattgagtgtggcactgtgggaaggctgctgagtctgtttggaactagaagaatttggggtttaaaggaggaaccaggcgtaatgtttggcaagttccaatacaataagcagtgtcaaggcatctcagcttgagtaaatatatgttgtataatttgcttctatctttttcatttcttataatgaaaggaaagtggcaagcaacaagaaagcaattaattgcaacaatggttgcttagctcccgtagtgcctgaattaaaaagaacattaagattgcttttctaatagctcattttttaaaccattggtactttatgcatggcagatgcatctgaattgttttacaatacagttttttttctcccttattggcaaacagattgtcaacgtgaacttttgaccatcctgttggttgttcccccttgttatcccaacttcacaaaggcaagtgtcatatcatagttaatctatcagaagccttctgtgtgagaggatgctggtaatttgagtcaggctgtttattgaaaagtaaacttagaggctgtcattgtcatctcctggaatagattcaaaccacagtcttgcaccaaatagacaccaaataaacaatgaggtaaaaggtgatcctgtgctctgtgctcctggcagggtgagtggacattttaaagttctactttcttgtcaaagtaatgagacaggcatattttcttcactctcattgcaactgttgaatagattctaggaataaataacttagctcagatcgtcggctgctaggggagggacagatcttctttctttctttttttgaggaatgtggtccctcatactttcatactttcaccattcctcagcagatggctccaccacccacacccagtcatatatgcagcactagttgggttaacaaaaaaagaggacatgaagtcgggaaggagtgagggaagggaggtcacttttttggagtaagggggagaaatagggagttatattgcatgcttataaaaatttccccaaaattagtgaaaatatttactaacaaaggatttaacacaatacaggcaaagggcatttcagggcttgagaaatggtggcctaatcattaagtgttttccgtccttcccattctatacagcagttccctggcaatattcattctctggttcaccaacatgtttctccttgggattactacagtgcctgacctagtggatgccccacacccctcaaatgtttgtggagtaagcaatgtccaaatacttatcaagggacgaggccataattactgctaagactctcaaggcctttcctttgtgccacactctgtcttaagcatgccacatattcccaaacatctgctctcaagagactgtgagacaagtgctgtgctcctcaccttataaatgaaggaacagaatcagggagaatttctacgtttgttttaggtcatagaactaggaagggacaaaatcaggatctatgcacaggccaactggcctcagagttgtgacttttggctgtcattaatcatacacaatggtaacagagaggttgtttgtgccttagctattcattcattcaatcattcactcactcattaaatcattcatgcattcaatgtgaattattcaccctccatatgttgattaactggtgatactctgtatatgatgggcacattccctaccaacatagaaaatacagtctaaactgaccccttagctaagtcatcccagactttcttccatgactcgtacaatgagggatagttgtaagctgggtttattcagtagatgaaaactgcatacaaaaatgcaagaatttaagggaaggcccaaagagaattgaggtgacattgttttgcctattatgaggtacccggatacatttcacttttctgttgtgagtataggatgcatgtgtataccacatgtttccagtagccccggaagccaccaaagccccttcctgcttccaaattctgtgaacagatgtgtggtcttgccatctgaaccatatcactgacatctgggtcctgatgagccaaacattgttcctgttccattccaaacttaggaccaacttatacaggggggactcagcccatgaagggggacagggtatcaggaaagggtctctttctcttctcagcatcttggttagaagtcactagacggaggtgacactatgtgttttatatctgctgtttccatttcaagtttctgggaactagtgtccatctgtaaaacacgctgcaagatttcctaagtttcacatgcataccattggcagcactctacttctccgagtggacaggtctcttcaacatttcattcattcattcattcattcattcactcattcattcattcacctgtgtctttattgaccaaaactttattaaggggtaaagaacacacagctggaaggctagagtttgcctaatagacacaatgtttggaaaggagtacaaagcccagtaatggatgttgaaggggccgattgatggatgtgtgaacaaaaaagggttagaaaaccattatgtttttacttcaagagattgcttttaattgagaatgtattcaagtatagtattccaagttatccttgaaggatgggaaaaaaattaaaactgaatcaaaactaatttgtctcatcaggatccagcgagtttataaaacgaatccattgacttagaatctcccagtttcatctgcttttgctcagggtcatagtcaagatgactgattatcctggaaagggctctgtagcctatctcataaacagaacaaaacacatcacacttggtcagaaagcaggccaaatcctccctctccagaggctgggaaagttgagctgcggttgagatttggctgcaaagaaagaaacagtcaaaatgagggcttaaacttgggaggctcaagggagagtgggtggtgtgtacctaccttgagggcccaggattccagaagtatgttaggacatgggctcactccaaagcttatcaaagcaggctcttaagttctgacaactcttaaaagtgctacagatgtttagccaactcagaagtttcaggaatatctgatttcttacactttgcttccaaatgtttatccacactattccatgtagaactttaggtgatctgttactaaaccctggtttgggaacctgggtttttgggttcacttctgcagatgaaatgtgtaccaaagtccttcataagtctccccccaccatcctccacagatccctgcccatcattggcctgcacagctgtccagtactggtctttcccctcccctaagcattgaactgggtcccttatgggtctcagcactttaaaataaatgtctatagaaatttcaagtctatcatgtatctatcaaaatcctctgagatccctgctcttctctttgcttttaggtatctgtttgactgagcccaataatagttgacagtaaagtgaatttccccaaaatataaacaactctgttattttcttgagtttcattctttgccatttattgaatgccaacatatgccaagcatggccacccagcgtaacaaacagtaaaggtgagacagagaggctgtgttgtcagtacaacacaaatttaagtgatgtggcacactgcggtggtagtctttgtagatgcctggagttagatggttcagtctaagattccagggaaccagtccaatggaaggctgcttaccctataggttgagagttgagagtggaaaggattggattgagtctgatttttctgatttctctctaattattgaggtccatcctctttaaacgggcactaagcaggcgttctaacataaccaatacatttgtttatccaaaaagtatatatagtaagaagttaggagaaaaattccattccacccattcaccccctcatcattatctcttgtcaaaaaaaaaaaaaccaaaaaaaccaaaaaaactgttcttcttcaggatttcagaagccacaggctgtaactccaaggtcagtgtctgcactcatcccagctcccttctccctttcatccccacaagaggtttgaggatagttgggtatttttctttttattctcttaagatggaaaatcctgaagattgactcaatattgagtaagaaagaatatttgaaactaaaattccgtgcacacaagtgaatgcagtctcctttcttcatccacatcttccacgcatttttggttttgtagagagcaatgaggtacttggagcagtgagtcaaatatttcctgctccttggcaggtagggctgacatttttgatctgatgtgacgggtttagaaatgagcctagtggacatgggtggcataggtttagaaggcttttgcggggcctgttttgaaaggatatattgaaccaaaagaaaagaatactccatttaaccacgtgctttcttctcagtctgcatagcagagagtttcagacccttgatgtttctgagtattttgcaacaaggccctcctcttctcttgctaccatacagctttgtgtacaggtgactactgtggacagccaatgcagaactcaatggaagtcgttgcctgatgggacggctaatgtggttgcagaaggaagcaaacggcctttcagcaatcccacatagttactgatattcgcatgggggaaagccagcgtttctgtgtgaacagaggaaattgcctcatgttaatccctgtgccttcaaaagacatttgggatgtgggactcctgctagggtttcatgcagtaatatataaaatatgcacttgaccaagagcttgcagttttgactaatgggattattagccaatgagtaatatgctaagtttgccaagtctaagtttatggctggacctttgaaagccagaactccatgttccgatagtcagaggcattctagtcttgcaagttcaaccctaattagaaaaaaaatactagggagttattatttttgatcagaaaacttgaagtagtgagggtctttttgtttatttgtttattttaaagactacaaatgctaatattttggaaggattcttagggcatgttagggagtaaacctttttggaagtagaacatttgagaagggtcggtggtataattgaataatgtaatttgatcaaaagagaaacaactttgatgaagtagtttattacttgcataatttttcttaccaaacagagtgcacagctaccaaggcagaggacaaattaaggagacacaatatccaatccaagtttggcacacgagagaaaacacctggctgactgatttcattgtttgctttccagctagtgtgcttggtgtggtagagacactttgtgggtttcctgtctttaacaggctagtcgccacagatgactaccttggaaaaaacatgatctaacaccgagatgacagccaggtctcagcagaaggatacaatttcttttatatatatatatatatatatattctatgcacatatatgtatatatgtttatacatgtacacacacacacatatatattcatatatattgacaattctgtaattctgttgctttgttctatttttagctgtgtgtttaaataatttcaggaataattgtttttaattgtctttcgttgtaggcagcacagttgagagtaaaatgaagagctcatgaggtcatgcagccttttcttattcacacacattctgctacgtatgtgtgagggttatcagcatctaccccagtttcattcaccattttccctctggccttcatgaagtttgctttcttctctacagacacagactagctcagttcaatggtgttactctgctgttagactgcttacatcatgtttagattttttttttaaagactatgtctctctaccatggttcatgagttccatttttgggaggcattgatcctaaatcttgtgctttatttttctcatggcattgagtgggtagaaacaaactctagttcctaattcactttaaagaacatgaccccccccccactttgttcctattttcttgttaaaactaaattgtgtgcaatttgtaggaaattgaaaccacatttttttcacttttaactttccaaaattaaaatttatggggggggggaagcaataaagtgcttacgaaatggtcatctataattatcttcgtgggttgcacacatttgaggaaaatgacttggagaccctatcaaggttttacaaccgcaggacactgggcttctcaccaatctcccagtctcccagtctcccagtctcccagtctcccagtctcccagtctcccagtcccccaggtgttggagccaagattcacctccagaaaaggctaaagcttacactacacattcaaacatgcagtgtgcgcagaggccctcaggagtgctcacaacacaactaggcaggatctcaacaggttttccccttttgttccgtagcgactgttgttatagtgacatttaccatgtagaccgcttctatggctagttctggacttgatgtcagttcctgtaacgttcttgtcacgctctacctggccgtggaaaccacagaaccagttacatgaactgcctgtttctggttgctgctgctactgttttggattctgagttcagggctctcttcctcccaaccgttcctatgaaacgttctagaagacattcaaggtctgagctatgatttgtttccatcttggaggaaaaaagtgtttatacttgtctgctcttttgatatggacattatggtttccacatgaacaagagtacattttctagtctgaaagcattgatgtttccacattagttttttgatattattgttgttgttgttgcttgattcttttggtttggtttggtttggttttctttttgttgtttgtttgtttgtttgtttcacttttggttttgttttagaagaagtctccctggctgccctggaacttgttatgtagaccagcctagcctctaattcacagatatcatcctgcctctgtttctggagtgttggggttaaaggaatatatcactctacttaacaatcaatgacaaatgtatcaaaccatgcctaccttgaggtaatatgtttagaagtagtatacttgatgtggatgtgatgaagtcattcactcaattcattcattcttttctcccactgagtaaatatttatggaataccttcttggttttatgtcttagatgaaactctaaatatagagtactcaatacaaagctacaagtaatacttgcacttagcaacttagtcattgaaccttagtgctaccatcaccattacagagcatcagggtggatatgtgaagccttaccaggcgcctggaagtacctaatgacttagtttcaccagcaaatgacagccatgcccaagaaaggcttctctgaccacttagagaagggcaatgatttgacatgtattctgaccatatttggctcttcgttataaggacttctgaccaacgaactcagattcataggattcatttaacaacaatgtcagtacttatgtgctgtctgcttctaagagtttacaaatgcagaagcattggctcgagcacgactcggccacaagtactgccctgatgctacagataaggagaaggaggcaagaagggttgagtcatctgccaagtatttggacagtgtgaccacaggagccactatctgccagtgtgaccctagaatctaccatcaaatcctaacattatttccaactacttcaagatttccataagcttgcagcccctttgcaagtgagtgtcccacacttggcatgtagcaggaatgtgcatgagactctctagcttgctaatgggcagttctcactaaagctctggcccaggagtccttggctggagaacacccttgaggtctcacaagccaagggtaggaagagtggctactaagcctgctagtgagtccaagtgctcctctcacacatctctggatgatttgctcaaggaaataacaatcatttccatttcaaaacaccattcacaaaataacgtgtgctaattatgtagcaaaacagagcaaataaacaaacaacccccccccaaaaagcaaaaaccaagagaggataaaagggtacaaactcacccagtactcatcacccagtaatggcaatgcctccctggacttctctgttatttttctatgtataacaaacacaggcaaacatctttttttgttttgttttgcatctgtgactatattgtactgtgtgtctattcacacatgcagcttcatcttctgctttatttaatatacccctttcctcacacactaagtcttctccatagcacggcattgaagagaagcataatttcacacagtgtagacttactgtattctcccaccggctactgctaactagttaagcccatctttcacatataactgcattatgatgcgctgtgtgcttccttttctaacttgatgctttaataaccattgtaatttcctacaactaaattgttctaaagcatttgaacacttaaatttttttcctacataattcttttttttttttgagggaggtagatgcctttcaaataaaacatatttgaaataattttattttctattatagtatttgtaccataaaataatgtcataaagtatagaacagtggaaataaaatatgcccacatgtatacaagaactcacaattagcctacaaaattatatctagccataaagtaagcatgctaagaccctagtatttatattaatacagccggccatacttgttaatgtataagtgtttaatctatcggtaccccctctcttttttatcacccaactgcaaactgggttcattttagataattaccttcagtactaaatgtatattatctgcccagttaggaaatagattggagggaattcagaaatcaatagtaataaagtaaacagagagaatagaatctatttccgctcttactatttatttgaatctactcttctagagacagggtccctgtctaatggatgttggacagaggaccacaaataaactctgctgggagcagctctcctttaagaattgatcgctgtttcagtaactatcctattgtttgaatattaaaatggcaggtgcctgtggatgccagtgatgctctggcttctgctgtgctcagaattgatttcagtttctcttcagtgtttatacatctagccctctgtgtggctgctttcggcgcaacctctctctggccttcataaagtgaatttttgacagcagattgatgttagattcactgatgttatgctaaccacaatctcattgtccaaagggaaataaaatccactgtcccatattgctgacaataaaggaagccctctataaagtgtcagagttggtgccatcatgaggaaagataatttaattctcaaattgggacatgtctatggctactcctttagcacaaatgtgggagagttagtttcccttgcccaggctaagaatattccagtgggctaatgagattcagagaggtggcattcccagactcccacaatcaagaacatatttctgtcacatagaggaaactcataccctgtgctctttggtgtgtgcttagtttctgcctgtaattgtcactagtttcccccaatcctaaaatgtatcagcatttattttctcaagagtgcatctttcactgtagactggtccgtctggtgtttgaatggcctgatttggttcattcatcattgaattcgcaaggccaggcttatggtgaaccaggaaactccttcgatgcttctggaactagagaccttttcggatttgaagttttggctaagggaaacacagcaagatgctgagtttatttccagagcacccaggagatcggcagagactgctttgcatgtcccaacatgcctcctcctgtcattttcctaatactccgtgacaatggttaaaaagtttcaaagggagccacggagtcccgtgcataagcatttgcatccacttgccctttacaaagtcgagtcatacatgatgtcttcatcatgtgagctgccgagtcacacacccttctgattttaagaggccatgtgctcagtgggagcttgcgcttggcatccttctgcttccagactcttgcttctgttggctgctaaactaggctggcttccacagtccttggccaggtgatgggcaggaatcgacaggaatcctctgggtgcgcacctccgattcccgcttaggtccttctgttacggggagagaatggaaagtgaaatctcagaacagccctggcatttcaggagagaactttgcgctttgttgtcccccaaccccaaccctacccctaccccacccccacctccatcattctatggccccttcacatccaccaggctctatttgcaagcccagtcctttcctcagagggcacatctaaagcccgattaactggcaggatggtgttatttgtgattcctgtgcaaggtgtctcacggccctgattgggaggatgtcaattttgcaaggacagcattatttgtagcatttgctgttgcttagccccagagtgctagtttgcttgggaaggacgagtgcttaatatgcccacttcttccctctcttgtcccctctgcgttcctgctgaatcttcctttctaagcacgaccctgagactgttgcccttgtaccagccattgagaagagaaggcgctccggtgcaaatgggtcattaatggtgaatctggaagatagctaactgatatgtgcgttcaattaagatgagtttttcacttaaagactccccaggaagggcagctttcccctcaattctgggccatgagcagttaatgaagaaagcatatcagaattccacccatgtttcccgaggcttccttggtcccatataattttcaagttactttgatgaaggagaacttgcaaggtgagattaaacaagcaggaaggtgataatgggggagtatgtgtcgtttctcatcttttctatgggtgacatcaccaggcacttgacaaatttgtgtgtgtgtgtgtgtgtgtgtgtgtgctccagtcaaatccatttgggcaggtttgctttttaaaagtgtcttactaaatgctagtctttgtttagcacagggagacaccagctcctgtcttctgcattgaatctagcctatgttttatggtttgtcttctcctgtgttagtctaacggagagacatcattatctacacccaaagagacagagagggaaaacgagaagggaaagctcagagcaggccagatatttcaggggagagccatgcattttgttgcccctcccccacttccacccagttctacaggggcagtccaggtgaagggtgatggtaggtggccagtggagacagactgtctgtattaacatcataatttaggtctcactggagtgaagcttggtcaggacccatctgtcctctgtcctggacatgtacctagaaaaacagtgataaccacagtagaggctgcccatagctagctagcaatccacagttgaagctctagtgcttagcatgcagtctcgggcacacagttaactatagtgtgcatatgtgttagggggctactgttcttatcccagttccactgtgaagactttggtaaagccagagatgttttgaatttcatcagtgtggtcatagtagcctttaaaggacatgtaggcaatggttaaaaacaatataaaagtcaggcctggtgacactgtaatgacagtgactcaaggagggcaaggcagaagggccacaagcttgcctaggctacggactgagttcacggcctgctcaggcaacttggtgagaccttgtctcaaaacaaacaaacaaacaaacaaacaaacaaatgaaaaagaaggccacagatgttgctcagcgcttggtcagcttgttcaaagctctgggttcaatggctaggacagttcaaaacaaaacaaacaaataacaaacaaataacaagatagaagcacttgaaaacttcaagagacagctccagggtactggctgggctccatatccttggctgttcatccttgcagatgcgtcctttctataaagtgatggggccatctggtttggaaagtgtcaacatctgtaggagatagcctgtgtccgaagggcagcaccgggactcattttcagccgaagcggttgcgtcatgcctctgatcagtttttgcatctgtaaaatgagcatctgtgctagtttgatctctattgctgtaatacagaccaccatgaccaaaaacctgggaaggaaagttggtttggcttccatgtgccaattacaggccatccttgagagaaccagggtagaagatcaaggcaagcactgttgcagaccatggatggacactacttattggcttgcttcccatggcttgctcggtttgcttccttataccactcaggacctcctacccatgggtagtaccacccacagtgatctgagccctctcgtatcaatcattactcaggaaaatatccacagaacgtgcctacaggccaatctgatggtccttttctaaattgagattccgtcttcacagatgactctagcttgtttcaagttgaaaacaacaaccaccaacccagcttactttttatgacactaaaaacgaacaaacaaacaaacacaacacaacacaacaaaaatggtctttttcatttacaacctggcttctgtggaggaccgattttggagctgggttgtgatcagactgataactcctgtctcatcttgcacttgggttccccaagcttgctcttttttttctctctaggcagaaagctttctgctgcagtacagtcctgcagctttgttcccgtctgtgtgattacatcaggataaagtccttaaagatgtaaaagcatgcatttgtatctaaaagttgttgggatagctttttgaagggatagggtgaagcaatgcagtatgtttgatttttgtccttaaagggtgacagtacccattgtcccaatataatcataaaatttttccatttaggaataggtcagcagtttatcaggccgatctctgcccctgcagatatgtctctggcctccgaaaaaggtctgtaaggggatctagaacactggcctcaggcaaagttagtcccatggatagggctaaagatgtacttttcatttcatatatatcgtccaccttccaatgagggttggcagacaggaacaggagagtagaaaggaggtcgcttcctgtgcttctgtttgttatgcgatttaagcaggcccatgacagccatcattggagggaaccggaagctgctgctgctgctgctgcttggcattttccatctctaataccaatgatagaactgagctgggagaaccctaagtaggagctaggacttcttcctcctcctcctcctcctcctctccccactttcctccctccctccctccctttcctctccctcatttcccctctctttcacagttttatacatggggtctgtttatgcggctctagctggtctggatgtatctctgtagtccagccagtcttaagcttgtggtgagcctcctgcctgtcaccaaactgctgggattgtaagtatccactgccatacctgtctagatggcatacattaaggctgaaaacactgatgtcactggtgtggccctttacccacttgggatacaaaggacactagaaatgatttctgtggctctggggactccttcagatgattcctaagacctgaatgacgttctgcctttaaacatagtatttgatttgtctactcataggtggtaatgtttcttcagaaagttcatagccagtctttattagctattagtgtacaagaattcctattcaagtggagattcaagtttatatcatttaaacttatattatcaacaactggcctgccaatactctatcttgactcttcgcctgtaccaacctgctatacagtctgttcatgataccttagaaccatttacaattcttccacgggctgatccttgagacatgaacggaaagttacataaccctggcaaccaccaaagcaaaattagtaaccagtcttggcaccctaaggtaggagctgttccacgccatccttaaaagttattggcataatggtagttgggtctgccctatacacacacacacacacacacacacacacacacacacatgcacacaaacacacacacacacacacacacccacatccacagagaaaggatctcagcctcagtgtggtctagttggtttctactgtgacttacaatggcacttgctcacaggtcaacagcaggaggtctctgtccttcacctctttctaaatagtctagtttatgctcaagcacctcccatcaatcccttctttttttctacatcttcgagaacaaattatatccacattgtgatttctcatccaagtagtttctgggacatttttctttgcagtataatgagaatcaaagtctttctatcaggaatttagtgatagttctggcctctctggctctaaaggcttgatactggcattaataggataattcattattattatttttcagtagatacaggataccaatggtcttctgttctgcctacttggctcaggtgtgagagttcaaaccttccctttttgctgaaggtcaagacctgtgtcaaatttacagcaaacccacttactgtgcttggcattgcctttggacttttatcaccatagtaggtataacctgaccaacaagtaattacaccattattttttatgtgctgctttattgcttgcttttcaaaattggttttcagcatctcatgaggggttattgcggaagtggccccatacccattgcccacacagtaactcttactccaaaaccagtgaattgcttaactaaacacctattgattagtatacaccagggaccaatattaagactaccaaggtccaaagtggaaattaaattctggttacatgtatattatttttgttaatatgttgtggcaagaaggcttcattccttcatggatcccaagaaccagtgtagtgtaggtagaagaagttaccaggatgagtcagtgtacatctttctgtttcataaaagacagaaatcaagtatggaagaagaaaaaaaaaccatgaatcataggaatatcctgtctttacccacgtaatactgagagagtttataagatgtaaagatgagttttacactcaacaccacagctgtttgtgataggtagcagagcttttacattgtagcattaaggatggaggtgatgctgtgtgtaacatcaagattcagatgatagtgacacattggcatgaaaaaagaggcaaggaccaagagcctgctgtgctcttgcccagcatgatcttagacaaagtccctctcccccatgcccctccctctcctagctcttgggataagttaagccatagatgttcagacctttgagtacgtagctagttggggagacaaaaggaaacctgagttttaggagggaaacagttcccaggcattctcacgttgtgctggcagtggtggccgtacacatcagccatctgagaatggtccaacctttccaaatgtgtgaggtggtgtggatggaaccttcacttgcagttcctcattggatttcagtgctgttgttctatcttggtattcctctacctagtttggttggcctttgtcctatttggtctgtgcatctttctctactcagttttcacctgctggccttcccaccaggctcttggtccttgcctcttttttcatatcaatgtgtcaccatcatctggatcttgatgtcacacacagcatcacctccatccttaatttgttttctgaactcttctgtctcctttccaactgtctgctcatagttttcactgaatgtacaactggcacctcacatttaccacatctgaaagtggactcaaggcttctttccttttgtatgaagttttcttcttgaacttttaaaatattgccaaattatgcttctctatgcccattcagaccccttgctatttctcaaaacttacatcgatttaaagatttgtttgcttttatgtcacatcctacatcctttcaactggcatgtagggaagtcctgtctactctactctataatatttctactattgatttgcctcttccccaaggcagccctaccattgttggactcttacttttccatctagaacactgcaatagtgctttctctaaaacccatctgcctttgactctcagtatcacctttttgaaatagagatcttctcattactctctacacatggaatagttacatagctcctgttgcttcccaaatcaagttcctggcaaggcacttggcatcaagttctgctataggattaatctttagcactccactaccaacacataagctatgctctctccagatcacaatgcccacccttgtttaaatgcatcccctcatttctctcctctttggcacatggtatgcattttgcacctatttttagtggaaaactcatattctttctctcatatccagctcaaagatactctctttgcaaagtgtttcctctccatggtagagagttgttgttgctgttgtcatgtgcagtggactatcagtacattgttctgggctggctgttcagcagacttctggacagctgtttgctatcaggtctcacaattaggcatcccagggtgtagtgtggcatactgcaccagactcatctagattgtcaagattcaggaatgctaccatacctttcgttcgtttcatcctcttccacacaaggctagcctgatgcacaccttcctttcattcatcaaattaaaccatccaagaataccctaggtcctggaattttcccatctaagaactctgtttcctacctattttcccattgtcagttcccacaacttgtatccatttcaagatgtatttgtttttattttctttgtattcttgttttgcttgtacatgtgtatgtgtacctcatctgtgtttggtgcccatggaaccagaaaaggtggtggacccttataactggagttaatggtggtgtggaccaccacgttggtgccacgaactgaacccagaacttctgtaagagcagtaagtgcttttggcatctgagccatctctcagatggggcttgaaatagttgtatctgagttcagacggaactgtgttttggggaaatggatgagaatctgtgggggtggaattttttgaaatgtgactccaagttagtgtaatgcaaggagaaaggctgagctatagggataagcaaataatccttagggctttcctggagtctagcactcttgcattatgacatttaccacattgttttagagttctgtttgtgtctttttgtgctgcctatccctggagtagcttgcaactgaagtatgtgtaaatgaatataatgaactcattactgaccaccatcctttatttctaggctagggcaagcattttatgcatggtaataaaaagcatccattgagaattatgtctcaaacattggacaaagtgcacatcctgcttttgcactgtagacaggaaaggctcaaagaatgtcattcccagaagacacatagctggtcagtgatgatacctgggctcatacctagctctgtcttgctccagaaagcttagaacaaagagcaaaagactgtcttggtttttggctactactcatgtggagtctggtgacatgggcttcatgggatatgtggagttaaaaaaaaaggactagaaaagatggcaagtggaagagtaaatgaagagtaggaaattattagcaagatctcagagaccagagctaataaaaaatattctggaagcccctcatttttcctaactttctgttctaccaaacatgctgagggaaggttgcctggactagtctctgccctttcatttataattctgtggcttgaggatatctacatctctacacctcagctttcttctctgtataatgggaacaacttataattccttctttacaaggttgttgggaaggttaggtaagttaatccacaaaaatgtttgccatcttataaatacatagggtttgtattagctgctgctgttaaccacaacaatgatgatgataaggaaaaggctataggccacacgtcagtgagagcgctgggatcttgcagcacctcagcatttaagcaggtgcatgatcctgcatggccctgtgttcttcacaacctcatgcactatgttggcctgtatcctcacaggaattttataggacatttttggtgtgaaggaagcctgacactgcacgcctgtcaggcatcacacaaaccactagtccaaggtcactcacagttcaatgctaaactacattatattccctgggaagtttgttctagctttgaaagactgggttgttactggtgattatagccaaatacctgtgccaaactgaatgtggtgacagacatacacaatttcaactgaggcttggaggatgccaactttaaagccagtctgggctactagattctgacacagaaaacccaaaccaaagacaaattattagaaactttattatttgttttttttttcttcaatctttgtggatttttgttggtatgattaaaacagctgctagtttaggtcagacacagtcactgtcagatgtaagagcacagcgatcaggatggatgttgcttttggctaaggagagctttgaaaggattactaagatgaccaaagtgctgtaaacaggggagctctgaggagccctggcataacagcactgtgtccaggcactgtgagaatgtcaaggccgaaagaaagcggccgaagtcatgttcaggcagaggaagcagctgcggctgtttcaggatggtgatgtgtggtgccagcaatcacccgcgggagtggactctgagttcacttacgtcttttctccgtgatatttaagttggatttgaggtgggtagaaacatctagacttctctgcaaggcccttgtagctttctatatgacagctctgttacatgtgcttcttaatttcatttcaacgttaccaagtaactgctaatcatctcctgcctccagttaggagcccttccctgcctcatcaggggtgtggccatggtatttggagtcccctttaccttacttttcttgggattgtttttgttcccgctctgatggtttgccagccgctgctggactgtctccatccaacaatactggtttcgaggaaatggctctgcggacaggtttgtgaattatctcagaaaactgtggtggcaacactcaccaagtcctcaatactgaactctgagcttggttagcagcaaggcttggaaaggagtttaagtctgccctctgacttggcgctgtcccccgctgagagccacacattgctggtggcttattctcggagagtaataagtattgttgtttagcaattgtgctgttggaattcagctccactatgtctgacagtatttatctaaaatactttccctggtgcgtgttcaagttccagtaaaccgtgtcttattgtgcgaccttttcattttcctttgaaaagggatcagctcgtcagataaaagctacaagcccaagtacaggaaaaacgcgtgctcagaaaatccaagcatgattgaaaacaagatgtgttaaatcaatgcggtttatcgcctgcctattcccggcaattgctgtcctaagctcattgcgaacacacgcaggatgataaaagtccggtgtcacagcactcgctggggtggggacagaagaaaacatgtttatcagacaggctgggtgattttacactcttgataacagttattgtcaaaactctctgggaagaaatctgaggaacaattatagaggtaatattgctcttgatatatcagaagatccgccaggagagaattatggatttatccttaagaaagaaagacggagtatgctggccttcactccttaaacaccaccatccattacacagtgaaaatcagccttctctttacccttaaaggaacaaatctgtctttaaaacttaatcataaatgatccagattttttctaatccaaagtaaaaagattgaaaggccataaaatagagagagatatagatctataaaactatgacaatttagcttcggtttgctggaggggattaattttaattttatacttgaatcaaatttagaaatcgaaatgacggcccacagaaggccaaacggatcatagaccaccacagagaatggcagggtgtcttttctcctcagctttgttacaattagagaacaccacagtttccctccagtcctcacaggttcgccggcttcctggtctggatggaatgtaaccctccagagagcagagggagtctgcgtgtgaggacatgcctctcagcaaggaccttctagaaaattctaggtagttgtgatatgagatagatctgcccaatgcaccatcatagcattatgaatctctttctcaaaagtcaaacagcccttaaagcttgtcacaagccgtgactataaggaaaacttggtgtgttcatctaattgtcaacttgacataacatacaatcacctgggaagacattctccgtggagatattgtctatatcaggttgacttatgatggattgttttcattgctagattgaggtgggttgaaagacccacactaaatgttggcttgggtaggattcagaactgtttaagagtgaagaaagctagttgagatggagcaagcaagcaaaaaacaaaccaacaaaccgggaatccataactttctctctctggtcctgaccgtggatatgatgttttgaatttctgccatgagttccccacagtgacagaactatgcactgaataaatcctctccttccttgcgttgctttgtctcactgcagcaacagaaagaaaatcagggcattggtgaggcagaaaacaaagtctcctgatgaatgtggaggcaagtttaaggtacattcgacttgctgatggaatgaacttaaagaaatcagaccaagacttgttcttctgggtgaagttgagattctgggcataaagattgccagtatcataggcaggaatgaaagtatagggtagttgattggagaataagactttttcatatgctatagattcatcagtaataaagagtaatctcagaagatcaagcaaatctctgcacaaaaaacaaaatcttataagtctccttctagactaacttatactactaaatgcctcaatttcccatgtttgaaaggggcctgacttttagcatatatgttaaggggggtattgcagatgttcatgatatcatatctgatgaaaagcacttagattttcccaggaaaggagtcttctcccatgaatttggactgtgtttgaaatggcatctctatacagggctattgtggtcactaacacctctgaaaagtctccagaggtcctggtagcttagagaaaatggagtttgagatgtgaaacctaaaaagactaatcttcttttgaagatacctttaaaagtcacttgctgaagtataaactgatataaatgtattgcaggttggtgaagaaatgcgtgcacacagggattcaagaggcccatatcccttcacccagcaatttattccaagtgtaggtcattatagctctccttacgtcagtgtgcattggggggggggagtccacatgtttgttaatagggcatttgacagacaattatggccatttgcttaatattattgctaaaaaacatttgttaaaatgaggtgggtgtaattaaacatttaatctgtattcatacaaaacaacattgagatggtttatgaaaacatctataaccctaagactggaatagtgcttcttcctggttgggggtgttatgaggttgtccctcctgttatggcttaaaacgttttctagaattggagtgcattctttctggatgtagaaacacagtaaagccatttcatctcagaaaacaaaaaaaggagtccacctccttcctttcttcctccgcctgatgtttttgctccctgaagagttattaatttccaaccgcacacaagctctttgcatttcagtaaaccactcaggcctcagtcaccgtcagctctctcggcttcttgagttgcggtctatgtaacttctgtttgcaccatgcgttctcttgggtagtactctttataaaaatggctgacccacaccagtcaccccacacctctgattatgaaattattcttctacttcacttttcaatctcaaagtagttaccacaaaagacattcatacactacaaatatctcagggcatatttaaaggtgactctgaacttcctttcctctcgtactgattaattgttcctaagtagacgccatcttgacacctttgtggttgaaatctgtagccttccattgtccagtgagcaagctttggaagctcctgtgagcctctctggatcccagggcaggataaccagggtattttttactgaaaagtcttgcaagaggtttgctgtcagctatctcaggggctgtctctggtccacggataagctgacccagcatggtacttgttcttccaacgtctaggcaggtaatgaaacacccaaaaggctggaagtgtaaccagtttttccatttacaccgtttgtggctcttgtttgggctgttctggtggatttctttttcccattagtatattttagagtcactcttaaagatagcttttcgaagataacttgctgttttattgtttacctctagttgttaatttagtgactgagggaaaaatggggccattatggaacaaaaaggctctgcctggcgtataagtaataactctcctacccagaatggatctgcctggaagggaaatgctcggctgttactcctttagttcaaatatagagtagtcaccagggaagctgggagacccaggtgctacttttaacattgcctctgctatgaggttttatttattacttggcatggagtctacatatttgtttagacattaaatggcaataggatataaatattaccttcttaatatttgcatttcttttttatttccagtcaaaatgacatcatgtcacacaaccattaaaaaaaggaaattaaaaccccagaaatatgctgaaacccctttgtgagttactgagctctgaaagccgctcactccatgagctgtggtccaagtggtacccacagcacttcccaggtgtgtttgggacacagtgctccagccccatctccattgtttccaggagctgaacaatgttctagaagctaaaagatgacagagaaggagtgattgctttaaaaaggaactcagaaaagcaaagagaaaaaaataaattctcacaactggggatgcaccatgtaagatgtaaccagtaaacatctttcaagagaattctttacttgatttatttgtgaagtggatttaaaaaaaaacccacatattcatttgtccagaattgattcattaccacatgttttactgtatagactctaattgacatatgcacattttctcagcctatattgtctcatatgcctctggacactgcagcaatggctctgttcagtgggagctctgctgtttggaaacacctaaggtgatgctcactaggagaaaggcctcatacaggtcaggtttcctttaaaagagcttgagatgatgagtctgagaagaaacctaaaggcattgtaaatagtcccagtgcaggcagaagagagagtgtggtatttttaactatttaattagctgggtttttctctttctttctttctttctttctttctttctttctttctttctttctttctttctttctttctttcttttttcaaaaaaaatactttgctgcagatgaagtgagaaccttggccgtactgtgctctcccttctagggcccatccacacatcacggcctgcatgtgaggttcctctgataccctaggcattgctttcaccctgcacctgaaggtcccgattagacctcttgaatttgcctttgggtgtttgcaagaaagtttcagacttttcttagcatgctgcacacagctccatgatgatgcacataatcaaggaatgcatatctactagaacagtggttctcaacctcctagcgctgtgaccctttaatatagctcctcatgtttgtggggatctccaaccataaagttattttgtggctacttcataactgtaacttttctactgttatggactatattgtaagtatctgatgtctgatagaatatctgctaggtaacccctatgaaagtctttggacctcaaaaagggttgtgacacacaggctgagaactgctgtactagaaaacaaatttgcagaggtgggcggaagacacctcaactcaaacacgtttcaccggaaacctggtcccctctgtgtcatccttcatatgtagtctacggtggtgactatgaggaaggcaaggtgtagactttggaataagaggataaccttaaataagagagactttgctgactctaaaaccaaagttcttcatctgtccttttgggttgtatgctcttggcagaaagtttgcttataaaggctgaagatgtcccacaaacagctaattcctacaaatgggtttggtcattgatgcaaataaatgatgactggaaacctctttcttttaacactttaaaaaaatgtatccaccagtcctattttattcaaagggtgtaaggattgagccatttctgtttgggacaaggtatgtttttttctttaagcctgtgacccttctatcttgctattctccttatctgattttggggtgacagcatctgccatccttgtcagagtgggactgaggtgcttggaagcagggtagagggaccacttctctagtgccagcctatgcactgatgctcacagcttcctctgtttttcctctttcaacttaagttgtccatgcctctttagatggttaattatgctcaattaggctgctttgtttttctttctctaccggattcttggaattgtcccaagtgtgagggggaacaattgattagtcctatttctgccacaggccctgagctttgcacttgagtacagtgaggtcacttagttgaaaaattaactttatattgcgttcttgcagggtagatacacgtccccaaggtaccactacccctgctgatgaaataaatatgccttctttatgattctcccccattaccctctctgttgattttctgagtttatgaatagtcacatatttatacaactgggcaaaagtgtactacttatttttcttatggtccgtaataatccatgcaaagttattaaagtgtacagagaccccttttaaggcatagtttcttatgtcattactttatacaagcaggtcagattccatctcagcaacagtcttcttgctcttaacctttttctctgattataaaaataatacatgcttattgtgcagggggcaaaaatgaaaacagaaaatgtgtgggtcaaagacgaggaaaaaagccttctcaggaaccatgagttttaggaaccactgatatttgtcagtctatgtacagacagtgttggttattatgcacatatgtaagtaggtagattcattcattcattcttccattcattcaaaagtcatcacattagtggctggagacactgcctggtgtctaagagcactagatgctcttgccgaggatccaaatttggttactagcatgtcatggtggctctaaaccacttgtaagtcaagtaccagtagatccagtaccccttttgtattccttgtgtgccagacacatatcctacatgcagtactcacatataccattttaaaaatgtgaatcttgcaacgtcaccatattagatacataccactgtagtctttttaacctagcactagaaatgtccttaagttggtgtttgtcatatgacattgattctgagactgggaagtgtttacttctatagaattctctggactttctgctttgcaacatattgaactcagttccgtttcctcttcccaaatagttaatctcttttctgtggagagagttgtgtatgttttcagaactgacaaagctattgatccttattaacaaatctccctcacacatgaatttttccccctactcagcacagacagaggaatcagcaggctccattgagtttggaatagtatgccttgtcttgcatggttttattgttaacacggtccatagtgccagaccattccattgtaacattcaatactggaatacagagtatagttcagtgtacttgacaaatgcaagcagggagccagtccttaaagacataagaaaataggaaacctcactatttaaaatacctcctctgtcatggattatgttctcagcatagatgcttatttttgtttgagtaataagtttaatatgtctaatccaattactcttcatggcaacagaatgacttctcagctcttttgctattagttccatatgatatttgaattgattcttttaattgctgatattaagtgtcagtcattctacagcgagttggccttatagccggaaaaattacatcttcctccaaccttagtataaaagcttttcaatgaacagtatgggtttctagacacactaggaattcattatgcaaataaggaaatgggtgaatccatacctctcctgttatccgtggcctagattgaaaaggtaaaaattgtaggattttgaataatgttttcagggactggagtgatattattaactgtgtaaagctcctgtttatcgttaaacattttgctgacaattagaattatgggtggggtagaatgatctagaacttacccccccatactcactcctgtctctctgatgcatatcttgattaaataacttttataacaaacaccttctctgcagaaagagctccatgactttttctctataagacaatgtgaagaaagaatttttctcaaaggcttagaaagaatccataaaatgaaagcaataataaatattgcgcctcaactcgtctactaagacagagagtttcactgcagctggctgtaattctcactaatttccacaagagacagatcgaaagtttactgtttgcaggggtgggggagggggcaagttacctgaatctcatatttgcaagaatgattatatcatccaacatgaaaacgcagctctgctaataacctcaataggcactctagtttgggaggggggggatcttttaaataaagttacttgaagttcattctgccttaaaatatacaagtgaagtaaaagtacttccctgatttatgtgtctttgggagaaatagttactggctttttactaacctatgtaaaacaatgtacttttgtaaatggatttctggccactttattcagctacccccccccccttcttacataaaaaagtaagcactgtcaatcaaggaattttaaggtttatttcctctttagcaatgattgatagccttttagatttacaagttgacaagttaaagggttctattggtataattatgctctaaattcacagtctttcaatttaaatgtccttttaaaaccaagagattatcatacctgtattttgaaaagtgggccagtcagtttgggttggtatacaaattgcttccattagccttgggacctatttgaatttaatacagttttttaaagttagtacgaatcttacttttaaaatttaggttaatggaaatgcattttaagtaaagaatgtggcaacttgttttttttttttttaatgtatagataaaatggtagggttgcagagactgtctttttattcagcaaggaagaaaatatgcagtgaaatgccttagttcaactagaaaagaaaagaaattgcacaataaaataaaataaattcctactgcctacttatggctctgggtactgggactatgggtagaggagggtctcgccatctttcataacttctcagactagataggctcaaaatggtttgtatgctaggaaggaattctgaaagtgatagcatagactctagtttctatttggtctagcttaagggagtgtgtccaatagaacacaatgaggtccattgtctcccaatgttattattacagttgggtctcagagtctttagtaaatcattcttagagactcagctaggctaccctaataatactctacagagcttggtctttttcaaataatattgctgtgagtgggtctcttgcttaagatgggagggttctgagtcaagggcatgtttagtgcttgtctctgcagatgctctccatggtgtaggagacaggactcttactctactctgcccaccactatcttcattgcgtagaaaatgctgagatagtagatcgacagagctctcaaggagactttacgcagatgagtgtagtctgctgttacttcaaatgtgcagagaagctcttgactttttccccagctttctgcaatggggtgaatcctaaaaccttctgacaagtttcactttactttttactgaggattatattaatgacgtagaatttagccctgggggctgttctgaaaccctcttctctctgccttccaatgtttcttcaagagggtcagtcccttcatagtaaacgaaatagatggtggaaaggccatgacagactgaagagtatctattaaatgttaagagttatatctgcaccatctgtgctgaaaatcatgcttcagttcctgaaatgtttaaaccttgtgacttcttccttacagcactcaatgaacccaccatcgactacggcttccagaggttacagaaggtcattcctcggcatcctggtgacccagagcgcttgccaaaggtccagaatcccccacccccacccctcacaccccacccacccaacctggacatggtttctagaaagttggatttgagaatggcaaaataccctcttggacaagacaaaaaataattcatagataaccaactcatcttggtacattgtgtgtgatgatataagtagcaggcgcgttgggataggcactggtgcgcatattttcatatatatcatattaccttacaatttccaaaactctgtatgttggtactacttccactagtattttaggaaagaaaagaatcaagcagagagaggtcagacaatttgcccaaggtcacacagcatgtaccttgctgagatttaaatgtactcagcttgtgtctagattacaatctgtgtggcatattgattctcaagaagaaaggggattcgggattttatctgctcaaaagagctcaaagcaaaatgtattggtagatctggtagaaagagctggaaagaaaatagacggagatgctttggtcaaataagacatcttttctgataaaacatcttccttacttaaaaaattaaatccaaagatgcgagtgataaaatggaagaatcaagataacaatcatgctgttgtcaatgcagaaactggcgatcgagtcttggtgtggctgctctgggaggtaatcccaacagtggacctaagagaccaggggtttgcatgggagggggagtcggccaccactaatcatgtctgaaaacgggaagtgcaccaaacagaggttcctgcaaagtcttatgaggcctcaacagagacaataattaaagaggttcagagtacagagccaggctagctgttatgactaattgacagcaaaactatgttttatttatgacatagtctaatgccatcaccttaactgaatggatgagaggtcctctcctcactacagtctacaggtgtgtaatgtctagatctgtatgtcttcatgaaacgatttacaaaaccaaagccagtatccttcttagcccaggacctcttcaaagaacaaggacatggtcaaattctccctgtatggggctgtacttgtaggcagagcctcctgtctgagaaggttctgtctaccctgttgttgtcccctagggctatgcatcgagatggagaacagggtgagcgggtatgatacccaccattgctgatgagaggaggggctgtgacaggcagacatgcctgccttgtactttgaccatagagaaagaacacagcttctagtttctcagagtagtcccacttccattgcaatgcagttcatactgaaaggtctaaaatgtacttctttctagggaagggataatatggtcatgtttacctcactgtctttaaagggcctctgccttgtttcctctagcctgtcttatttttggttcactgtgaaacagcctatgagtgacactgggcagcgacatctttccagggcgtaggtgtcctgaggaaagactgaactgtaggtccctctgtccagcaggaagatgacttctgtacctttcctgtgcagcactctgataacgtgtaaacagtgatagacacgatgtgtgcccacatagagagctgaccatagtctttgtacggtagaaccgagacacgggtacaatgacaactttttctgccattcccctttaggtagtgacatcactttcatctagcttttaggttagcattcatccctaggctctctagtgttgagagtgcagcctgaaagttcagattggaccaattagaacctagtcctcagtcacttgttagccatgtgacctgtgtcgaaagccttcctaacctgtacttgcctcagtttccccatttgtcgtgtggaagcagtgatacttcctgctttctcctgtcccttagcacataaggttacaaacaccctggtttttatgttagttgaatacaagtgagagcagaaaacccccatcccctgagcaattaaatatatgctctaccacctgtgcctcagtttttccatctacaaactggggatagcagaattacagaaggatggaaataggagccaagtctcgttaaatggttgagatctagctaagcccaacagtattttcatttttgcttttttttttttttaaataaggataggagagaaatcagagtataaggtagagttttgtttacttatacttaaaggcatttttatgttgcacattaaattttaaacttttggatacctaactcaggcacatgccactttgtccccaggggacttggggtgaaccactgaaccttttcttcctggatttgggaggggcaatcagggacacaatggctatgtgtgtgttaaggaaacactgcagctcgcttccagctcctccaactatggaaggactgtggccagaagagcccaccccaggaagctctccctgtgactcagggcagactggctgtcctcttggctctaagtgttaaggtggagcaagggttcaagggcagggtcaggaagtggcggatggagccaacacaaggtattcctgtggacttgagagagatttatactcctactctccattgttagggccttaggaagggcctctgccttcctcagactcttggccagtgtttgtcaaacaggggtgcttcagtgaactgcggaccacacaccttaaaaaacaaaccccactttattaaacccatgtgtttgtgaatagacaaagctagattcatacaaccacccacatattctgtcaaatgaaactgctccaaagaccacgcagacagctttccataataatatgcctttgtgtataggcttgcactttttcaaacgaggaggacttgctttgttttactggatcccctcttgtgaaaggagttgggaaaacagacatagtttcctcatcttccccacttaccaaacagggaaagaggagggaacagactctctgtaaatcatttcatctctgagaggcactgtaattacactaaccctctctggttagggcttttatttctttcatttgcacacagagaagagcaggccaaggcccttaaaacatacatagtattctatcctgtctccctgacgaatgaacctttttctctgtgtccatataactttgggaaattctccgacaggagcaacctgactttgggggtccagcttgagttcttatataggagaggtggggagggggatgaggtctctggccaatgaagctgagatgctaattgcttcagtgattcaacacaaactttgagcaaagagctccctctgctttgaactccttaagtagtgtctccatttgtgtgtgtgtgtgtgtgtgtgtgtgtgtgtgtgtgtgtgtgtgtgaagtttttgatagcttgctacccatctttatccgcagcctgtgagcttcatttcacaggcagtgcaagcaggccttgagcctagcccagcatcctgcacatgggctatatgactcttgcgaagccaggattgtgtgtttcacgcctattgcaagtctagctctgcttgatggcgtcgctgcagagcagagaggccaagtgagccagcatgccagccagatacacaaggagcttggaaggcaaacccaggccttgtgcatggaagtctgaagcctcaggttcctcctctgtgggacagctgtttcacagtgctgctaggaactaaggagataatgcatgcaaagagaagctccaggcagctggggagtctccagtaagtggggacactaatctctgcatgacatacatctcacattccacaggagaggcatttaggctgagtccctggaggagatctgtctgctgacttgctatggcatcagtgccagcaagtgagaaagctcaaacttgaacttgggtctatgagttcaaacccctccctgtgtccagtatgttaacattccactgttccttcagatctggttattcaaaactcaaatacttctgcctgaaggctattgcctcctgcttcctctccctcatcagcatcttctgcccatccccctcggattctcagtagcttttctttcttccttcattgagagaggctggtgaggaaatctgtaccaagcaaatactgtttgattacaagatccagcctcccttatagagaaaatcaagcagtttgggaaaagcaacaaaggccacatttgtgtattttgctttatggagctgaaaatatctggcaaattgatccagcgggagtcataaatacacattactttatcttgttcttcgtgtcctataccccagagccttgatagaacaacaccacttaatagacttaagaaagagtaattacactcattgcttgtgtgatttttcagccctcccagccctgcctgaccttctaatttagctcaccgtgtctaactaatgcatttatattcatcttttatgaagcatggatagtacaggattgactgtacagtcttgctcaaactgtctgcccaggttctcctctggttggtagtgaagggagtaggggccatccatctccatacatttgcatggatagacagccatagacatggctgccggcatttttcatcccgtatgaaacatgataaaaagtatttattacattttttcctttaaagcttttatatattctagcattatttacagctaaacatgcaggcaaaagatgtgagtgtttttaaaatcattactgttaatgtctcagcttgtcagaagcgcttaaatttccctgcactttgtctaaaaacttggtaccgttgccttttaagaacaacacactgaaaggatcttgcaagtcagatctgcaaacactgctgacagtctgtgatggatgatattgcaaaatttgcaagatgtttgtcatttcacacagccgacatattaaggaatggattaagaaactcaaaacccctatgggaaacagtcattccccccaccaaaaccccagccaaacctcgaacccccctagagcacaccagaatctctcactcggctatctctcccaacttcccactcagccattggatcctgattgttcacagagcattttctctcaccatatggtctcctcattaccatatactaagagtccatatgggaaacttgtgaaatgaactgtattcattttaactgccagatgagcagccttgtgctttgcaagcctagcttaagtcatctgctgtcttcgtgttgttatggcaacacggcgccaataaaaaattctaatctgctgtaagtgatcacaatattttaagtgcttgcctataactggcctcagaagggacacgagacaggagagcttcaatttgtccaaaggtttatgaaggtggttgttgattccagcaggtgtcagtaagggagctggtgagagtgtggctatgtgtctatagcatcatggagtaaaatatggcttgtcctggggatgcagtgtagaggggttggatcacagggcaaaaggacatagaccctatggatgaatctaaaaaaacacactgagtgtcaaacactatagttgctcaaatagacacatgactctgttggtactggggagccagccagccatgggccagggatgccagtctaggtttgggctcagtgaggcctcatgggaacctctccttcattgccatttgcaactctcagaccccatgaagctgctcttcttgaacgcaggaatcagtcatttcaaatgctgggctaattaagagtaccttaaagtaaatggacgttgtcagccacatcctaaagtggaaatcattctcacctccaaaggctttgtgatgcaccgcctctctgccgctctctttgtatcgaaagtgaatgtttatagtctcatttcatcagttcacattagcctcatgctgaatatttaaacacagaacaatttgaactcaccatggaggaagtcagtgactgcactttcatttggaacagcaagggctcatctaataataatttagtaaatcagccatttagtggctcagttgtgcactgcattgtgccaaagattattcagttcaactgtacacttgcaaaattgaaattcagattctagtcacaagcacttggtgatttttgcttcgtggagagatgagaccccaaaatcaccctccccaaagagcattcgtgtttagcgatttatcatacatacagagctggagccaaaataaagctggggctggctgtgtacaatgtattctaattgtgcttttattgtcttagtctttatgcacagactatcagtaattcaaaaccagcagttgcatcagtgaaaatacaaataagaaatctttgcataaccacattgccttctagcaggaaggggggggcaacttaaagagtttggtaaaagaaaagccagtgtcttcctgttctgctgactctgtcagctctccctctccctcttccattcccttcatttgtttacttatgagagctttattaacattgcatctgcaaacacaagtaaccttacttaatcaaaagcacagaaacaaatgccagtcttatggcctatctggtcctcagaggaggaaaagcacccttgagttttggtccaagaaacatcctgtctgcattctcttgtctgtagcaaagcacaaactacggaatgccatccaccacccccctcttcatctgccagaaaacttagaggcacattccgtcttcccattttgacaatgtgcttagctcaggaacttggctttccttcagactccgagccctcttatcttgggagttgagcctagctcagggtactgctgaagttctatgtgaatgcgtgcatgtgtacacacttacaagcctgcgcttactttatgtagagaaagaggttgcagtgggctacagagatggcctagcacttgctatacaagtctgagtactgagtttgcttaaagaagccaggcaggttgtctgcccattacctcatactcaggagacaaagataagggacccttgggacccgggactagctacaacagccatttggcaagcttcagggtcagcgagggatccttccataaataaagtggggagtaatcaagaaagacacatatactgcagcacatgcatacccatatatgtgtgcatacacatacactcatgtgtgcaattaaaaaaaatacttgtaactccactgatatgtcacaggagcctcacaaaatagtaattttacttgtttagatgattttcatcttttgccaacttattttacaatctaattttctgcgtcttactggtatatatccctttccgggatgagcaggcagagcccgagagcaaagtaatgtggtggtgctcaggcggtggcttacgcaggacaaagccgaggcttcggattgcagcttgagcagccagagagcagaagctcctcacctttccgtactatctcaacattggtctgccacagttgccttcagtgttttacagacatgattccatcccagtcaccacaccctagagtacaagaatgcccgtactttgccacagcgatctgtaaaagaagtggggattgtcaatattgttggcttggtaggcactcactgtgtacaactggctggagcaggtgctggcattgccctgttttatagagaaggaaacagaggcatgtgttcacgctacttataagtaacacagtatagatttgagccaatcccattgaactttagatctagtgcctgggtccctaagcactgactctagaaaggtattaaatggaattctaaagagaggcgagtttgcacgcccgtttcaaaatccctcacctcaatagggtggaggagaggtggtggcattgaccaaggttagctcacaaatggccgagctaggtgaaaatggtagcaagaattagagacccacacacagcatccagagagagagagagagagagagagagagagagagagaactcgtgtttggctgttcagtctgtgtggttggagctcatagcaatagttacccaccagctgaagcctagaactctctcaggtgctctttgaccactgagctcttgaagaaggaaatttagtttaacctacctcatacacatcccccatataagaaaaggaggaggaaggggtaaagccatttccatcttccagccactagggatcctcttcaaggctcaaatcatagaaacacacacgggcaaggtaagaattcttgatcaccaccttcagccctgagtaacattgcagttaagcattggaggaacaagtgctgagtttccagtagtctagaatcactgggtgtttataaaagatttagtgtgtgtgtgtgtgtgtgtgtgtgtgtgtgtgtgtgtgtgtgtgtgcgtgcgtgcatgcacacatgtgtgtacacatatatatgtacattctttcacatgtgcatgcttgcatgtgtgtatccaagtgaatacagatgcccataaggctggaggagttggatctcctggagctagagctattgagttggtagtaagtcacccacatggatgctagacattgaaattcagtcttttccatgagcagtacccactcttaaccttggggccatgtctccaccttgcaaactgctggattttttctctttttaattaattgatttatttttaacattttggagacagggtatcctatatcccaggcttgcctcgaatttgctatatagccaaaaatgttctttaacttctgagcttcctgcatttgcctctgaattttgagattagagatatataccattgtacccagttatatgcactgttgcggtccaaacccaaggctttatgcatgctagacaagaattctacaaagcaagccacattttcagcccaaggcactggattttgactgaagattgtactcaaaattatcccttaaacctcctcgggaaatatacctcacagatatcattcacccagatatacatataatcgccagtattgttcaataacttaacaaagccaaaacgaaccatattcttatctaccacttaagtttaacatacatgtaaacacacatgcattttgcacacatatccacatacatatacttgatatgcacatgagacaagcatatcatctgctcacattccaaggccttttcataagctacatattaatttcgtcttgccctaagggaagggaagccagggcccaaagacaaagagagacagaaataatatttggcttttgtgtgtgtgtgtgtgtgtgtgtgtgtgtgtgtgtgtgtgtgtgctaaaagcctcagccttggtgacttaaaggtgacttaaaagattttcaagggtaattttgactctaggcagcttttgtttcgtgtgctcactttacaacctacccctgaaaaaggcatctctgtccagagttttctctttcagcagagccttttatcctgatcagaaagtcgatttccaaggccactcggcaggacctaacccagagcgttggtcttaaaccagcacaatgaatcgcaatgagaagaggcagctaggggttgccaggttcagctttgtacctcagagcgggtcacatccacaagggcacagataccattcttcactgtgtgtgcggcaggaagcaccccaggctcccattcaccaattaccatgacaccatttagaagagaaagctcagagaccaaaaaaagaggagggaaaccattgttgcgactcttcccaggaatgcccggtttcacaatttacacgtaactgctgacacccgaaaagtcgaacattttggtaaaatgaatcaagttgtaatgtttcttttatgagatcccttgcaggaagggaggcctggcacctcctggagaccaagctacgttatccatcatcgggaagtcggctgtcctggctagcttctcagaggtcacacgatcgacccggtagctcttacaactgtattattgcttatggaacagtcattgaggcaccagataaaaattacctggtctaataggcagggaacaattttcactcaataaaattataagccaaatcattcatttcataacactctggctaatttatttgttgaccttttaatatccatagctcttcagtggtattaactgcagctcagacaaaatctcttgttcatttcagtttcattgatttttttcccccattgaggcaataacagctgctagaaaacagcccttttctttccactgtaaaagtcaatcatgtaagttaggatgtcttacgtggatccagacatgttagcttacaacagattttaatctcacattgttcagaaggctcctacacccctgactgtaacaagcaagctttctggtatgtatgtcttcagtcccactgggcgacaacacataattggacatttgggaagtaagagagctaccaactaatgtgaacacaaactcaacaaaaaagtcaaaatataatcacaagtcttgcctgtgtgttctctatagtagggtgcttgtatcccgatgctagtaacaatagactttttaaaatacataatgctttggagacttgagagatggtacaatggttaagaatgtctgtgactcttccagggggccaaagtttgattttcaccactgatatcaggtagcacacaacgacttcagaggatctgatgccctcttcacatacacacacacacacacacacacacacacacactcacacagagagagaaagagagagagagagagagaaagagagagagaaatttaaaaaatatttaatggttttattatgcaaatggacacagattttagaatttaaattgtattgctttttaaggtgattaacaagttaatggaccaaagtattctgtagggtagccataggtgtaggtaagtataaatatatgtatgtatgtgtgtatgtatgtatgtatgtatgtatgtatgtggaagaaaggtgtgtgtgtgtgtgtgtgtgtatgtgtgtgtgtgtgtgtgtgtgtgtgtgtgtgtgtgtgtgtgtgattacacatgtacacgttacctatgaaggacaaaaggtgatggtcggtgtattcttcactttccaagtgttttttttttttcttcagacaaggtccctcactgaattctccgctcccccgttagctatgctggttgaccagagagccccaaggatctatcctcttctgtccaagctctagggttacaagcacacaaaactacacctggctcacgaagagcttggggattgaactcgggtccttatgctggtgaggcaagctctttcctgactgagccatcgccccagccccagctgagtctccttatataataaaacactctgaagtctttagagtgcaaagctgtaaaatctaattgttacacatttggcattttatgcgtccctggaaatatctacttgctacctccacctcctctgtgctattcctttccatttcaatttactctaaagtggtccttagccataatgagagtgcccctttcaacagaaacatgcttaattatatccatgctaaatgtaagtgactctttgcagtcacagggcttctgagtgaagagtgttaaagtgtgacaccaagggcctctaatgatgtgcgggaaactctctttcaagaagtttcatattgcaagaaaaatgaaaaaatgtggggaatgtctctctgaggatagggaactgagcagtgcccaagtgttgttttggtctgtctcacccgtcttctcgctggcctcattattctgaatttttagaatgcagagtctcccattgtggaattttccatttggccgaataaacatagaggaagttaggatataaacctctcctccaaagagacccatctcgatacgactgctgtttatagcttggtgcgttcagcatggtggggagaaagatcctgaaaacttctaatcagctttttcactgttggggctttgcaatcaataatgtcaactgggctttctgaagcaagaagaaaaagagccagcacccacaaatctagtgagctgggcaaaatctggtccctactataaagtctgcaatcagtgctgatttccttaatagatgctgatcagtgccaaggcaggagtgatccttgctactctgtttcatttgatattgctgggatctggcccattgcactctgagttccctgataagagaaaggggattggtgttagggggtgtcagagggatgtggggtgacaggaaattactgggtgttttcttcaggaatcacattaatcaatttgattttatcattgaagtctgttatgcttctttactgttgtcttctgccgccctcaatatgttaatctcctgactgaggtcgtgtaagaggtggtagtgaccagtgcattccttattcggaaactttaaaatatctgggttaatgagtggctataccgtagctcaggaaggtggcttaagtgtactgtgaaggaaagtaagttcaggccatcccccctttcactgatgggttgtatgactcaaaacgttgagctacatttgcaagtgagtgtgtgtatagttgcacagccttcatacctttgaggccaaatgataaagaaaagattcccatggatgggagaataattgctagtgatttcactgtcatgaaatgaaaggaaaaatgagctacctgtatctacacacttgagatgacattccaggtcactgcagtggctagctgtgagtgtgcaaagaaatatgtatcttctaagggcttgagagtatagctaataacaagccgatatgtactaagaccagactcgtgttgctagatgcctattacctgagatagttgtcctaatatgagttattctattagccacaacattaaaaaatgtaagcacaagctggcaggcatgaaagagcaaattcataagagagaaaaagtgatgttaaaagaatacagtgatcagaattcaacctttgggaatttacacactggattaagaaagtcatcatatggaataccaaatttcactcttgtgcttttatgaatttcagtaaatatatcactggtgtgttaatatgaattaaatgtcactttgagaagatcagtaatgaaatcttttagtggactcctccccaggaattttctctgatcctgtattttacagagcattgctttaggagcttggaaagtgaattagatgatcccagggcctcaaagagtctattgtctattgtctattgtatagcatctagcagtggacaaggaaggcagatgtctttcagaccagagcaaaaataatttacgtaatataccctatgcaggtctgggtggtatggtcatcatcatttttgagaggaaagagctaaatggttggatcatcagtaaagctggaataattactgattgattaacatagttgtgaaggtctcaggtttgtaagtctggcaggtctgaacccctgctcagtcactcctcagctgtgtacactcaaagaaaactagctgacctctctgagtcttcatttcttcatttgccgaatggtgttatgaacagtagctttagagaggcactgcatgaagactagatgagttgctctgtcactttctctactgttgctaagttcagtctctgggggagtgagaggtattgttaagtggttacaccaaagaagaattgggtaaggagatagcgaagaaagagcccactaccttgcttctaggctcatgaggattgcttaaacctgaactcagaaaagctcttcaataccacaggggggaaaaagattgacgaaagtggactagtccgaggatgggagcatcatgggtaacccttgtagaccctgaagctcaattctgggagggtaacaagtcttcaaagtagctggacagtgatactcacaggtgataattatgaccacaagtagctcaaatataactcaccacctgactggattaaaacataggaaaaaaaaaaaaaaccctggacttctttttgcagcccattcagctgctgtgatcccaagtcataaactaagccatagcaattacacttgaactttcttggaaccccatccctcttgaagtctctagaatttttctgttacctcccagtaggtttaataatgtagcctcttcccactccaatgcccccatttgtacaatcattactctaagaacactgcaggacaagagatgacacgttgttattgtaagagaaaacagatcaatgtgaagttgtttttaagaacaaacatactctgttcctttaaaatttcagggccacacagagaaaaataatgtttgactcaaaattttggttggagaacaagaattaaagtctttagaggaggctctagagattttcaatatttaggatactcatggatgtcttttttattctccaatgggattttgttttgaaatccaagtataggattaattatcttggtagactctaatctctactctcatgtttaaaaaatgtgagcagtggggccttttatcattatgaaaggaagagaaaatctctctgacaaaggaatgccttgaaaaattagatattagtactagccaagtaccttttcttttgagaaatattgaaattgaatattagaattgaagactgtgtctaccatactaccacttaatgccaccaaaataggacttaaggcatattttccaacacaaaatactatacgaaatatccagtcttcccctagtgggaaatttctttttaaaaaacatcttaagctcaatcatttcctaatgtgaaattacagatttttcaaattaccatataaaactgcaaaaaaattacacttgtggccacagaagagatagcatacactatcaatttgattttaaaagacatacatctcttatattacctgtcatttttataatgccttttacaaatttaatcaatacattttaacattctatatactttaagtgcaatatacaataaatattcaagtttcatcttaaacatgctttatcctttaaattgttaaaactgcagtgccctttccatctccttacataatgtcataaaatatacatttcaaggtaaatgaagtcagctacttcaatttagtccctcaaactggtagtaaatgagaggttaacactatggtgccaaacccattattgagtaaatttagcaccttggacagctctgtaaaatctttattgctttcctgacctgctcgtcatgttctgtctctgtgttcagtggctctcagctctgattgaaaggcaatatattagatccccaacacaaacacgcttgggggctagttcactgggaacgtaatgacatggaggtgagagcaattttctggtcaccgaaatccaagcaccttgcaggtctgtggcactaactcatggagggcccaggaatgtctttcttccttcccatttgcacaaataactaacagaagcctaatcacattggtagggctacaccaaatgtggtctccccaaacctccaaatttgttactgcattgaaggatgtttttagatgggtgaggtatcatttaagagcatagttttctggacaagaaatcaggctcattctccttgaaattcagatgatggcttgaagtgacattatgctgagcccatgcctgtgaccatgtgctgggttggaaaaataagctaaactatcatgaatcaaaaaaaggtgatactgaggatcaaaaggatgcagtgattccatgtgcttctcatgcaaatggttaaatggtgactagcctctggttggttgggttagttgtatcactgaaaaacttagtcatcagaaaatgcaatttttcagatttataaaatctaagagtttggcatgccttcggcactccctgattttgtgcaattagtagaaataagaagggtggctataacctccagttacagtgttgtagagctgaaactcatcacttgaattatgtactgcatcatgagtttgacaaacgtgatctgtattttttttcttaaaaaaaatgtaaagagaaagaaatgccttcctagtggggcccaaacatcggcataaatatccatttggagatatatgtgaccatagacccagagatggtaaatcttttaatgaatgaattaagttgatattgttttgttttagtcttttgctcagagccagataaagcctgaaggttttgatggaagcagcactagctgaatttgagctggggatagggtttagtgtgcctatgccctggtcaattattaactgctgtggtcagatactcctgcaaccaaaaagtggtgaattatcatgtagcttgctttaaaaagtcaaggaatgattttagatacattgactcaaattccattgattatgttgtgctttctaccccctacatgaaaaaaaatgactgaattgttttaggaagagggggtgcatttctgggaacttaagggaagcatcaatgtttatcaagaattgcaaactcctcctctatctcatttttgaatttaggacattatatatgtgataagtagttactgcggtatgacaactgttttatcttatattgtggagaatttcaaattgaaaaaaatgctaatatatatctaaaagcttgtcatttaaagagttgttcgaggatttttgaagaggctacagtgacagggaaatgaatgtaattatagccctattttctgatcagtgtctggagcatatgaaaatcaaacagctccgccttcccattcgggttccgaggcatcggattttaaagttataaatccatctgcaactttaccaatactggactacagtaaacagatcttctgataagtcgcctctctgcctttcatccttggatatggttctttgctgaccttccatcttaagaaggacttatacttgtccaaatgtgtgtttccctattgactggacccaatgcaagccaatgcagaaggctagcttagtaagaagagggggctacttttttttaacctaaatgaatagtaaggcatagacctagaaggagagtgggtgagcaagagagaagaaacagaaacgctacagaaatagcaaagaactgcagtacaagaaagcaagacttcaagtcatgaatgctggcagggtgggggcttctagagaccacagaatccttacgcaagggtctttgatcaacatcatattccttcaggatgtgagcttcctatgtctctgccgttcaagagagacaaacaaaggaagcttgaggctacatgattctttagtaggtgaagattgattgattggaaattcctcaaaaaatgacctgtctgataaggtcatggtttctggaataagcacttaagtacaaaataaacacagtttagggaatcataccatgcgctgaatgacattgattacagtaatctagtaaatgaccacacagttgtattcagcaatagacgtatgagtgctttatcatgcctatggcagatgattgagtgataggttttatcttgcagtaccaatgatgttcagctcttgactcaattaagtgtgtatgtgaacaatgatgaattggcaacttaacaccattttaggggtccccaagctattgcttttacaactgtcccctggcaaagggtgaccagaaggatggagatgctgtcatgtgaaagataagggcacctgttatctttcagaagcctacaatttattttttgttcttgacaggaagtgatccttaaaagagctgcagatctggttgaagccctgtatgggatgccccacaacaaccaggtgagtgttctaggtctctaacttaatgaaatgcttgctcattcaattaaaaaaatctcagagtccttattctatgagaaagcagtttttaaaatagcctatgaaagcaatactcatgcgttcagaacacaggatctgagatgtgacatgtcacagagctgttcagactttcttgcttttataaaacttctatttccttttctattgaatcatttgcctttctggaaaagtgctccatttaaaaatgaatcttgactgggaaggaaggatttaatttcttctcctaagatatacaatgaggtcccagtagtgtatcattcatgcctcatgcacaatggtatacaaggaacggaagctgcttgggaaactgagtctagccaatctcactcctcccccacccctccagcgttcactactcacaaagcagttatactaatccccagactttgatttctctgtgtggcaccaggggacatgaattgtcggctctgagttcctatatgggcaggagaaggaaagtctcacaatactgttatatactgacagcaataggcctcagtgtcaagcaatggcattctgggtctcagctctgcctttaaagaaataaatgtttttgagttaaaactttgcctttcataaccccagtttccccaactaagatgtggtcaggataatgaagcttgacttatagatgtgtcagctgggatattgaaaggactacagttgaccacgtaaggctctgagcacagaatatgtcagagaagaggcacacaaaggttattgggtggatgagttggggtagctaacaaagacgtgcctttgacttttcaggagattatcctgaagagagctgccgacattgcagaggctctgtacagtgtccctcggaaccacaaccagctcccagcccttgctaacacttcggtccatgcagggatgatgggtgtgaactccttcagtggacaactggctgtgaatgtctcggaggcatcacaagccaccaatcaaggtcagaagcctgctatttccatatcttccatttcctctgccccttgacaaaggcaagctcacacccttcccaccattaaaaaaagaataagggaaggaagagagagagagagagagagagagagagagagagagagagagagagagagagagagagagagagagaaacaactattttcttctaaaggaggcgattcttcacttgtgtgtatcgaatattattataggagtttgtttctagtttcacatctggagacctagtagggggctagaaagaatgcatgcatgcattcagccatctctacattcaacttttcaccataaatcatgagtgacagatcacaaagagggatggaattaaagttctcataggccacaacacatcattcttgcccagggaagagggacctgttaactcgggggaacatctcttagattgggatttattcctgctcccaaatgataatttataggccctgcattgccacttctcacaggcctgctaagtatttatgatctcctaagaaatgtgtctttgctagcttcccattttaatcacagagatagcaggaccagcccatgcacatgaatcatcaggtcttttccctctcggttacagtgagggggtaataatggagatgttcctcccttacaccccaggtctcccacagatgcaccatcggaatgctaccctcacccctggtttgtcccctcacttttcaggtttcacccgcaactcaagcagcgtgtcaccacatggctatgtgccgagcaccaccccacagcaaaccaactataactcagtcaccacaagcatgaacggctacggctcagccgccatgtccaatttgggcggctccccaaccttcctcaatggctcagctgccaactcaccctatgccagtaagtagatatatgtcccacattttgtatgtttcctttgcagagcttagtatcatgcagagaggcaagctgggcatggctggtccgagccctgatgcccgctctgtgcctgcaaccctcaacttgggtaccatcccctctagcagagatctctgcagtctcaccttgcacaaaactaatggccattccaagaccacatgcttgcggtcagatggcaatggggctaccacccacttctaggagttactaactgatggcccctgagtaagttcatgtcctctccatgcctcctcactcccatccttaagaggagaagtatctgaaccacaccttcacctgtaccgggggaacagggctaagatggtctttgccaggatctggtcctcgggcttggcacaggagagaggtacttggaaatctaagtcgttagcctgatgctacaacaatagatcccctccttaaataatagaacttgtttgctgatgtttctattttccttttcgtgaataatatactcataaaaaagataaaaccatactcaaacatattttttcagaaaacacctacgcacacacacacacacacacacacacacacacacacagagagagagagagagagagagagagagagagagagaatataaatatttctaggtgccctattcacacctttagcttaaaggatttgtttgtttgggcacaacactgccactgtgtctaaagaatgcagcaaactggcatctttatatataaatgcatacatctaaagatcctctccaaactggcatttctcactataaaatgtcacaggctctttccccacaacctcttgctctccctctgaggacctttccatagatgggcaagttcatgtggaactttgtggagagttcttctgatgcagaaaatgtggttagaatgcggagacatttgtaaaggaacaagagtgtgttgccaaatgaaagaatatccatgagtctcttagctcaaagtatagaaaacagtgctggctcttcattgagtgtaatttgtggctaacaactggaaggtgggcagctcatcctggccctgagttatatctgagggaattctcagctcaggatgtactctgttcttatttctaccgtattcgccatttgtagaccatttaaaaatcgccagctgccatgtaccaagtcactttaccagccaacactggggtcggtttcacattaggttttgatttattgaagatctatccctcagtgttctcccagctactcaatcagaaaatgtttcaatcatgacctgaaaattaaaaggtggcattcttaattaaatcaataagctaattgctatatggtagcgattcaatttaggggctggagttggtcaccttcccaagcctgtgaggacacccagtgacttctgcctgacatcacatctgtcaggctgagaaactttgaacatttaatttccattaattgatttcctcagcgctcacaaatacagtattaaattcccaaataggccctcagatgggatggttttatctgcataaatgcaaataaaacaataaacacagagcccggatgatttgaatatttgcctctgtaacatttaattattcataaaccactcatgttgaaaaattccgacaaaataaaaaaaaataaaataagacattcaatggctgaacacattttgtggtgtggctgctggtaactaataatgtcctaacaaatggcaatgctcctctatattttacccctttcttgttaactgccccccccaaactccccacctctaaatacacataatgatcgcatttgccaacgagattaattgccttccttggtgagccagcaggatttcaagtctaagaatatttaaaaatcaaacctccagtgcaggaattttgcaatttaaatgggtgttattattgagcgcattctcgcatttacaaatcctaagagatggataaaaatgctggtctcattaaaagaaaaaagtacagtctagcaaatgttggggagaactctgaaatgtggatgaggcctctccattctcctctagtaagaactgtgcccatttagacccatgctgacttggcctgatgataaagagtcatttcccccataatggctatccctgcctatgactgatttggtcgccagatcaccaactttccaaatctaagagaccaagcaccagtcaggcctaaactgctcttcagacctggtagcctttttcctctgtgaatgattccttcgcaggggatgcagtagatagagtacgatgtatacatagtattcactttgcctagtttcccacttgcgtcttcacgtccaatttgcttatgtgttaaaaaaaaatgttataagtccctggccttatgttattctgtcaactgaaagatggaaagatgtgaagaatcctgtgcaacccaaagaaatatatgaggtttattaagtgacataaacaatatagtactcaggagtatccaggacatagaggcaaaagaacggtgcatatgaaatcagtagccttgacactgccttctgaagtagtcaggatggctgaagtcttctctgcatggattatctgagtgagtcctctctactgccagacacatcagagctccctgctcacttcacaaacattggtagaaggctccatgagaagtgagaatagagaatttggaacttggatttacagttagttatgtgttttccaccgatgctgcacgtggtggttttcttgtctacatgaccttctgcctactggagtctgtatggtagagcatccagacacagccacatccagaccctatagcctcttggagagaaagagggcttatgcatacacactaccaactgcccaaacctaaaatcacggtgctggctttgcctacgatttcccccttttctttacaagtcccattccttccttggtgatcacatccactcaaactagcctctccctgtcccctccatccccacatgctatgttaacaccttatctaagccagaggtagaagactttccttgacagctcgttataaaatcctcccctctcaatgtcacttctgcctctccagaggtggctgcaggtgccttcatccctcctgtgctgtgctatccctgataagataggattaggcttttgtcttcttgcctgaaaaaaaaatcaaaggatggaggctctgtgtttatttccaaaacatgctccatgtgttgggatctatggtactgaatgaaagatatcaccacctcatccctggaaaccctctgtgacactggtgactagcatattaatgggcatgcagtaagcccacagtataatcatgaaggctactaacttgaaggtagtacatgctaaataccaagtgatgaaattaggggtggtgggatcctgagagtttagggagagccttgcccaagaatggtcaacagcagagtagccaggtcagacctcttgcaagcctccttgtctctggatgtaactctctcctctcattgtaaccctcagttgtgccatccagccccaccatggcctcatctacaagcctcccctccaactgcagtagctcctctggcatcttctccttctcaccagccaacatggtctcagcagtgaaacagaagagtgctttcgcaccagttgtcagaccccagacgtcccctcctcccacctgcaccagcaccaacgggaacagcctgcaaggtaagtcccagagatccaagcaggtgtctccctgttgctgtgagtggggtatggggatgggggttagcccctggatctactggcttctctctgccctgactcctctttgcttttgtgttagtagtgtccagtctcagccaccagccctgttcctgtctccttggtgtctgtagcatccctcttccttctccaggaactttgctccagctcaggccttgctggagaacactataggcatttcctaagccaccatttctcttttgttacttcccattctttgttgttgcctttatccgacctgtgttttatagatactatcctgttcttcatggcagagtctctcctgggacaggccttcccctgaagtaggtcactcagccctctcttcttgtagcttgtgtcaggatgagactgtgtaaagatgtgtcagggaggggacagctgcagtccattcagagcccaaggctaagggaccagtataacaaatatcaaagatctcttgagaaccactgaaatattccagttcatattaaagctgtacagtctcctttccaccaagaagcatgggaagtgtcaggaccatcatgttttgagctaacctttttcattcattgagggaggaaaagaaaaacccaactttaaaaacatgccaactttttcctcatgttctttctatgtgcttagctccatgaatggtatcggcttctgggacctcatgtgtccccccctacccccacccccagcagaatgatgacacagatgctcacagtccctacctgtaaagatgagaaatctcaaggtggagagagtttgcaatattgcttgactcctcccatctggtgtgtgacagtcattggcatcaaaatcaggccaaaaattcatctctttctcggacttaacactttccaagaatgttatcccagattcccaagacagcttgcagggaaataagatcaataaaatcatcaattaccatctattttttttctttcttttttctttctttttttttttttttttttgttttgttttgtttgtttgtttttgagacagggtttctctgaatagccctggctgtcttggaaatcactttgtagaccaggctggcctcgaactcagaaatctgcctgcctctgcctcccaagtgctgggactaaaggcatgcgccaccacgcccagctaaccaccatctattgagcaccaaacagtatgccaggtgctccgctaagcatagagcaggctttgtctatttaatccccacaatgtcctgatgacgtatgggggccattagatcagtacagtacctggagatcgagcttagggagggtaaatacaggtcacagacatcaggcagacagtggaggtggaggtgaatgaaagccaagggattctgcccctagtccctgccctgtgccactcactacagagcctgacttccatgaccagcacatcactcgtagagggcaactgtggagaacataggatggtcagaagggcagtgacacacctgggatttcgcagctttatttctctgtggaagcgtatgccccatttaacatatagacacacattacattctggttactctctgctgaagtaagcacacactggttttcccaagaccttcagagctcagttcaaccctcaatgtatagaagggtacagtcaagcttaggtctcttaagggacctagtgaggacacgttggagtcaagattgaaccaacaaccccagagacagagcaactacatcattgtgcctctctatctctggcagaacttttttagaacattcctcagaacctatgggcagattgcttgacatagcaaagtcagggcttagaataacttgccacaaagaatacacattgggggacccatggctccagctggatatatattagaggatggccttatctggcatcgctgggaggggagcctacttggttcctgtagaggctcaatgacctaggatagggaannnnnnnnnnnnnnnnnnnntgcccccccattgttcacccagctagaacaactaaactttcatatagagtgaagtaatgatgctacatatggggggggggtaaagttataattcttaagctaacaatatcaactttggttagtttcttagttggggttactattgctatattgagacaccatgaccaaagcagcctgggaaggaaagggtttattcagcttatacttccatgtcactaagaagtcatcatcatcatcaaaaaaaaaaaaaaaaaaacagtgaggacaggaactcaaacagggcaggaacctagaggcaggagctgattcagaggccatggaagagtcctgcgaactggcttactcaccatggctcattcaacctgctttcttacagaacccaggactatcagcccagggattgcagaaaccacaataagctaggccctcctctgtcaataattaattaagaaattgccctccaagcttgcctgcagaccaatattttggaagcagtttctcaattgaggttatctcctctagaattattccaccctatgtcaagtagacacaaaactagccaatacatttagagttgatatcaggaccaagatgcaagggagggttgtgataaccagcagaggggtgttggacttggaaggcatggggtatagcccatgcacactgcgatacaatgaccctgcctttaccatttaggggtttgtgtccctgaggggacattactgctggactctcctataactccatgctctttggttctcccaatgctgtcatgtgcaaatgccacactttgaagacatgacactattggaaaagtgaacggtgaaaggaaagttcaattaaccaagaccactttccttaagctattgctctggtctctccctccctccaacctacattcataaagggccaccctggaaccttctcaccctctctgcgatctcgccagtaggacaagcagactcagccatagtgttgccatgtacactggttttgttcagagatctattgcacagatcttagagtgtccactgtgtaatgcaaccttctgacagtggcctttcagacatgtctcgcctcatctttcagtttttggccctcctcttttcccactgaagagactttgttgggctctggatctctggagatgggctgaggatcttagcactatttcatgcttccaatgcctgtccagcctgtagtaggacatttcactttaactcacccagttaacttccaccattcattcagaaaggacaagtgcctagagaagagttggacatgcaaattgaccatgtaaacaagattagatgccacacatttggactgcttatattgtttaaaggcctatttacctccaactatcactgttaattgaacatccttcattttgttaaagcttgctccttcaccacccttttgtcagcaggagatctgcaccatgactgggtgtggtgtgagaatggagagtcacgccagcaacatggaaacacttgctcccagcctggcttatgccctgacacaaggatccttccctagtgctcttttaggtggctgcttatttcattcactttatagatgaggacatggagacaggaagctgagatgacttgtccatagtaactcaattagcagatagaggaaccccaagcattccctcagctcttcaacctccagcatgttttgccatattcaatctgagccacgaggttatatccatgtagaggaacaaggtctaacaactttgaaagcaacttccctatatgtggaaagacacaatacccaagttagtaagacagatctacccaagcgaggctgactcccagccatggactgtagaggaaaataacatgaagcagaatcagcctatttcacaggctagctgactttcaactgtttttccaatgaaaagtaactaggtactccagaccagggagagcattgttttaagctgagaagcacctataccaagagtgtgtatataaacaatgtgtcactttatctgttacctgggaaatttagcatttctttataaggaaagtgagctctctctattagcaattttgaaatatttggttggttgctgtcagtgggactcctgtctttctattttcctgtccactgtacccattggccatcttttgccattcctctctgccccacttccctgctatggtgacagcatcctagtctctgcttctgggagatcagctttgtagcctgtacgtataagtgaggatagtggttcctgcctttctgagtccacctcattctgcttaacataagatccttcctcacattgctgatctgcaattggcgaactcgcagatgctgagttctcggatgtgcagagccaactgcccatcttgcttgctaaaggcatttgcctgcagagctttttcccatgaactaagcccaattaatgccatgtgttaaactctggattgactgataaacatgtagaaaaagatccacccattcttatcacgatgaagtcattgataactcttaaccatggactcctaagtaagtctgactttctagcccaaaggcttgagtcaccagctttattcagctcttgtccatggaaagaaatgtctttttccttctaaaacagttgtccccgagagcctgaagacttcggagtcaggacagaaccatcacacggcaccaaaatgtccactaagatagaaaagannnnnnnnnnnnnnnnnnnnttttgtgaagtagttgtcatagcaattccccttcttataccttgttaacattcaggctcctcttgaccctaaatattatgtacctgagtatcaactgttacagaactgttccccccatctccctctccccctcctctccctctccctttctatttccctcccactctccctctcccctcccttccccctccacattcagtttatagaaggtcttgcctcactccacacctgatgagtccatgatacctatagtttggggaaacattacatccttaatctctcccaactctacgaagctttcaaccaatgtcttagttcttatcaaaatggggaaccttggagatggattaaattgcctttcagcatgtggatttttggggttcccttcagaaaacatggtcacccagcactggggaccatggcagggccactgtggtcttgtgatgatgtcttgggacgcagccttgggaatgtgatgtctcatgggaatcagcccctgctctacttaagcaagtcagcattccagcagcagttttgggacattccaagcctccgatacccatccctctcacccacataattaattttcagattgcagcacagataggaaaacagcttctagacccagtattgccatgtagtcatgcagtgaggtttctttattgggagggcctcctttgaggtgcctagactcaggccacagatggctagcattttgttgtgtaagaaaagtgtagggtgcagtaaccctttacaaaaacgtgtaagtaagtaactgtgggccttgcttagagggtaatagatcttgtgttagacttatgttctgtgaactgtttacagagtggggaccagccatgctcatcccatagtgccccttaagtatatttgatactaacaccacctatttgcaaacatttataagccagggaaatcatgtttgaaaacttctacaactctaaattctcttcaaagaattcagaaacctcgttgagccaccatcccaggggatgctacaagccctttgcagaaggcatgccccatttcctgtccaggacactgctcactcaagtgccagctgagtctctcaagggtatggggtttataactaccaaaaaagaagtgtaccagcacaccagtgaatttggtggggaactttaatggaaacctatgaagatgcttaaatctaaccaacctaagaaattatttgagtaacaaaacactattttaattttttttttaattcatgtgaccctcataggatgttttcctagggcccagagggtaagtgtccatctaggttacaatggacacatctaagaatacatgggctaaaacagcagatttgtcagctttctgctttactttagatcatatggacactccctgagctgtcctgggcaggacagagactgcccgtccaccagcaacatagtattttttatttacttttatttatttatttatttatttatttatttatttatttaatagaaaggaggagagactagcttcattaactacaagcttcaccttcctgctatttaggctttacttcctgctatctattaaagggtagaggatccacccggcacatgcttagggacccaaagtgatactgagccagcacactgagggggactcccctccccccccccccagctgccaatccttgtacaagaggctgcagcatctggaactctcaagttaaggcccagggtttaaatactaagcccccccccctcacccaagttcagtgaagtctagggctctctcagctcttaagggcactgcttttccaactgatcccaagtcttgggtggcgggggtggggggcttaagtcaggctgcatttggcaaaagatgacttcctgtttctaagaaagaaaggcttatgagggtttaggaaaggactccaggagcttttggactgcaaaggggctcttgcaaaacaacatttggatgatttacgtgtaaatgaatcagaaacatgtggattgaatttccttgcgaatacagatgggtttaaaaattaacggaaaaagtgtttggcaaaatacttttgggtttttcttttaattgaatctaaaatgtcaggggttggggtagggaagccagagtaatgtgggggggtacatggcctggtctccctctgtccatctgtgccaatggggttcctttattttaaggaacattttccacacatgatggtttagtcaaaggaagggaaagaggtccaatttcctcattagtgattagtgcaggcattaatcactgatgagaatattcacttaagtttagatttgtcaataaaaaggaaagaaagaaaaggcttttttcttttttctttttctttccgtgttatcattgttaaccaaagaaagccttgtctttggttttacacaggcatctctcttggcttggtctattttcaagttaccacaccatctttcctatagcaaacccctatttttcacactctttctgttaaatgtgccctattggaatggtgtctatttgatgtaggggcaaacacagaccagagaagtttaacagtgctttcagctagatccaagaagcagaaatggtagttcacaggcagagggtaatctgccttggggttagaccctgcctgggctggggggttagacccaggcgctctgcttctatttaaacgttcactaactcctgagtgctgcagttcacttcatgttccagccatggaggctgagggtcaggcagagaattagccatctcagaggaatgcgctctgaagtgggcaggcatgaggcagcatttcctaaacatggccgtgcagctcctaactccaaactctaaaataaaaatagggttgactaaaaacaggtcttcccttcataggctacatgttttccctagtagccatgctcaggtcattccagaaatcctgggagtagagaggcattctacagtgtccggcaaacaggctctctcttccaaccaggactcagctttccctgtgaacaatgcctgctgtggtgctgtggctggcgtccttttccagctagggctgaagggaaggccctccctcagatggttgctctgttgcttaattttcatgctaatacagaacataaggagagactgttcgcagaaattgttggcagttacagcgggccattcctttattttatacttcgtatgtgatggtgggggggtggaggcaaaatgacaaactgaaaattctcactattttgcaaagtctgaggctgcaactttcccaatggtattctaactatgcaactctccagctatgtcttaaaattgaagtcagatttagagaaatgtttaggataccctgttagagacacatatacatgtataacatttttaataaggtacatgtatattttatgacacaattcattccccgaaagatgcaagggcatctgggtaacattcagctaccaatgtcacgtgtggattgggtttttttgtttttaattattgtgtctcccctcccttgtgaaatgtttggatgcaaaaccgttgacttctgtcttttctcttcgtagcgatatctggcatgattgtccctcccatgtgaaagaattgccttgaagaattttattaatgaagaggttggattctgctacgaaagttatctgacatgagtcccagagtggaacttttaactcaggcctttttaagaggaatcacacaataactgcagatttttaaacaaaatcaccgaccttgcaaatactgaaattggaaagggggtctgccagagcagggtgttggttaaagttgtaacccccgagtatctgggggatatatttattctgtattgataaaaagcaagcccacattttctttttctttctttcttttcttaagcttaactctgcaaccatttgtcttttataaaccattaagctacacacaagggccactataaacaagactccatgttttaatttatgtttttaaagctatggaaggggagaatgaagtggtgatatttacaaaaaaaaaaaaatctaaaaggagaaaaaaaaagaaaaacagggaaaaataaatttaaaaaaagagctcgtatggacagaataggaatgccagttagattttttagtgaactaagggtcggcttctgcgccttaaagcttatcagtggtagttagctcagacagtgcattttcaatatctaacttaacacgccaccccttagcagtgcaagcttcgttctctcttttgtatggttgtcttaagtaactgtgtaaataagtgtagcctggaaagttaccaagcgacatacatgatcacgtttgcccttgtactcgaaaagccagtgcctctagacagattgtttaaaaacaaacaaaaacaaaacaaaacaaaacaaaacaacatgcatctttaaacccgatcttattcttttacttaacatcaacttctcccgaagccagcggcctctgagagtggagcaacacatgttccgagcgagaatctccttcaagacttcacaggacagggtccaggcacagaattccatatatgccctccagtttaccaagccaaaatctcgctcgcactccaccgtcaagagatccaagcttactcaagctggaatcctagatattaactctagatctgggctcaaaaacccaaataaagcaaacccacaaaggcaagtaggtgtgctgttccgggctcccaaatcacacgggtctatacccgcaagactccgcaaggtcccaaatcacacaggggtctgtatccgcaagactccgcaaggttggaaagttctatattcagtcaacaggtaaagtgctttggagttcagtgtgaaaggaaactgggagagaggaagggaaggttgaggcttcaaactcagctttctatgggaaattttgctttcaactgggaagtgttcttaaagaatccatagcaaagattcagccagcaaggctctgagggggcgtgttcctgctgacctctgcccttctgtttctgtatgtagttataaatactgtagatttcttttgtgattttttttttgccaaagttgttttatttatacattttaatgtcttaagattttcgatctcacacacgcaaagaattatactgcatattttgcaaagaaataaaaagcgcactacctttagcttgcacatacttgcaaagttaattcaaaggctttctgtttgtttgttttaatggggattttgtaaaatatccatataaataatgtatttatctttggaatttgtacattgcttttctctccttcctcccatcccccacccctagtttattttgtgtgtgtgtttgctttgtgaacagtgcgcaagtatagtttggtcacttatagttgtattagctgtttcaatgtgatttttaaacaattcatttataggtatttttagtattgttttaaaccatgcttcatttttttatttccacccaaaagccattgtctatttttgtattatttgtaagttaagaagttttttccaatatatggcaaaaaaatagtagcatattattcttgtagtatttagttctgtagatttaaaaataatgtaccctttgctttggaagcatacaaaaacgctgttttactctagtaatatgcatggaatctctccctttggagtgacgcattttgtgcattaaatttgggggagaaacttcatagagatcaatgaacatactttctttcttaagtctgcttgtatattctctgtctttcacataaatataaaccagcagattggatgccttaacaatgcaaatcatatccatttcacctgtacattgtactgtgcaccccccccccccaactgtcagccatcactaacattctaagaaaaaaaaaaaagaaaaagaagaaaaaaaaagagagaaatcgaaaagcacaaaagaactgttttgttactttaagacaatgttactttttctagtagagcaagagaacattaacaaagctgcgactgtgcatgcccggatggatttcaacggttttcactagactgtcagagtgcggatttttatgggttggggaggggaggggagggaagttgggggggttggtaggggaggggagggaggaaagctgatttttnnnnnnnnnnnnnnnnnnnntttcatggtgagaaataataataatgacaactgatgataataataataataataaaaataaaaagaaactggaaaaaaatataagcaaggtttagcattgcttctccgtactcagaaaggttgtctgaattcgtgtggtaagcgctggcctcaagatgtctaacgtctaaagccatattttgtctggtgagccagacaactgtctgcaaaggaacgagcagcaagccggtgaggtgtccggctcagaccctgacaaaagacgccaccaatctgttagccacgtgctgtgtcgtgatgagaactttactgaaaagcccaaagagcctttaaaaagaaaatgtgtatcaattgtgttttgttacttctgtttgattagccgatggagaagtagtttggttttaggaaccactttcttctacacaaaatcttgtttttaagtccctttaagatatagccccctaaatacagaatatggcttttaaaaagaagatggagtagagaattcaattcagatttccgttttgggggaagagccctgcctctggatgactggatatgtccacgccatgcccggcctcacaatgtaggatgcagctccatgaactcattctgcaaatctttcaccttcttttcaaacgttttcaatagacacacactgtacaatccaattgttagagcactcaactactgtagagattgttatatttcattcttttttatttctttctttcttttcttttcttctccttttttttttcaaaaattcaaactgtaaaaaacttttcaacgttcacgatatttaattaaagttacttcctgtctgtgatagcagctcctagtggcgtgttcatttctctatggcagaagagaagagcaacactcaatggactgcaaaaggcccgggtttgctattattcgggccagtgttaacacccagagagaattagcctaggcctggggcacccacttcctttctttgtaggtcccaccgggatctgctaatttggaatgcaaattgaacacgcacagcgtactgctgccctctgctggcatgagccaggtgtgcacgtgctggcccacattggtggcaagagcccccagtcctattgtcagtgaacagtgagattccccccatgataggggctgaattgggaatccaggaactggtcattctagaacaccatcctctgccctggaaggctgagctaaactcttcctatgcaactgctaattaatcccagtgtgcctcctggtcaattaattatgtgccctggcttgctgatgagacgtgtgactagagaacatatatatatatatataaactttgtgtggataatagttttttttttctttttcctggttgacaaaaccacatctgtctggaattgaaagttacaggcactcagtcgttgtgcaaacttcataggtccacagaagatatacacacatctgggaccgggtcatttaaggatacatctttccattgtacgttccatgtcttcactaattttgcaatgactggacacgatgaggttaatggcgcttacaaaatgcctcgaccaacagaaactccatggccagacctaagagggtgtcccataaccaccagcacattcatttgtgggaggcactgctacggcactaccctgaaatacagcccaaggtaaggtcatgaaaggccagaagctgctgtcctgtctccatggagactcctacctgatcagcttggccatcccctattttttcaattctgtatcagttgcagaggagaaacactgagcaaaaggttcaggatgacttcaggatgcatgtggtgccagacaagacaacccgcttccacgtcatccatgtctatgatgcttaaactgcaagaggcagacatatgccagagctccacagaataaaaacagataaccacactctgaattggcttagaactccgtaaggcctacctcttgacagcattcattcattcattcattcattcactcattcattcatttgttcccttaaacctcaagcatttggcatgcctatgacccttgatgaggagtagtggacccattcgtaagaacactggcattgttcccactcttggcgcttacaatagaaaaattgacataaacccacaacacacataacatctaacgagggtattgaggtccgagtcaagaatgctttgaaggtataacatcgtgaggtctgacataatctaaggactttctggaaaagtcttctagagaaagtagtagttgagctgaggcagaaagagtgagcagccgaggcagaatggctgacagtgtgatgactgaacttgaagtaagatgaagggcacccaagagcagagagactgtgtgagtggagtgcacagatgcccacagtgactttgtggggcacaacgactccaattcacagcatattctgggcacctagcatgggtttggtgtgttagatgctaaggagccaatcagctgaggtgccttcacgcagagcctctgacaaactcacaaactcacggtccctgaatgttcacaaaggcggtggtgtatttaaatctggcaaaattccttggggttaagctgacaggcagagagaaggagagacagagagacacacatagatagacagagagagacagaaagaatttatccatgagagagaaaaggaggaagggatgggagaagggagggagtgaaggggaggcaggggctggatacagccaccagcaatcacatgctgcatctgaagtgaacatatggccagagttgctccagacaatttgccctcaccagaatgtatggtcttcacatcctttggtcactttaggacttggtagatttcttttctccagcattggagttgatgatgtttcactttataaatgttgaaatccaatttagaagcaatgattcaaaaccataagtgttagtggcttgagagatggcttagtacttacgagtactggctgctcttgtagaggacccagattaagttcctagcacttacatgatggatcataaccgtatttaacacggattcagttccctcttctggcctcctcttgcactgcacataagcatatggggtgtccatatatacatgcaagtgatactcataaaccatatatatatctacattcttgtccctttaaagtgtcattttgggatttctggcaaaaagtccaagttactgaaggtgtcacttgagcagtccttatggtataatagccaactatgatcaataccttgagacttcactatgaggtaaaccaaggattgaaattaccggccataggggtttgggaaagtgggatcaggttcttgtggaaccctgctggctgcaggcatcagaggctgctcaagacacaaacccacactaaaaaacctaccatgattcctcttgcttcacagaagacccatcacagatgaattcatttttacataaaatctcaaagaaatgagttcttttccgcatgccatgttcaaaatctcaaaatgatcacctccaccctctttcacacgatcaattgttcattcctcaatatattacattctaatcagcccccaagttcaccctattgcagggggaaacctaagcttatttgaactcattttgcttctgatcttgacctgccagagaccttctgctccatctcaggcagacctctctccatgtctctctgtcatctatggtctcccatctctgctctacttatattttcttgttgtttatgtcacagcacacatttataacactcataaacagtggggagacttccatattgcatacacggaccttagagatgtcctgtagagggggcagagggaaactgaggaacacctggaggttattgtagtggtcctctcaagacatgaacagcttggattagggagataaaagggggaagtagataggactaagagatgtaaaagagccatcatggttcaatggtcgatgtaatatgggagttaatggataacaaaaaagtcaaaagagtagtcaccagtatgcatgttgggagctgggaatggaacctgggacctcacacatgctaggcatggactttgctactgagctgcaatgcccaattgaatgctcacacctttgacagagatagagagaacttccctttaagaagacgttggtctctctggcctatttttcttactgtggagccaatgatccaatccttcctatatcttcaaattcagtttccagaactagaaagatattgttttcatttttttctttcttaaacaagagcatcaagtagttttatctggagagttacggtatgttggaactaattttgatctatttagcatataccctccctcccccaccaaaggtagaaatttcacattctgtagcaagaaaaaaagttttgagtcctggaattagccctcagcctgctcactatgagctttctggaggaaacttctagtgctgggaatgatactctaaagaaaatttcatgctctacaaagatgcaggtgaactgtcaataaaatggaaggtgccctactacacatgattcattcaataacatggattgctccatgaaagtcagaagggataaatggaaatcaagctatttccgggcccttatagaaaggttttacttatgagatacatttttatgggagcctcttttgtgttaagttcatagacatggctaacgttttgacatgacattgtcttgtacgcagttcacactctgaattttacacacccacacccacacatcagtacaaaaataatctcatattttaaggaagtttttgattttgtgaagggtagcaattttgctattctgggggcgggcatgtggccctccatgaaccatagattagacacctcttcaagctgagagctagggatatgatgatatcatgttgactcacacatctctctcacagctgcctaggggagacacagcaatgactcaaagagtcacagcacacactgtaacaaatgccactggatcccaacatgtctgagtgaatctgtggcaccaagtctacacagactccactagcaagctcaatagccaaacttaatgaagcagcaatcaaatgtcttgcttatatcctccaatggctattaaaaagaacccaattctgcttcaataccgattagtgctaataattaatactgataattaattctttgttattggtccccttgctccccatctttgtttctttattccacgtggcgaaagccctctttctgttcttcaggtgtttttattgctaacttcttccttcttcactcttattcactgcttggttcttcatgacatcccttctggcagcaaagctccttcccctttagcagagaagggaaaggggtagacattgtgctaatcaaacatgatctcctgtggcaggacaacagagggaaacagactcttaatattcaacttttaataacatttgacttattctttctgtctgtatttacttatctattagctttattattttctttaatttttttcctagatcttgatggctattcttcttctctctggtccagtgatcttgttattaaagcattcttctaatagtaatttagcataaatgtcttatagttattaagcaaattcaactacattgaacatcaaatacccaaggctggtaaaaattactttccaaattatcctttatatactagcaaaatattgtgggtggatggagggannnnnnnnnnnnnnnnnnnnnnnnnnnnnnnnnnnnnnnnnnnnnnnnnnnnnnnnnnnnnnnnnnnnnnnnnnnnnnnnnnnnnnnnnnnnnnnnnnnnnnnnnnnnnnnnnnnnnnnnnnnnnnnnnnnnnnnnnnnnnnnnnncacacacacacacacacacacacacacacacacacacatagacatacatggagaataccatatggtattgaataaccaattagagtgttcttccctggggaagattgtttttccaactcttaccattctttagttgcttgtcactctttgtataggagtgggacttctcccgtgtatgttagcatgttgtcctagttcagcacatgtttagacagtcatgtaggtaagacattatgggtatagcttctgacattcttaggagacacaatctcacacacagcaaactctatgatcctctggctcttaacatttttctgtcttctccaaaatggtccctgaaccttaggtgcaggagtggtattatagatgtatcctttgggactggactctgtagtgtgcagtttgattggttgtagatttctggaatggtctccatctgttgagaagagaactttctttgatgtggagtaccaattgcagttgtggatttaatgacaaatatttaggatatagttagggattatgctggtttaataaagtaggcgttgtaggttctccactaagatccgtggctttaccagcctagggtaaattgattagtattccagtaccaggcatatccttcatgttgagtgggtactgagtccaattagagagttgttggttaccaccaaggcatgtgcaccactgttgcacacgctgagttaacacgccattctagctgtggtggtttacgggcatcatagctgggtagaactgttgtttgcatcattttggaagcttgcatggcactttctggtaccatgaaagctcgtccccagagagggagctttcaagctcaagggcctctggttctgtacctgaattgcattgcatcttcaaaaatagggacttatgttctacctctgaaagggcaatcaaggacaacagtaacaacctataatgttttgagggtctcttgaccaacaactcaaaagaaggcttttttttttttaaacctgctattgggatttttgttagtttgtctttggctcttggagaaagcattagcatcccagagatcaaaaattatttaaactatatattctcatttatgcataaaatggtgtattacacgtatttttagacagtcaatgattcttaacttttttccagccacccttactggaagtgcccccttctccttctgtacttatcttttcctgcatctctaattaaagttccctgtttttccaattgtcctcttcaggtcactatactcttttattctccttttctgttgtacctcctgggggtggcaatggttcctcttcagtttcttagtttttcgcaccatgatctctttctctatatgtttgttgttgtgtgtagagaggctattcatgtgtgtatgttgattctgtgctctctcacactgttggctttgtttagcatttctagaagtgtccttagtagaattttggggatcactaatgtataatatgtcatctataagtagggagagtttgatgacttcttttcctatttgcaaccctttaactttcttttgccttattgctccaactagtgcctccagtacattattgaaaaggagtggggagggtggccatctctgtctcatctctgacgtcagtagaattgcttcaagcttttctccatttaggatgacgttggctgtagattcctcatatgttgcttttattatgttgaagtgtgttctcctgcttctatctttttaaaaatagtttaagaaagactggctataaatctttgaaaatctaataaaattctgttgtggatccatcttggcctggacagttttaattggaaggcttttcattattagtttaataaccttctttgttatgggtctttttaggtttttctttttactttttcttttgtttaacttttggtggtttggcagaatctagaaagtcatccatttcttttgggctttgtctttcctgggaatcactctggcatctattctcctttatttttttctccttaatttcattgagctgtttctt

SEQ ID NO: 2724 - DNA, 2253 bp, Mus musculus
caaatattttcaaaggggaggagatttttccacaagaaaaggttgttttcatgtttgggatccaggaaagcatccaacggagtggaagcagtatgaaggaagagccgctgggcagcggcatgaacgcggtgcggacgtggatgcagggcgccggggtgctggacgccaacacagcggcgcagagcggggtgggtctggcccgggctcactttgagaagcagccgccttctaacctgcggaaatccaacttcttccacttcgtcctggccctctacgacagacagggccagcccgtggagattgagaggactgcctttgtggggttcgtggagaaggaaaaagaagccaacagcgaaaagaccaataatgggatccactaccggctccagctcctctacagcaatgggatacggacagaacaggatttctatgtgcgcctcatcgactccatgacaaaacaagccatagtgtatgaaggccaagacaagaaccctgaaatgtgccgagtattgctcacacacgagatcatgtgcagccgctgttgtgacaagaaaagctgtggcaaccgaaatgagactccctcagatccagtgataattgacaggttcttcctgaagtttttccttaaatgcaaccaaaattgcctaaagaatgcaggaaacccacgtgacatgcggagattccaggtcgtggtgtctaccacagtcaacgtggatggccatgtcctggcagtctctgataacatgtttgtccacaataactccaagcacgggcggagggctcggaggcttgacccctcggaaggtacgccctcttatctggaacatgctactccctgtatcaaagccatcagcccgagtgaaggatggacgacgggaggcgcgactgtgatcatcataggggacaatttctttgatgggttacaggtcatattcggtaccatgctggtctggagtgagttgataactcctcatgccatccgagttcagacacctcctcggcacatccctggtgtggtggaagtcacactgtcgtacaagtccaagcagttctgcaaagggacaccaggcagattcatctacacagcactcaatgaacccaccatcgactacggcttccagaggttacagaaggtcattcctcggcatcctggtgacccagagcgcttgccaaaggaagtgatccttaaaagagctgcagatctggttgaagccctgtatgggatgccccacaacaaccaggagattatcctgaagagagctgccgacattgcagaggctctgtacagtgtccctcggaaccacaaccagctcccagcccttgctaacacttcggtccatgcagggatgatgggtgtgaactccttcagtggacaactggctgtgaatgtctcggaggcatcacaagccaccaatcaaggtttcacccgcaactcaagcagcgtgtcaccacatggctatgtgccgagcaccaccccacagcaaaccaactataactcagtcaccacaagcatgaacggctacggctcagccgccatgtccaatttgggcggctccccaaccttcctcaatggctcagctgccaactcaccctatgccattgtgccatccagccccaccatggcctcatctacaagcctcccctccaactgcagtagctcctctggcatcttctccttctcaccagccaacatggtctcagcagtgaaacagaagagtgctttcgcaccagttgtcagaccccagacgtcccctcctcccacctgcaccagcaccaacgggaacagcctgcaagcgatatctggcatgattgtccctcccatgtgaaagaattgccttgaagaattttattaatgaagaggttggattctgctacgaaagttatctgacatgagtcccagagtggaacttttaactcaggcctttttaagaggaatcacacaataactgcagatttttaaacaaaatcaccgaccttgcaaatactgaaattggaaagggggtctgccagagcagggtgttggttaaagttgtaacccccgagtatctgggggatatatttattctgtattgataaaaagcaagcccacattttctttttctttctttcttttcttaagcttaactctgcaaccatttgtcttttataaaccattaagctacacacaagggccactataaacaagactccatgttttaatttatgtttttaaagctatggaaggggagaatgaagtggtgatatttacaaaaa

SEQ ID NO: 2725 - protein, 585 aa, Mus musculus
MFGIQESIQRSGSSMKEEPLGSGMNAVRTWMQGAGVLDANTAAQSGVGLARAHFEKQPPSNLRKSNFFHFVLALYDRQGQPVEIERTAFVGFVEKEKEANSEKTNNGIHYRLQLKNGIRTEQDFYVRLIDSMTKQAIVYEGQDKNPEMCRVLLTHEIMCSRCCDKKSCGNRNETPSDPVIIDRFFLKFFLKCNQNCLKNAGNPRDMRRFQVVVSTTVNVDGHVLAVSDNMFVHNNSKHGRRARRLDPSEGTPSYLEHATPCIKAISPSEGWTTGGATVIIIGDNFFDGLQVIFGTMLVWSELITPHAIRVQTPPRHIPGVVEVTLSYKSKQFCKGTPGRFIYTALNEPTIDYGFQRLQKVIPRHPGDPERLPKEVILKRAADLVEALYGMPHNNQEIILKRAADIAEAKVPRNHNQLPANTSVHAGMMGVNSFSGQLAVNVSEASQATNQGFTRNSSSVSPHGYVPSTTPQQTNYNSVTTSMNGYGSAAMSNLGGSPTFLNGSAANSPYAIVPSSPTMASSTSLPSNCSSSSGIFSFSPANMVSAVKQKSAFAPVVRPQTSPPPTCTSTNGNSLQAISGMIVPPM

SEQ ID NO: 2726 - DNA, 2372 bp, Mus musculus
caaatattttcaaaggggaggagatttttccacaagaaaaggttgttttcatgtttgggatccaggaaagcatccaacggagtggaagcagtatgaaggaagagccgctgggcagcggcatgaacgcggtgcggacgtggatgcagggcgccggggtgctggacgccaacacagcggcgcagagcggggtgggtctggcccgggctcactttgagaagcagccgccttctaacctgcggaaatccaacttcttccacttcgtcctggccctctacgacagacagggccagcccgtggagattgagaggactgcctttgtggggttcgtggagaaggaaaaagaagccaacagcgaaaagaccaataatgggatccactaccggctccagctcctctacagcaatggtgaggctcctgtcgggtcggtgccagcaccctggggctccgggtcagggcaaggggctcacggagctccaggtggacgaaacccccccagcgaagctcagccgtcagccaccctccagggatacggacagaacaggatttctatgtgcgcctcatcgactccatgacaaaacaagccatagtgtatgaaggccaagacaagaaccctgaaatgtgccgagtattgctcacacacgagatcatgtgcagccgctgttgtgacaagaaaagctgtggcaaccgaaatgagactccctcagatccagtgataattgacaggttcttcctgaagtttttccttaaatgcaaccaaaattgcctaaagaatgcaggaaacccacgtgacatgcggagattccaggtcgtggtgtctaccacagtcaacgtggatggccatgtcctggcagtctctgataacatgtttgtccacaataactccaagcacgggcggagggctcggaggcttgacccctcggaaggtacgccctcttatctggaacatgctactccctgtatcaaagccatcagcccgagtgaaggatggacgacgggaggcgcgactgtgatcatcataggggacaatttctttgatgggttacaggtcatattcggtaccatgctggtctggagtgagttgataactcctcatgccatccgagttcagacacctcctcggcacatccctggtgtggtggaagtcacactgtcgtacaagtccaagcagttctgcaaagggacaccaggcagattcatctacacagcactcaatgaacccaccatcgactacggcttccagaggttacagaaggtcattcctcggcatcctggtgacccagagcgcttgccaaaggaagtgatccttaaaagagctgcagatctggttgaagccctgtatgggatgccccacaacaaccaggagattatcctgaagagagctgccgacattgcagaggctctgtacagtgtccctcggaaccacaaccagctcccagcccttgctaacacttcggtccatgcagggatgatgggtgtgaactccttcagtggacaactggctgtgaatgtctcggaggcatcacaagccaccaatcaaggtttcacccgcaactcaagcagcgtgtcaccacatggctatgtgccgagcaccaccccacagcaaaccaactataactcagtcaccacaagcatgaacggctacggctcagccgccatgtccaatttgggcggctccccaaccttcctcaatggctcagctgccaactcaccctatgccattgtgccatccagccccaccatggcctcatctacaagcctcccctccaactgcagtagctcctctggcatcttctccttctcaccagccaacatggtctcagcagtgaaacagaagagtgctttcgcaccagttgtcagaccccagacgtcccctcctcccacctgcaccagcaccaacgggaacagcctgcaagcgatatctggcatgattgtccctcccatgtgaaagaattgccttgaagaattttattaatgaagaggttggattctgctacgaaagttatctgacatgagtcccagagtggaacttttaactcaggcctttttaagaggaatcacacaataactgcagatttttaaacaaaatcaccgaccttgcaaatactgaaattggaaagggggtctgccagagcagggtgttggttaaagttgtaacccccgagtatctgggggatatatttattctgtattgataaaaagcaagcccacattttctttttctttctttcttttcttaagcttaactctgcaaccatttgtcttttataaaccattaagctacacacaagggccactataaacaagactccatgttttaatttatgtttttaaagctatggaaggggagaatgaagtggtgatatttacaaaaa

SEQ ID NO: 2727 - protein, 454 aa, Mus musculus
MTKQAIVYEGQDKNPEMCRVLLTHEIMCSRCCDKKSCGNRNETPSDPVIIDRFFLKFFLKCNQNCLKNAGNPRDMRRFQVVVSTTVNVDGHVLAVSDNMFVHNNSKHGRRARRLDPSEGTPSYLEHATPCIKAISPSEGWTTGGATVIIIGDNFFDGLQVIFGTMLVWSELITPHAIRVQTPPRHIPGVVEVTLSYKSKQFCKGTPGRFIYTALNEPTIDYGFQRLQKVIPRHPGDPERLPKEVILKRAADLVEALYGMPHNNQEIILKRAADIAEAKVPRNHNQLPANTSVHAGMMGVNSFSGQLAVNVSEASQATNQGFTRNSSSVSPHGYVPSTTPQQTNYNSVTTSMNGYGSAAMSNLGGSPTFLNGSAANSPYAIVPSSPTMASSTSLPSNCSSSSGIFSFSPANMVSAVKQKSAFAPVVRPQTSPPPTCTSTNGNSLQAISGMIVPPM

SEQ ID NO: 2728 - DNA, 160140 bp, Homo sapiens
atgatgggaaaacaatggcaggtttaacttggagataaaaatttctcaacatcaaagtttaaaatattaagtaggaagttaaggacaccaatggtgtggagccttcccagttgatactcatgtatgaattatgcaatatgaaactaataaatgatgtacattttacagagtgtgagatggatagctcttaactgttcacatttgagttaaatggtaaatcttagagcatagaaactttgagaaagccactcgtaatctttagttcctaatttattccttgtagaatggggccaacatccctaggttctgtgctgaatgatattcacttgaagttttacaatgcagttgtttgttatttcattaaagtagtgcctattcatagaaaagtcagaaaatatagaagaaagaaataatctttgtgctataattcaaagctaactgccattaatatttgcaggtagtttaagtcagctgtgtattcagtgctttgcatgtacagctgtgcaaggagttgtcaggaatggaaaggcactatcagaagtccgtggtgtcttgcaggggcagaccattatacaagcaactgcaggccttgcagtgaagaccaagtgtgacaagtgctgtaacagagtgtaggtggcagggattaattctagctctgggtatctgggaaggtttcatgagctcagtacatttataccgcacctggagggataagtgggatgatgggaagctgagatggtgtgggagtgagggaggcatttcagatccagggaggcagcctatggtgaaggcaggaaggagatttcatgttcagggcacaggatgtagctcggtgtgacttagcaaagaatgctgaaaagtgaagagtaggagagcatattattggcattattagggactttgaaagattcactgatctagcccctgccagaacagccacaactgattaatattttaaaagtattcaatcttccttggcaattacttgaatactctatcatcctaagagtcaaaagttttcctgggaatttgaatgtaaagagttgtcttcttttttacttttcttttggagaaaaacttgaaccaaaatcatggtgctcttagtaaaattggtattgaatgagaagcatcactacatattggactctctggaaaggtctgttggttgagtaagtgaatgaatgtgtgacaacgaacatttgtactttttgaagtcttgaatcataagttgagcatccaggcagaactgtatgcctcagttactgtggacttgaacttcttgatctctctctgacatctgtcacctccacaggggaagttaatatcgaaaccctctgagtccttagaagggaaaagtgaaattctaacgtgagattctaaatgaatctgctttaaaatgctaaacacatatgtactgaacaaggagatattaacagcctttcattttcaacccctggctttctgtctgcatgaaacacacacaaaagtagtgactggtgactatcataattacatatagtataatttaatccttatggtgatgttcattgactcttcccaagagacccagattacattggttttgttttggccactgttctccatatttgggttggttctgttaccagatcacccactggtctttcattatggttaaaatgcatttgagggatcacaaatagggtgagagtggttgggagcaaactcaaaaaatattaaaatttataattggctataatctagtgaaagtgttggcatttctagtgaaatgattatgctggcttcagttgtaattttgaatgaatctggtgatgataataagaatataaccagaatggtcaatgatcccacgatatatatataacatgtaaagaatatagtttaatggatgtgggctttggagtcaaactgcctatgttcaaatctcagctccacttgttactagatgggaaaccttgggcaaattaccttacctcttggtagcattatctgtaaaatgagaaaagaagtagaatctcataggactgttgtacagagtaaattgatacatgcaaagcactcaggacacggccttacacatggtgcagtgcttgtgtttgctgtagtaactgctaagttgaggagctgaggctccttctgcctcattttttatgcttggctttgtggggtgggtcgctgttactgaagcaaagttgccacctgcctgtgcatccttttcagcctggggaaagatttacaccagtaatccagaagtgcaagtcctgatacctttgctcaaaacctgtcccttggtctgcaggaactctgtggccatgattcccagtagaaatttggttccttgtaatggaaacagtttaaaacaaatgtgtcctcagtctgtccccagttccaagaaggacagacggacatttggttttgtgatctgcctcatttctgccacatttcaaatcattaggatgacttcaaatattcgcccagggccagagtttgcaccttaatatgttttggcaagaaacacttggcatttgagtaatctgtgtaaaagaacatccgtgaggataaacatcttttctaccacacatgaacttagaattctttctctcttaaatttccagtcagacattgctaggggagtaagttgggccagatagccagaagtcagtgttaagctacagcccccttgctctaacctcccttctctgtgtcatttctaagaaattgtaattttttctttccccattggcaactggttagttgtcctgtcctctacctattcactgtctcaagactttttcctgcctttcagatttgacttctagtatgaggagacctacgtggagtgcgtccttttccttaaaactatttttaaattctttcattggctgctgtgctatgacaaaaccattttgtttttttaaattcttgccactaatgatgcccttccctcaagggcatactctgagctctgaggtaatgaatgcttttcaggttgatcatgttcatcccttcaggctgagaacactttccagaaatgcccaagatctaaaggaccttggccagtggaaaaggtaaacttcttgaaatcagtggccaagaataggggcagccacatgctctccccctgggatccccaagatagtgccacaactcggtaccattccaccctccactgcagggagagaggagagaatttgcttcatctgtgcagaattccctccaggatcttattcctcccctttctgcccaccccacctctcaaacagaatgattggtgcttaagtcaaagagggtctctctcaggaatgcatgttaatatcagaaaaggagaggaagtcagcccggcagtgagcaacctttacccttacatgggttcagcctcctcagcctgcccttgtggcatcctgggattttggcagccttatgggtatcagattttcacatggatgaactgtactctacaactacttctgtgtgctaggaaccaaaacactttctttgacattgaaaatagagttttctccttctcactgttttggcctgctctgttgcaagggagatccatttttcagggccttgagactcttgtttacctcttctcagagctctgtgtctttgaaggctaccaggaggtagtgatgaccttcggataaagcccctggcagctcaggtgggctgggtagggataggtgctttttggttcaatattttcaatttgggagataatccttagactcttagaaagacttccttggctatttctgggcagtaggcttggacatggaggcaggaggttctgcatttctttttcaaagcaaaggtgatggtgccgtctatggaaacaacttttccaaagaggtccttttaatcatgaggcattttgctgtttaccctccagtgtgtgtggggtgggagcagcttgaacttcacacagaagggaacccacagttgtttccacacagctgtttcctgcattgggccagagcaagtctccgtgtcctgaatatctgcgggaaggatcatctgccacataaccatctgcaggcataagtcaagaggaactttcgaggagccttaagattgcaaatgtaggttttgtgtctcagtttaggtgtgccttgatgcatttcctgtctagcatggacattatgagagcagctgcaaaaatccaaacgtgatttttcagaatttgggttgggggaggtaaaaactcaacctgctcagcccagattgattgcaatgctttacataataattaatgatgtacaagctgttgcctaatgggcagttttactgtgtgtgcccttcagttctgactggctggagttctccacgatttaaggcactacccctttcctttatgtgtcttagcctttgggtaaagctgctgtagtcattattatctttctttggtggttatttcttcttctttttttttttttttctttttgtaggtcattcaatgaaacctatagttctcattgggtacataggtctttgcttcttttcttgaccttaacatttaaagagtgaagaatactttttgtatctgaaaatctcaacatctctgagtgctaggcagtgagcagttgccagggataaatgatgaagaaaataattatcacttcctctatggcaggtactatttcaacactccacatatgttaactcatttaattctcttaactctttaaagtaggttccgatgttcctcccatcttacagatgagaaaattgaggcacagagaggttaaataatttatctaaagtcacccaattaattaaggagtaaagctaaaattacggtgaaagctgcacagtgatcctaggagagaggtactattattctcatgttttaatgaggccactgaggttcaggaattgttgaaattcactcaggcttctcttagctccaatgcaagctcttgcccagtatattctactgctgtctttactgtaaaaacacccttatttctatcccttgcagaccctagactccatttagttgagcaagtatttactgaaaaaccactgggttctaggtcttacgccgggcactatgcatgcagggatgattttttaaaaattttatatccttatgtaggtgagtcagatcctgctgactaattgaattaattttccttttgggggagtccagaagtgccttttggtcttgagtaccgtgctggtcacatgaaagctactcaaactagatactaatatctgttggttggtaaaaggtgatacaggtatgtcattgaacaagcaattttgttctacaaatgtttgtattgggttcagttagttccgtgatgggctaatgtcctacactggcctgattgatgaacccaaataaaacttttaataggatgtcaccttttggttttatgactgtcactttcccatttgaggtagtagactaaacagtttaagagcgcaggcattcagctcttacaggattggcttgagaagctaatattatgttgggaaaattatataactagacatcaggacatatggattatagttccagctctgatattcattactaactatgtgaatattgtcatgtcttctgatgcctaatttttctcataggcaaaatgaggaggttagactaagtgatgattaagatcacttataaaatcctagagttcatggaaaacacataccatgactagtcctttcggtcaatttacgagattggttgttgactgtagataaatcccttaattttgttgtctttgtttttcttgcctttcaaatggctttgataattcctggtgcacctaatttatagaaattccgtgaggatttagtgagatattgggaatataagtgctctgaataattaacgcattacatgaacacaagatgatattatttgtactgaaagttaacagaaagatgtcgagtttctcgttacctccttccttccccctcaaaaaaaaaaaaaaaaaaaaaggcttgagttaaaaaggagtttgatcctggtcaggctgtttcctggagtttatggaactccttggaactctacagggtcaataggggctttgtcctgctgtgggtcagtttcccacagttggggtaaggctgccacactttttctcctgacaacactttatcaaacacacccgcctcacaaaatgcagcaattcattagacaaaagtgaggttttgagttacaataacctctgctttgttaaaagccccctcggaatctgagatcttctccgtaggccagcagacgtgcacatgtcccccggtttacaaaggccttataaacttagcctgataagtcatcccccaaattcgtgtgccatgtctgtctctcagtggggatatttttaactcctccttctaactcctctcagttcctttaaggaactgtaatccgaaagggtcaggcacttggcttttacttaggggaaaactttgaaagaatttctgaggctccctctggggtagggctggctttccccaaaagaactggcccttcagagcgtcttttccacataagggcttgtgtgaggcctcaggcaccagttgatggccgtgtcttccccacgacagatggtcaagctttcaatttcagcaagtgatccactgttgagggggcaggcgggggactctgccagcatgccaagtgacaggccagcttagggtaacagggatctggtgtgtgcccggcatagcttttgtgctaacgatgggctgctgacaggcgccctgccccagctcatctttgaggcagaagatcctctgctcccttgattctgtttctccctggcatagctggtgtcctgtttgcctgtctttcaaaattcattttggcaccagatggaccccctcatggtggctagcagttgtctgacttgaagaagccagagggtgtgctgacagctccttctagcacaacctgaatctggctgtcttgtctgggctcaaatggcttaaacacacatgggcagcaaatattaccaaccctggggaagcaagcagggggccctcttaagggagaatggcaatgacgtctacctccataatgttcatgttgctgttgtggaaatcatgatactaataattattcttagtagttcgattaatcttatttactcttattagcaaaattgctgttacagtacgattgctatcaatagtacaattagtattaacatcattactgcactacttctgtcattactaaaactactacatcatggtggttaagagtacagtctctggagctacactgtctgaatttgagttctagattcacacttcctagctttggacaagttatttcacttctctgaatctcagttttctcatctataaaatgggattaatagcagaggttacttaggaggattgtatgagaaaacagatttgttcttagcattgaactgagcacaaggtaagcacccaatacacggaagccattcttatgatgactgccaccatcagcatacctaccatgtatctgttactctgccttatcgcaattttcacagtttccctatacagtaaggcctgttattgcaccagtttatagataaggaaagtgtggtgcagagaagttcagctccttatccaaagtcacacaggtagtacctgtcagagtcaggatatgaatctcattattctgggtgtttctaatggctgtggcctttcaccatatcacacccactcttgttgtcagtttagtgataatcagccctctcctggggcttgaagtagctttgaaatatgcccttctaactgactgttcttgaaagcagcagccagttttcatgtcttcagtgtctatggatataggattgaaccctagcaagattcaaggatcacaacagtcagctccactgtattaaatggtttctgaaagccatgtgtgatcagcagggctacccagcacttgccttctgggagctcagaccaacaagacagtgcaaaggcacttaggatttgggccactcccttaaccccccttcctttaccaaatctgtcatattgaaagtgggcaagagtcaatgactggctgattgtcctgtgcaaggacagtgtgggtcttggtaccggaaaaggagagctcaaaatcagattttgtttcacacagctgggcttcagtggtgttctgtaagccatttgtcttggacgaaaggttgatcaactttggcttctgtggagagaatctggaagtagcggcaagtgattatttagaggcctgctttcattgatgggcagtcaaatgttgtgtggtgttaaacagtcattttaggacgatgtttgcatttttaaatgttactcttttggttgaaaaggccattgtttgtctctaaagaatgattcccacaacatactcccatcttggcagattctaagagaccaaggagcagagggattcatgtgggacttctctcagtttcatattcagaaattggctgaactctgtatgtcttcgtgcagtgctgttgttatagaggatcccagtgttacatgattgacagacattgcagtcagagccaaattcagactgaggcatcatagggtgatagttcttcataatctatttgtgttgagatggggattttactccagtgtggacttgaagtggaagaaaggggaagagaattgaattacaacaagaattcagttgaccagcattttaatgcattttgatatttttaggaaacatttcggcctgaaatccacaggcacatcacatctaggcctagtagtaaaagagattgcaaaacttaggtatctttggaaatacttcttttcccaaacctgggcaggtagaaggtttaattacaggtggtagacatgaatgccccaatatgacacttttagtagctgctgcttttccatgatagactttaacaactgtgatggttacataagaaataactcagaaagttatagggtgaccatataatttatcacccataccaagacatttttgagagttaaagtaggtactattaatatatacaccagtacagctggtataaactgggatttttcttggcaaattgggacctttggtcaccttagcaagtaaaacccatgaatctcactacagaaccaattcagaaaccaaggtggcagtgaggcaggaaaatctttattcaatcacagctagctcttgtctacagcagacagtttaagaaaaacaggagggcctggcgcggtggctcacgcctgtaatcccagcactttgggaggccgaggcgggcggatcacgaggtcaggagatcgagaccatcccggctaaaacggtgaaaccccgtctctactaaaaatacaaaaaattagccgggcgtagtggcgggcgcctgtagtcccagctacttgggaggctgaggcaggagaatggcgtgaacccgggaggcggagcttgcagtgagccgagatcccgccactgcactccagcctgggcgacagagcgagactccgtctcaaaaaaaaaaaaaaaacaaaaaaaaaaaaaaaaaaaaaaaaaacaggaggtatttgagaagtcaaaggagtttagttagtttgtgaattttacttatttctcatgggtagtactaattaaaacattttacttgagaggctaagataaaaagtggttaccaaatccttgtattcatccagcatgtatttgccagttcatcatctgtgagtttatagggcttaaactgcatgttgtcgttggggaccatgagtaattctcagacaattatatccaattggaacctaacttaaattatgatgaaagctttccctctgtatgagtgaaaatacttccttggggcttaattcttctgtgagatctgttggcagtgccaacagtgtttgtgtcataaggaaggtccagcgtggaaacaaaacaaaggctaaagccacaaatgaaatattggctctaacaccatgctgaatatttcagaaaacatgtaaagagaatcgaatgcacaacccaggggtgacttacctcttttttccctcccgtgtcagaaaccgaaatgctaaccatgatgatttgtttcttcacaggttcttcttgaaatttttcctcaaatgtaaccaaaattgcctaaagaatgcgggaaacccacgtgacatgcggagattccaggtgggtctgacttatctttcttgaatctcaataatggcatgaatatcaggagaggataaaaaagtcttaggcagaagatacgtagctttttttcccagaggtgaagagcagctgaggcccttggtcccccaggtatctgcaatctagcagttgtttagattagagaagagtgggaactgtaccacctgtgctcactggtggaaacaatggtgttctttgagtctagttttggctgcctgagtggactcacttgcctaaacccccacagattaagtaaagtacatagaaatgatgaatcctttgtctaaaattttgtatgtagaaaaccagtaaataagagtaaagaggctgagcgcagtggctcatgcctgtaatcccagcactttgggaggctaaggtaggcagattgtttgagtttaagagttcaagaccagcctggccaacatggtaaaacttcaaccctacagaaaaatacaaaaattagctggatgtggtgaatttgcctgttgtcccagctactcgggaggctaaggtaggaagatcacttgaacccgggagttggaggttgcagctgaggtcatgccactgcactccagcctggataacggagtaagatcctataccccccaccaaaacaaaacaaaaacaaacaaacaaacaaaaaacagtaaagagtacaactggtaaaactgctctgctttacagtaatggctttctcttcctttgcttctctctgctcacctcttccaattttggaaattgttagtggtagctgcctattataaatggccctgttaagaagcataacatctctaaaatgatatggataacaattctgtttcagaaatgtccttaattatacatttactaaaggaagaggactcacaaacaaattcatttacttctaagacacaaaatggtacttggattttagaaaaggttgttgagtctagacgtggtgcttctctgacttaaaagtgctgaaaatcccctgaggatcttattaaaatgttaatagaggtctggggtgggactggaattctgcattcctaacaagctcctgtatgatgccaaggccaccgcccacactttgagttgcaaagttttagacccttgtgctgctctccacctaatggcatggctaagttatttgtatggtcaatgttagtttccctgtcagagcaacgatccatttatgtatgctcatatggtccatcaaggaaacagcatggtgtttaaagtatgctcttaagtatatttagtcagctttaagtgtagattgaaatgtatgatctctgagagaatcttgaaaaattttagctgcaccttcattctctgatgggaaaaaggaaagatgatcttgagcattgattggagatgtcaatatctcttagtctccaagatgatttcttttaaggaggtgagacttattagtcttattaaagaacaaatgcggtagaaaaaagtaatctctcctgagattctgaggtatttctctaaaatcatcttggcttcaccaccttttggcttgacacacaggaatggggatgtttctttttttcttttctttcgtttttttttttttttttgagatggagtcttgctctgttgcccaggctggagtgcagtggcacaatcttggctcactgcaagctctgcctcccgggttcatgccattctcctgcctcagcctctggagtagctgggactacaggcacccaccaccatgcccggctaatttttttgtatttttagtggagacagggtttcactgtgttagccaggatggtcttgatctcctgaccttgtgatctgcttgtctcggcctcccaaagtgctggaattacaggcgtgagccactgcgcctggccaggaatggggaggtttctagtttcttgcaaaatgtttcctccggtcatctgacttcaaacttggtgttctcattcccatagaggattttttgtgttatgtttgagtcaactttgcaattaagctggcaaaaccacacatgtggtgctactaagtgtgtgttgcttagggtcttgcaacatgaggctgaattttggaataaactgttttgtagcttgctttggtcttgacatgaaccttatatttcttttgaccaaagcttgagttaggagcaaagtatagctgggcgtgaaacagtgtatgtctaataaacatgtctaatgcctaatgtataccaggattaactctgctgtacctcttagggcagcagagtttgggatggactttgatgacactgggaacctaaaagagcatccgtgtagaacttccaggggctctcttttctttgtggaacctactagtaaaatgtctgaaaaggttgaattatagaaatatacctgttatacaagatgagaaaccaatttagtctattatttttgagaacatctacaaagcttctattttgcaaacaaaatagttattctttgtttagtagaaaggctgctgagatgaggaggcacaacatagatatctggaaagtcttataatcctttggagcttcagtttcctcaactgtaaaatggaggaaaattgacacttctgcttatatcactacatatgaaagaaagcaatattttgcatgtatagctaatttgtaagtgataaaatacaaatgcaagcctttggagaaaatccatgtgacaaactgaagatggatcatgagttcagtctagggtttctcaacctgggcacagttaacattttagactggataatcctttttagggtcaatcatggggggtgcccccatgcattgtaggatgtttagcagtgtcactggcctctaccctccagatgctagtagagaacatctacctcccaatcatgacacccaaaaatgtctgcagacattatcaaatgtcccctggtggagagaggagaggcaaaatggcccctgactgagaactactgattagtcctatatctgataaccgctgacaagctcttactggtgacagtgccactgtcccaaaaattgcacactttgattaagtgtgagagctgcccagcacaaagtccatactgtctttcaaataaatatgatttatctgaactctgacactgacaatgctcttgcctgtgattctcaaatgggtcctaaaatagatcaataggggcagctaccttggccaccatagagtcagtttttgagttaaggatgagccgtgtcttcctttattaacaatgacaaattccttattgggtctcaggtttaacctgctttgttcccatcacccactctttgctgcctagaagaggatggaggaacccatggcagaatgaacactgtcacattttattttttatccctgtacattaatacatttctttattattttcatacaaccaacattgggtttcatgcatgcaggtgcatggatatttgtgtaattagaggatggatgaattgcctcgagagttaaagcaaaacctcaaatctctctaacccaaccttttattttttcttcttcagtctttttctctttcatgactatttactcctacctctctctgtattatttcatgctggcagccattacaccctttttgaatccatttttttttcttgaattatataacaacagtcactcattctgaactccctacaagggatgctgtttgtttgtcttctgtaaatattgtttttttccaggtctccttctgaagtccagatctttccccattttataggctctctccagtatcttctccagtcacagcatcttaaccactatttatgcactgagaactctggtatcagaatctctgagacctgacacccaggtttagatctaactgtccagatgtctgctggatatttccaggaacttcaactcagtcagccccaaactgaactcactgtcatcctcaggtgtttttctgtttgttcgttttgcctccaccccaagcttcttaggttctctgtcttggttcattcctaactgcattaaatgctgggaagataactgtgtctatattcagcatgttccatgttcacgtgtataaatgcatgtgtccatgtgtttacctttatgtgcttctatcgatattggtagcgatgatgatgataaagctaacatttatttggtgcttctttagtgagagacattgtgcaaagtattttacatgagttatcatgtttatcttcaaaatacccttattaagaatatggaaatgtggattattcccatttttaaaatgaggaaacattttagaacagttaagcaatttacccaaagtcacacatcaactaaatggtaaggcagtggtataatccaagcagtctgactcagatattttctgatgttttggaacaacaacaaaaaaaaattgtccatagtctgtgagcagatatttagtgaggctataaagagatctcgtaacatctgagagccctaatgaccccccacaaatatgtgctggaatcccaggaaagcctgagaggggtcttcaaaagagatatttgtcctagcagagcctaaaggtgccatctgcatgaagaacattgacacacaatcaaagttcatcatgcagagggtagagttgtgtggaagtgaggaaacatgaacatttttccagagtacagctacagtgttgatcaatttttacttgcagggactttagaaaaacaagctattatttagcaggtaacctgaacttcacttaacctgtaaagggtttggtcaattctccaaggcaagagagctcctcacctagatggggcatgagtaaatcaccccgaagacatctcagagtagtctgctaagaaatcctactaaatttcccaagtcttaggaccgaaccaagacagggaggattagtctttgctgtagctgtcctggctacagaggtgtgtgtcataatgatattggttgaagattgcttatgagtaagacctatactttttagcatttttctcatagcacactaattgggaggctggtttcaaatatttttatgtctctgttgcctctgagggtgagtgaaagagtgtctttctggcacaaaaaaactctggtctcctccttacatgtcaatgtggcttttaccagttttattgaaaacctgagtcctggcacatctgactgaagacaccctctcttgcctactaagcagggtctgtgcagtggtcactgccgctgctttcctccatctcactttgtatgcttgccggccagcctgatcttcatatagcaacgcaggagcgtgtctcctctgaacagcaatcaggggcctgtgtaggtgactgaggaggacataagaaaggttgttgatctcttgacatggaaagacattctgtcaagcaaactcagcttcacagtggctgggcttctgctgtgtaaacagagattgcttaattacacaggtcgtgtcaattagtgtgaccttagtgttttcaagaaattaatcactttctgcagagctgggctgtgttcatactttaaggcagtatggaataaaccttgtagaaaatctggcacaatgtttttttttttttaatttacaatggatgctttcttttgaaatccctaggctgtagttagggtaagaaatttgcttaaatacaacagtggatacaggctttgttaaggactggtgggtatgaggaaggctggaggaaagagaaggggagcaagctggggatggaaatagctcacgacacagggagaaattcacttatgactaaacaatcctatttcttcgtcttgacactaaaaagatgctaatgtcaaaggactatgttaaaaccatgcttcggtctgatttttaaccgacaggagccagacaattcaaccttaagatttaaatttttatcaatagctttccttttggggactggcagaatgagggtggtaagggaagaacaagaatcaggttcaagctgtcattgcaatagataccataatacctggagactgaagtaaagtataaatttccaaattcatcttatctcttcaataaagtttttccattggctataaatctatattcacgtataaatattagatctataactatatatgaatgtaaatagaagacatagttatgcacacatgcaggaatgcgtgcattcagtaatatttattgaagtgctaagtggtgagtctatcatgatgaataagaaagataaggtctttgccctaatgaaacttatattcttcttgggatgatactagctcttgtaacaaatagaacatataatatcgaatggctcacctgcagcagaaggttatttcttgctcacataatggtacaaggcaggtgttcctggttgacgagcaggtgttgtccttgaggttatttggggacctggactccttttattttatgcctctcctattctacagaaccctgctgtctttatccagtcctctgatgggagaaggacacatgaagggtgccatgtgctttttaaaagccttggcttacaaatttgctcacttccattggctagaagtcagtcacatggtcatatgcaatcatagggaggcttgcatggtctagctgtgcagcccatgaagacaagaaaatggatgtatgtagaataattgccattagctgcaatgaagatgtgtacaaattaacaattacaaatattagaaattgtaactgctgctataaagaaaattaaacaggttattatgagagagaaaaacagtgtggggtgggagatgaaaacctctctttttttcttttttttttttttgagatggagtctggctctgttgccaggctggagtgtggtggtgccatcttggctcactgcaacctctgggttcaagcgattctcctgcctcagccttcagagtagctgggactacagtcacgcaccaccacccctggctaatttttagattttttttttagtagagaagggagacaacctctcttaaagtaggtgaccaggaaagcgttctgaggtgaggacactcaagttcagagatcaagaataaggataaaccatcctgggaagagccagagagggttctgagcaaagggaatagcaaacacaaaactcatgtttacctcatgtttatctaaggaggcaaacaatcttgcctcacatcttagtcatttggatagtaaagaagaggagaaaccactgggttattcatcccaaattcccaccaaaaatgtgttttgctttttaaaatgatgacatgagttatgacattaaaaggcaactccctgccttttcaagtaaattctagaaattttggagaatctttgctgtttgcttaacaagccatggtatctctggatccgtatgttttagggaatgattagaggattcttaaaatacatgcctgacctctgcagtttctgtctgctttaaatacacttacataaaagggataagaatatgtgcttctttatttctcctccaccgactcccagcccctgtcttggatgtacttatattgttatattgttttgacaaatagcacatcttgcaattaaattctctaccaacagaatgctaggggcccgagctgcgatcactctcttcatacagaataatttcaagaggctccatgctgattaattatactgaaagcagctctaatgatagtttcagaatacaggattaagtcacataacatggtaaatacaaatggtgattttcaacctgatatattaaaccattatggcttattgggcaaatatgtatcttggcatgagccttatgctgagccttggcagaaagtgtgcatcactgagaaggaatctttatgaacagcatttgatgagtggtcgccctgcacttagagaacatgtatttctacattaaacacagctgcttttaaaggaaatgtaaaatacattaaaggatgaatgtaaaagtgtttggtttgatcagtgattaccaatggatgctggctctgaagatgcctatagttgttgggatttaccagcaaaaggtatccttatattcttccactttttaagttgtaacttgtagagctctagttatatgtcagacaacatactaagtgttatacatgtataatcttacttatttttctaccactttttctcttgtttgctttagtcctgtcaagcacattggccttccttcatttttcttccccacatacaccaaactcattcctgcctcaggatctttgcactttctattctgtctccctggaaaactcttctgacacattgaatgactggatattttttattcagatttcaggctgagcacggtggctcatacctgtaagtcgagcactttgggagtacgaggcaggtggatcacttgaggccaggagtttgagaccagcctggccaacatggcgaaaccccatttcttctaaaaatacaaaaaataaaatttcctctttttttgtcacttccttaaagaagcctttcctaatcacccaattaaaaatatctcccacctaggaatcatctaggtggaagatattttattttttcttagaacttatcacaatctgaaatttgcttttattgcttacttattgtctgactctctctctgtccccagtaagaactaaactcctgcttggtaaatgctttatcggttttgttcattgttgcttcttcagtgcatagaataatgtttggcacatggtaggcacatagtgggctcaccacgtattcctatgactaagtgactcatctaagattacaagcaagtaagtgatgggactggggatcaaattcaggatcatctgactctggaatctgagccattgaccaatatgccattttcttgctcctgatttccatgtccgtatgccatagccccatcgttacagagcacacatgacaatcctgtttgtctcattcctacctaaaatggccaatgaggacacacacacagagagcaccagctaaacaccaatgacaccctcaagagtagtcaaaagtatcctgatccacagagggaggaatgaggttcagatgacttgtgagcttttcatgtttatcatatgtcaccgttcaggagacagaagctaattctagtttccaaaggtctagattagcttagcacatgtatctgaggatttagaagtgtctgttcttgtcttcctgttaagagctggttttgcctcaagccttaaagtgcgaatgtaattccattaaccactcctttactccagcagttccactccatgacatcctgtaggttcacgcgtcctccataatttttaatgagttatttggaatctttcaaccagatagaagctagcaatcaggaacatttctgagaatatcgcattcatatcagccaaggatattttaaaggacaaagttaatgaagacctaactgctgcaaactatttttatgtaaataatactcaaactgtagtcggtcacacaggcaccatagatttgtactggaagtattaggagagtccagagagaggatgtaagccaggactgtgtactgaaaggccagaggccaactgtgttggcttacacctgtaatcccagcacttttgggaggccgagatggacggatcacgagctcaagagatcgagaccatcctagccaacatggtgaaacaccgtctctactaaaaatataaaaattagctgggtgtggtggtgtgcccctctagtcccagctagtcaggaggctgaggcaggagaattacttgaatctgggtggcagaggttgctgtgagccgagattacgccctgcagtccggcctggtgacagagcaagactccatctcaaaaaaaaaatgaaaggccagaactgagggtgggtgagaactgcactgtgagtctacaggtttcccttcaggcttgcctctgctcttaatttgtcctatgatcttgaagttgtttttttaaactcctgggccttagttttccaagctgtaaaaggaggtgttggacaaatctggactgccataacttatattgaggactccttttatcattttctcctatgaacctcctatgatgacatatttttcaatcaaattgcatttattaagaatcacgttctctttagagttctttaaagccatgtaaaactgctagttgagagcttctcatgtagatgagataaccagagtttccacatggagttgatagggtcccagacaagggaaagttaactgaatatttcagtatgcagccttactgtggatgcttttatgattccctctgtgcaataatgtcacccattattacagtcaaaaactcttagttaggagccactagattagctgatctctggagtctcttgtgactctaacatttgacgagtctgcaaagtagttcagctgacaggtagaatgtagaatgtagactatagggggttgagggtagaagtgtgatcaataccttttaaaaaatatagagagtttattttgtagagcagttttaggtttacagaaatataataccttctcaaccccatccccatcccctaacccccagtttcccctattattaacatcttgcattagtgtgatacatgttacaattgatgtgccaatattaatatgttattaaaatccatagttttgtgggccgggtgtggtggctcatgactataatcccagcactttgggagactgacatgggtagatcacatgagcccaggagtttgagaccagtctgggcaacatggtgaaaccctgttttcacaaaaaaaatacaaaaaaaaaaaaaaggctgagtgtggtggtgcatgcctctagttccagctactcaggagctgaggtgggaggaccagttgagcccgggacgcagaggttgcagtaagctgagatcacaccactgccctccagtctgggtgacagagcaggaccctgtctcaaaaatcaacatcaatttaaagtttacactagagttcactgtttgtgtgtacattctataggtttagacaaaagcatggacatatacatcattacagtattatacagaatggtttcactgctctaaaaatcccctatccttcacccattcctccctctcttctcccagactcctggcaaccactgatcttttcactgtcttcatagttttgccttttccagaatatcgtatagttggaatcatacagtatatagactcttgagattcactttttcttatttagtaatatgcatttaagacccctctatgactgtctgtggcttgatagctcattttcttaaattgcaaaatgatattctattatatggattaccagtttgtttttccattcatccattgaaggacatcttggttgccaatgccttttatttagttgagatttttattcacataattttaggtttacatgcagttatagaagtaatacagaatgatcccatgtacccattacccagtcttcctcagtaacattttgcaaagttattttacaatatgacaaccagaatatggacattcatgtaatctaccatcttattcaggtttcccttgttttactagtacttgtttgtgtgggtgtatttttagttctataaaattgtatcatgtgtctagctttgtctaacaccacagtccttatatagggaattttcatcaccacaaggatccctcatcttgtccttttttagtaatcatactcaccttctctgtgtgtccaaatttcctcctgtgaggattggattagagacctctctaatggcctcattttaaagtaatcaaagccctatctgaaaatacagtcacattctaaggtactggagatcaggccttcaatgcatgaatttctgggggaggaacaattcagcccttaacatgcagtatgtatcccctggttactggctttttaccctcaacataattccctgggatatcaatagtttgttcctttttattgctgagtattattccatgaaatgctgcccagtgcttttcatttagtgtacttcaagttaatatttttaaagctttgtgattaggggccctaaattaatgcaaaagtacaacaagcaaaaaacagagaggttaggaagcatagaactgactaactttaacactgatttccttttactgagttaccatgtatcagcactgaaaaccaagatttggaatttttaaataatcattcaaaattaacgtgaggaagagtttattttttggaaggaaatacttaactgtcacaatattctaaatttaaatttcaaaaatatatttatggtctaatctttgctctgattctgtgtttgttggagaaatgcttaaagatacaaatttcaacatgttgggttgcttttgtcataaccccttcttccccacaaactgctacttttgttaatgtgatcttccactcatgattgaatttagctgcttgtgtctttttgaaaatctgctcatgagacagaggttatgcttcatgaatcttagataatagagttaggacatacaaggtctcctgcctgacatgaagggaagaggggctgcctgagaagtgatggtgaggaagtactcaccaataacaaaactcctgagaaatcctcattgatgggaaatattgggaaaactagactgaactgatgagacatctcatttacagactattttcagaatagtaaggtttcatttagttataataaagcctcaaatgtaacaggctaagatacagatagggtctagaaagcgacattatataaaccaatgaaaaccgcaattcatgcaaggcctaaatgtgtaataatgtgttactagcacaaaggtctttaaaattgtacgtttgtgttgagcagtggacatagaagaaacactttctgtatccttttatttaaaattacagtgtatgctgggtcttctttacggtcattaagatacttcaggttatcaacccgacacattcttttgaacttcttgtttaacatcacccacaaattgacaactactactctattactgctactaatgtttattgagtgctccatgtgaaccaggaaccatgctggccactttaattaatttaagcctcacagttaccttatgagttaagtatggtggttattcccattgagagtcagggacactgggactcagagaagttaacctggccaaagtcacatcaaccaggaaagcttgagagccaaggatgaaattttgtgtctagttctttcaaattctaaatagagggggattggaataataccttttagggatatctatccagaaaaggatataacagaggagattctgaaccactgatatgagccaagaaattgaaaacatcagtgtaaaatatccaaagtccatgggtagctagaaacttcttttttgcccttctcgttctcttataacgaatactctcaactagaaaggaaggcccagatgaaaagtaccctggaacatgctgagtgttaatcagcatatctctagattgccacattaagaagcaaagccccctaatagaaatttcattccaaaaatatagtgattaaagcatatatgtataaatctaaacctgtttacataggctgatatttatttcaggagatataacttggacatcttcaagaatcaagtgcacaatttatttcaaaaccattctagagcagtgccatcctatagaacattctgcaatgataaaaaaattccctgttcaccgtgtccaatgcagtaggcaatagtcgcctatggctatgaaacgctcagtgtggctattgaggctcagaaagggaatctaaaatgtcgtttagtttaaatttaaatagccaggcatttggcttctgtattggacagtgcagttctagaaagtaaaggtgtaattataacagatatcgtgaaattctaaacatatcttttccttcgtattctcatcatctgtttctctgggcaggggagtggaaaaggggagaaagaaggaaagtgttgttgtgtccaaaggtaaaatcatttttaatgtttatctgtctcaaatttaggctgtgttttattgacaaaatttaggaaggttgaagatttggcaggcttgtctgtccccttgcctgtgtgaatgtgtcagcaccttattaattatgtggtaaactgtaaaggcccttttccctcctaccatgggcctatttttaaaggacacttcagtaccccttttgcatctcacagtgtttttttttttttaatttacaagtcgctctgtggattaattttagcatatgttttatttaaatatatcctgaatatttccaaattgaaatgggagaaattgttttgtggtagggaagttgtgctgtgagtttttgaggaacgtattagctgcttattttctagaaattaaaagtataaagattctctgtattatcttttttccaattttgattggcatttcagccaaatgattctatcacacatgtggccctggtggttcttctcttgccaagaaaagaaaaacatatggggtgtagtttttttttccttaaccgtttttgacatttttgttcaatgtaggattagatgacagtgtctttgaaacatactgaatattttaagccttaagtttgtagagcttgtgtcttacaggtgcatggtgaattgtcattgttttttttttttcctcctaagacagacatctagaataaccactttctgtatttcctgacactgaaaacagatatggtttgggattccttttatagtttcttcagctaacgactccagtgaccgctcaattgtggtctcatagtaaatcaaaatttctttgaaagacccagctctgttatgtaattgtaagtcctaagaagtcgtctctctaaaaagaaaagtgaatttctgttgccttaaataatattgactttgccactgcatatgatagtttttgaaggcaaaatagtagaccgttttcttctcttcttctttcttttaaattaacctgtaaacatacaagctgtgtttacacataaggctgtgtcagatctggttggtcaatcatgaataaagagaagaaccactctgcaaacttctgcatcaaacttacatgtcatcccccaaatgatttgttctagatggaatttggggtttcacagtggctaaggagaatactctgattccctgattgaactctcaactgtttcctatgcattttaattaagtagatttagaaaacaaaatcaaccttatgctactagtatgggtgatgtgttcatagcctgcaattcgtgggcatctttgaggctctgggaaaggaaattcatcgtattttgccaggatgcacttaggtcaacgaggaggacagtggaacttttaagtatgggaagactgtggggactggcgtccaagctgacaattcacaggcataggccagggcctggcgttttcccctctgcccagcttagctgatgaaagagtgttacacaagactcttcagaagtcgatgcccccttcagccaacttggagaaaaggcttcctcagaaactgaggcctccatctgtgccaacccttgtaaagcggttcacctcttcagaggctaatgcctctcaaaaccaagaacaattaaagcgagagtctttccaagcaactggggaattgagcaaaataaatcagaaatcctcagccttcgctctggaggctcgcctcattatgagagcagatctattagccctcttgccattgtctttcatttctcaagtgaggtgattctaattaaattaatctgcatgtcaatctatcggtgatcaatcaaagagcctgaggtttcccctatgctgcagggtgcttgcggctgacaggggctgataatggaggaagaaataaactgtcgagcaaagttaattagtcaacataataggtggattaaacgggagcgggctgattgctgtttcccatgtcaaagcatgaggtgggagctgaagctgcaattacagacaattattatatttggttgtaagaggtcgcatgaataaacatatctctgtgggtttcagttttaatccctttccccatttaatataaggagaagcgtaggtcatttcttctcattgttttagtcaaagttctctgagacaacatctttgcctgtgtctcttctggcaaactgggttcacagtcactttatgagatggtttcagtgtctaaattatgtcttgggccattcccaccagttttttttttaatttgaaacagatctaagacccttaattagcaggaattttttggggtggggtgatggtaatagtagtgagggggactttggtctgatgaaccaaactaatgtggaaagaaaaacgtacaagaaatctcaaaaagacatccaggagagaaaaatgcatccctgctcttactgaaatctttttcatttctctatcctcttaaccctgacacagtggggagaaatattttaaagattcaaaagatttttatttgcatgatcaactgtgatatatgcttcagtgtctaaactgaagggtaatttaggtgaaacacaaccacccttgtgtaaaaaaatatgctaataaagatcctcttgttaaaattatggttaacagtgtaccttctgctgtataactataaactgtgcaattttacttaaaactgcatcaaaagcgttccatgccaaagacccactcatcaatagctcctcttgttagacttgtacagcataagcaccagttattatgtgaaatagctatgcaattttcttcagctcccagctgttatttatttaacttgagtttattacccaccacgcttttatattaaaatgttcattcatttctttcttatgtctccaggtcgtggtgtctacgacagtcaatgtggatggccatgtcctggcagtctctgataacatgtttgtccataataattccaagcatgggcggagggctcggaggcttgacccctcggaaggtacgccctcttatctggaacatggtaggcgaatcattttcattggttggcattgctactttaactgtgaatatatttggtttctttcttccactccaccacatgttctattctgtttcaaatttcaaaagtctttttgaataagattggtcctctagggttttttctcttcaacatatggtggcaaatatttaaagacaggaaaatatctctgaggcccacctttcttgtgggaccactctctactctggaaatggctgatattgcctcctttcaggttgagagaaagaaggaggcctggaccattgctttattctaagctcccactggattacaaaataaggaaaggccaatccaagggaaaaataaggaaaggccacacaatttggtatcactaaaattgtgatatatttgacatgtttataattgaccattgaggttttataatgaacccatcctctttaccaccctcctggtgtatctctgtgaccacctgttgaacttcatttggagatcaggttcaatgtcgaggttggaggtgctttctgaatatgaagcccagaccaaatgtccctcctgtgccctgtacctaactcttacctcttcaccatgtgatagaacttgctgtctgtaagtagactttggtagggagaaatcccatttgtcttgagaattatggctaatcagtggtgcctttgagaggactgaaggaaaccagataaaaatttgaatcaaggaaagtgaatgccactcagaagaaccatgggttgggttaggggcacgcctgaatttttcagtgctgcatgtgtgtgtgtaatatatccactcttcctcctctccactcatccatccatccgttcatctatctatccatctatccatctatccatccatccatccatccatccatccatccatccatccatccatccgtccatccgtccatccaagaatgagtgactgaggctctgctggataccagtcaccatattagactttcttcaattgcctcaaactctcaacccatttccctcacttccctttccagtttgctagggtcagcaagattcttttcagaacactaccacacaaatgatcacctgattgcctgcttttttccatgggccaggagttgcccataatttacaaggtagaaaactcccttctctgccagcatcccaatttaataaacacgccactctcatcatttttgcctggctttttcccctgtgcttatggaacacacgaactgtactttttattaattagccagatgtaatgctcttagaagggattcttcaccacatccagttttacagtctttttaaagtaaaccatcatctttcaaaagctgcttctttatggtttcattagtgctgagatggatggatattacattttgcaggaggccatttcaaacacctgctcatgattacattcctagttccatttctgtacttaaaattattctgatcctcactttacagtaatgttgtctttataatacccttggagtcacttaaggcattgtgtgactagaggtgtttaggtgaaaggaggaagaaaaaattagggaaatactcagtgggcatgatttggagagtgctgcttaaggattgaagttatgtttttgactgtgggtggttagttgcaataggtactgcccagtctggtgacagacttgactgtcagtttgaaatctgggttcacactttcaaaatatgctcaggccacacccagctcctatttctgctcttgggaagccagtgagaaagctcctgacaccaggcaaattatccctccaacaaaaaccaaaagcaaacatagaatatagccttctctaaaggatccctctaggcaatgaggatcagtaacgttattttgcagcatgataaaggactaggtcttgaaataggtaccaggaaccccaaattcaatttagtttcactctggcctctatttgaccttggacaaatcgctttagcttttgggatccttgatttcctccttgttaaaatgaaggtgatgatctgtaggagagtttaaaaaaaaatctgtgctttgggtgggggcaggtaatgtagatagggaagtgggctgggtggaggctgagaagacaggcaagtacacgctctggtgcccctcggccccagccagttgttgctaaggggaatgagagcccaagtggggccagatgttccagtttggcaacagtgaatttttaattgttggtaactaattacaaaatttttggacactgaagggaggagagggggaaaaaagccacttaggaagaatgcagccacaggtcaacagtttgagacctctggatcaacacagctctaagcttcctcccagctcagatattccctcttctaagagtgttaatatttcagttggggtgtcatattattctaagttttaaagtcagcattttattcacctgcttcagtttatgagtccacagatggccatattactatatttttcaaaaaatggtgacatttcactgtgtaagtggttggccatccttggggacataggtatgtcctatttccttcagcaaggggctttgccttcaccgaagccttatttcacttctctccagtggaaagaaagggtagacatgttcaaattcttagtaatgacaatagcatagaaatctgcttctctgcagagtgagtcaaccaaccacacaaaaccacccactcatttagacacttcaggctgacacataaatatctactcagcaaaggatgactattgaactctttcattggtaatgtgtgggagtggacctagatgctaattcatgttgatgtgagggtaatactttattttgctgttgaaaagtcctatttcaaaatgctctgtttaaaagactttgagaatcatacaccctcatccctctgtgtctccgctcccaccccccaccgccttcaaacagctaccgcatggtgagacggcaaagcatgttctcctcttgtgacctgtgggaacctacgttctcccccattctggactttttaccatctaatttacaggtagcctgaattattttgggctattctgcaaatctctatttatatcctgcttgtcagactgttggaggaagtttccttttgtggctcacctttctgtgtataagtagagacagagatcgtgctttacattcatgcatgggctttcttatgtgacccatggactcgcaaacccctgtgctctgataaatgaccctgtaattcaagtatgagagttgacaaaggcaaatttatttcatagactcttgcatggtccaaagatagtgaatcctggcatgctatagatcgtggaaaatggtcttcccccgtactttctcttcattcataaataccaagattttctttggctggatatttatgggaccatttagcctagtgaggtttcttctttaagcaatagctttatggaagatgtacagtcgtggagacaggcagcctcaaaatgtaactgctctctcagttccaatttttgaaaaagcatgagctcgggatgaaaggagctgagtggctgccacaaggctatgttcagcgctaccctgtgtacttgccttgtcttccagtcatttgggcaagttcatgaagactgtgttctggggagtcattgaggggcctgaggagtgttgctattggcattgttgttcccctgagttccaggttgtgtttacttgaattcaaggccaactgtggcatcagtttctctgtttcttccccctgtggcaaaatgcggtgccctcacaacactgtggtgcagagcccctgtcagcttgcatgcgctaacactttattatctaatgatctaatatgcaacaaggcaaagtgcccgtgctcatcattctgacatagaatgccgggagaagtgactaaattactttatgtaccattagcgcttgcagctatggtgaactcacaggcagcatttatgcaaatgcctgtgaatacactctagtggctttgtcaggaaaccatctgacaagcagtttaaatgctcatttttttaaaggggatatatgtatttttttattttggtgtgcatgtgtttttctcctttcctctcttctttttctttcccttctcccctttttgggcttttggaggacttgcctcctccatggtgactagagaaatgtgagcacgttctagagctcacccaccagtaggagccatttccaggagtgggattaagtccccagtagggtattctttagatctagtttttttttttttttgttattgttttgaatatgtgcatccttcatatttatttggaaaaaaaaacaatggaactattagtcaagagtttttagaatataaacatgttagtgttcatgagctctgacctggggtcctacttatttttttagattgaagatagattctttaaaacatactcagtttttaaaaatggaaaatgattgaaatttagcttttgtgggcatcagatacaaatcaattaaatttcccttcaaagttataataaagactgcaacataaaacataaatgtgccaagatttcaagataaataaaaacaatagtggagtttggtcacactcaaagtattttgaagaataaatactgatgatagactcactgggcccatctcctggctgtaattatagctttggagaaatagagtcaggtgttcaccaccaccagtgaattctgaccttttggttgcagtgtcacattacaactgtccctgacaatatggtggtgttcttgatctttagcatatgaccttctataatccttttgatccagacagaggcagtttttgcttctgtcagttgcccctgggtgtccagcaccattgacttcctgtgaccagctgcatttaaatgtgtttttcatttgtttggtttttttgtttgtttgttttcatgtttttacggaaatgtggagaaagatggtttgagcttggagagactacctcaaattgagcctgtctcttttcccttctgtataatatggtcctaacaagaggatagaaggaggatcaggctctctggctgaagtggccctgggaaggtcactttgcttctgtgggcctcagttttgtatgtccagtgagagccaggtggggtcctctctaggcttccttttagcatgtactattttatggtgctctgaactaaagctattggcacatgactttctgcaggaggtgactttggagaaatagagcttcctgggaacagagaaatccactggcattttctaatagaacccttcctctggatctccagccaagggataaggtgtcaataaggtggacttgaaatcgctcattcatactaagcaggcactacatgccagacattaagctaggtgcagtaggataatgcagactcagtccttgtcttcacagaatatatgatgtgaatagagaggagaggtactaagcaaaattagagtggtgcatcaaagggggaccacaaaagcagaggagagtaatgaagtgtcagggaagccttgtttcaggaaatctcatttatgccaaaaccgaagagatgagtaggtttttactaggtgtcttagtctgttttctgttgctttaacagactgggtaatttttgaggaaaaggagtttatgtcttacggttctggaggctgggaagtccaagggcatgatgccagcactggtgagggcttccaggctgcatcatcctattgtggaaaggtgaaaaggcaagcaagtgtgggtgaagagagctcacttttataactaacccactcccacaataatggaattagtttgttcaggaaggtagagcccccatgacctaatcacttcttaaaggtcctacctcgtaatactgttgaaactgcaattacatttcaacatgaattttagtagggacattgaaccattcatctattcaaaccatagcactaggcaaaggggacaaaaaaaaaaattgccaggtataggaaactgtgtgcaagggttgttttgcttaggtgaattccaggaacaaaaggagactgagagggctcctgttgcgcccaggcaagggaggagtggcaggagatgagactagggtggctgtgagggctacatcatgcaggccaaagtgggctggtcaggccatggtcttggtggcaattgcgaagtggggaggaggtcaagcagggctttgatgaactcagtttcaattacatgggctcctcagatccggtgaaagcccagggcaagtttgctcagacctacttataactttgctcttcgctgctggactttggaaactcaccagggagttggctgtgctttggagctgtccccctaattactccttattgtatcaatagggcatgtgttcttcatagaaagtcaaacattttaagagtcctttctcctctttttttttcagatggcttcgtattattgatttagtttttcgtaagtggcttagaaagagtgtaccttttggcatctttttaaatttgtggagaccctcaccttttcatggtctttagagtagaggactgctgcattatttgacccattaaaatgtatattaccccaccaaaacttagtgagtgaaaataaactaaaacaacagagaaaaatataccctcccaaatttctctctcccctcccaccaggggcaatgcctgagccacagctcacactgagtgaagtcagtgaaggatggaaggtcatttctttcactcttcctcattttacagagacccagagaggggatataatctgctcaagcttaaacatagcttgtttctctcaaaatccattcagcactctttgtacttgtccatgtgcatttcagggtttgcatagtttcctggtcactggataaacatgccagaggatttggggtccaccccaatgcctatccatttcatattggcctagccttgcctccagtctttctgggattcccaggatgctgagaagaatgtctgtaaaataaatccagcttcctgacagaaatgtacattcaagggcagatgatggatgatgcatagcttcccacatagccaacagcccttctgtggctagttttgatgcagaatcccagccaagcccactaaggcaagatcatcttggtgaagggcccaggctaagtagaaaaatattggtgtcatcttttgtgactgagggtggcatgttacaatttaccaattgatttccctatttgagaaaagaagacaggtgtaagagcaaaacattagggctaagaatatccagctgtgtcataaaatagagcactgagaccccagattttcaggtatcaaatcagggcttttactttgtgcagttgagaagatgccttttgtctttccttgaaatagaaaggatgtggtaagtggtcaagataatgcacaacgatgtgagtgaagactgatttccagtgtattccctgagtaattcataaagcaggtaacaccggaaatcctaacactggggatatggtagccagcaggatctcagcatcagacagactgaagggttcatgagcaggtgatctatgttctgctcatttgaccatggcaccaccaatagcactgataacaaatgagaaatagtgctcagacttttttgccatacttgacagtaaccaggccaggtaataatatttattactctattattatttactaccactattgttgtttttttaaactattagcatttatggatcatttactatatatgccagcaccatgctaactattttacttatcatctcatcaagtcttccaacaaatctcatgatatataataattattatcaccattttacagatgagaaaactgaggtttagaaagaatcaataacttactcaaagctgcagaactaattagaattggacctggaatttgaccttaggtctgcctaataacagtgctaagaataataacaataaacattccctgagccctactatgacaggcacagagtgctataggtaccctgttgtaaagaggagaaaaccaaggctaaagagagggtcaataactagcctaaagtcacacagcaattaagtagtagacccagggttcaaatccaggaagcttgatgctgaagtctgcactctaatctactgctctgttacattacagtatgagaaattccttccatctcctatcctattgttcttatttttttcttaacacaagcaaggcaattgtgctggtatcttcaacagacttttcaaaagttagcccagagcatatctttttaaaaaatggggcacatcatgtatatttactttatagttgattttccttcagaaacctgaaggaaatttttcccatggctgggacacattctgctagttgaattttaaaaaatgctgattttattcgatgactagtatattttctgtggggctggcaagataataaggatgctggtaatattttatttatttgcaagaatgtcctaactcatctccctagaaatcatttgttgaccatatgggctctctggcacgtgtacaaggtgtggaggaaggagtccatgagaaaatgatgagatgatgagttaaacaaccgttaggatactgaagagtttgtaaacctcatgctagaaataacatgggaaaccgatttggatatagggaggctagtttcttatatgaatttcttgacaaacctgtaaactgtgggaaatttccagtatttggttggttgagctaataaatgagtgagtcacaccttactaattttaataagcacaaagtgtggtgtgttgtgtgttgtaggggagatttggggaggaaagattgttgctttctacttatattttggccagaaatgacaggactttatgtaaaaacttttttttttatgagacagggccttgctctgttgcccaggctatgaagtgcagtggtgcaatcatagctcactttagcctcaaactcctgcactcaagctatcctctcacctcagcttcccaagtagctgggactacaggtgcactccatcacatcaggctaattattttgattttgtagagacagggttcctatgttgctcaggctggtcttcaatgcccgggcttaagcaattacatccccttggtctcccaaagtgctggcattacaggtatgagccagcctggtcagaacttttttaagcctaattttttttgtcttatatttggttacaaaagcatcataattccaattgcattgatttgcctaattgattgtttcaaaccaagctgtctctatacttatctgtcacaggagctcccctcacttgagaatttcagaggcttcaaatgatgtttatgggcaagtggaagctttgatgtgctgttcataaacccttcttaagatgagatatttagaagcagtggccaggggttgattttgaaatatttttgtttgaccattttcagttatatgtgcagaaataaattaaaaccaagctctgccactaccttactacatgactttgagtatgtactttgatttctctgggcctctgtttcctcatcaattaaggtgggtcttggaagagcccttcaagctctgatgatttgttttttgaacccagctaattctgtgagaggttcttttatgtcttgaggggctacacacctgcagccttggaaaagtggctaccaaaatgcccaggtgaaaggatccaatttccctccaccttggccatctctgcaggaggttaacagttggttctaggaggcctggaaaagccatagaaatgtggcatacatagccattgtgccttaggtagctctcaccctgcattcttctccctggatttcttcagctgggaaggtgttgtgtacaagcggcttgatagtttgcagtgagctttcagaccactatttcccatgcagtaggtgagataattttagaaaatggaggataaacatttaaacatttttaatggttgtgtgtttatgttaatgcgtaaacaaaacaataactccaacttcaaaatcatgatctcacagctattattgcttagggcaagactaaagttaaagaaaaagttgatctaaacaaacatagcagctaaatactattaagtaaataatagtgtaagtggtacagggatagaggaaaatcaggactgaagtttgggaaatgctgttagagagggctgtaagggttgggggaagtaataattctttcaagtcaccaggaaacagtgtaggaccctgggaaacattctttttttgagtcaaatcatttttaaaagaaagtcctttaggctcagtttactgttagaatagacttaaatatcctaacaggattttaaaaaataaaactcccaagctgctgtttttttatttttaaacaagtagggtctgcatgtcagagagcagaaattagtttggaaagaggacttgcatcaggagagaaaatcagccagggtccacccaggcagcgcattatgataatacatacggaaccagctggacactgagcaaggctgacattgtgttgtcaagggcaggatcgcccatcaatttctgagatagaatttgagttcagatgacagaaagagcagcaactgtgttgaaactgatgcatgggggaggggcaggcaggcaggaaccaccgggtctaaaggcaggaagtcctggtacctccggaagggggtggctctgttttctcatctggctgctacccttccttctaaccttaacatctgtcagcaagatccacctgggtccttgcatgattagagcccactaaagggggagcttactggtgctaattttaacccccaagagaatagagtgcctgctgctgaaatgggggctaggtcgacccaggaaatgggactccacgtagccaccagttgtcaacctaagaagcccattgtgggtgtagtggcaattgttaataacttttggaagaattcttaacttttcagctactctgtttagttccttaacatcttaataacaccagtgattcctctttagttcatttgcttattcattcaatcattcatctatttaacactaacacatgtttattgactgactgccaattatatcagacaatagggctacagaggtgataaggcagggacagttgttagcattatgacgtagactgtcacatgagtgtaagtatttatgtgccgatattagacaaataatggcacacggaatgatttaaactgcaatgatggttaagtgctataaggtacaaatacagactcctaagagagcttagaactgggggactcagccaagtctgaagaatcagggaaacttttaaaattttaaatgagaatgaacaggagaggggaacacatattcaaaattccacgtggggataaaacattagaagctgtagggagggcaaatagggaaggtaggttaggtctgagatccatttttgagaaactaaacttggaaaatttccataggttgtttactctttgactttgagatgtggttccattgcagtttcttaatcatgagctaacagaactcagtgtccataaaatggtagcatttagagcagtgttttgggtgatcatggccttactgttacgatagcggttgttaagtactttctctgcatcaagttcagtgctgagcactttgtatgatctcttttaatgctcttaacagccatgggagggcactagtattattagttttactaaacacatttgggaaactgaggccatcctttaaggatttggtcgtggccaaagttaggtttttatctgcagcttttgaatctccaagtagttgacacaggggtcctcaccactgttttttcttattgtttagtcagtgctaacctcccctccacattggacttcagacgtggagagaaattctcctgctatttgagcatgtaatataatacttgcttcaattgaaacaaattgacgacattactcaaaggcaaattgaaaagccagatctatgctaaatcccaagggtaagttagttggcatgtgcagtgatatatgggaaggtgcttttctgggttaagataaaaagtcctggtatcacgtcacactatcaggcaccccatctcaaactccctgtgccagccctgcaacttgaaatactcagtggacagaaatgatactttatagaaattaggtggtcatcattgttatcagatgaatatgatgccatcagcatgattttagcatcctcaaaaaaaagagatttacctggagggacacaagagaaaatctgaagcatggattgcaggattgtggcttttctgccggcctgccgtgggcaagtcggctgggagatgacctagtaattaaaatcctgcttaaacgtatgctgctggtcagttataacagaagcactaacatgggcaaccagagaaagataagaaaagcgaaacacaaaagtaacactcttgagcccacagggtgcagaaatagatctgaatggactgagtgcatatctgaacgctaagcatgaaagcagaacccaagtactaatatatttttatcccaatctgtgaaattaatcaatattttatatgcgaacatatgctcctgtgttgctggcttatttaattgacagttgcaatcagcaggataccagttgttcaaacccacatttttcatccacagttctggggagaaatgcagcaggggacccagggaacagggacacagacagtgtcagatttgaggcctcttctcaacccttcagtttctttcatcgtccttggggcaaagtaataaaaatttcaagatagtgcaaatgttgaatatgaacagagagcaatgtacttgggctactatttagaagaatgataattaaaatgaacgtagttggtacaaattgagatctttaattcttcattgttttttatctgtttctcttttgaacatagctggagaagccaacagatactgagcacctactatgtgctgggcctgaggcaaatgctgttgggtgtattatccgtgggctggtgggtgagggggatatatcccagccagttccaatgtattggatcatttcttgatagaggaagaaaatatatctttggtctttctttgccaaaatcttctggcggaatcatcaaaccagctgtgcttttccagtaactattatgtgcaacaaatctataaagtcaaacctcatattcctctacctttcaactttggcagaatcctagaaactctccttgatttggttagctaaaggcctgtggaatccaatctttgctgtttaaaagaaaaagagagttgggggaaagtgttattaaggtactattttagaatagtctatttgttagtaaattgttattattttcatgatacgtgcaacattctatagtgaagaccattggaatggacaatgtccagattaaaaatgaaagttaaaaggaactgcctgatactttaaaaatgtttctcatagtgttgctatcgtttgtgttagatgttcagactcagtgtgtgtttagcagcccaacatgtaacaacagaaaagcttctaagcctggaagtttggcagtattttcaatgttcctgtatttaaattggcacctgtgctattatattaggatgccattttctgaacttggaaatagaagaaggtggagagagattttactgtaattcatatgtgggtctgagtcttagggggaaaataactttacttggaaatagagtagtaatattctgtaaagttaataaatatccaccctctatcttggggataagaaattgcacaacttaagattttatgggactttggctgtatttgtatgattgaagtgaatattttagccaaactgaacagaaatttcagataaacaccaaagttgaagcgtagtttgggtgttttaaacatttgactatatcaatcaacatggattctcaaagtctcaagtccagttgaatccctgagattcagctatgtcatttgtaaagtggaatgaggaacatggtctgtttgcctactgctcaaggttgatataaagaataattaagataatgtatggtaaaaccctttaaaaacttaacaatgctagttaattgtcaggtatgggttgagtgcagagtactgtctacccagtttgtaaatgaatgaggtccctgtctgcaagggatgcgttgactagttggggtgatttgcctatgtatatacatgcccagctataaacacatgcatatatcaagatgagttcaaggaaaagtgcagtaaataataaatgggaaagataggaagagttcactaaagggttagtgttttgtagactgggatagaaagagacaccttcatgcaaaagatggatctttttggcaagtaactgtttgggtgatggaagtaagtggtatatctttcataaaaaaatatgctgggaacatgcaaaggatgtttggagacagtggatttgggaagctggtcattaccatctttcttttcttcttccctattttccttctccttctcctacagcaacttctcttcttcctcctcctcttcgtcatcatctcacaatttttgcccactctgtactgaactcttcacatagattaactcattcaaaccttacaacaatcctatgaggtgggctgtcttataattattgtcctcaattaaagtggtagaaactgaggatttcaaaaagtgaagtaatttgcccaagctggtaaatggtgaagctgaaatgtgggctagctgaggccccctgaatccagagctggtgctcttaactgctgctgaggctgaaaatgaggctagaaagggagaatgggccagactcatgagggtggacttgatcccgctggctaagttttgaaagctggtatttgaggaaggttaatctgggttttgataggtagactggactttgcatataactaataattatgtagtagaaatgaatcacaaacaggcaagtgcgagtatttgctctttgatgtccagacagaacagcccagaccccaaagagtaatttttgaggaagttgagtcagtacatcatagagttgagatgaaagtggacttcccattctttgcatggcttatgtgggcaaagtcaatgatacatattcctgtgcttatgacatcacagatcatcaccacggaaacatctgtgctgtaacaaacgctggattgcagtgtcactaaatgtgtcagggaggagaggaaactggctcaaaatgataaggctctgaataatgaaagttcactgaaatatgttagcaatggcagcctcggttgtggagagaaatataagcagaactattccgaaaagcacaaagcaggacttgtgcattattaaaggttgggcaaggttggtttcaaaatgctgctcacattcaaaacatggttttcttaaaaagtcactatctatgctgtcttgcatgacaataaaaatccttcaggaacaggagctcatctctcaaactgcgtatagaaaatcttctgcatagcaaagaaaggccaactgggggacttccgtgtgttttgggagaagacgtaaagatcaggagcagaattggccatgattatgtttattgtttggtaagtcagtgacagtattagttcaatgattgcagaaattaataatcagtaaaagatgactctgagccctctgaggatttatataagttgcacagtggtagatcatgaactgaatccagccttcagccatatttatgtttgggttgcatggcaccttcagaaattatgtattagttgctggcaattgaagatagagagattatatgaaaacctggatttactaatgtcttttataatcagaagagctggtagtgctggatccacattctcaaatggcaacgggtagggaaaactcagaaatcatcttccttttggatgaagcacatactctacatttagccacaatccccaccaatcccattgcatctcctcatcccatttcattgacttaccttcctgcctagccctgtgagcatttgattttgtgctcctcattggagggattggagattaatcgttgttcctagcacagttcctagtctatggagggcaccccctatattgtagctctgattagtctttatcagttataggctgagttatgaaaacttgatcctgagatcagcggtatccaattgaacttcctgtgatgatggaagtgtcctatctctgtgctgtccaatatgatagctactagccactataactattgactacttgaaatgtggctggtatgactgaggaaataatttgtatttcatattaattaattgaaaattaaatgtaaatagctgcgtgtagctagtggctactgtaatgggcaaagcaaaagcagattgagtaatgggatcaaacatccagtcagctgtcctcatttaggatagaatgtggaagatagacagtagggttgtgtgtgtgaacttgcccatcttacaagagatgacttataataggcttcatcacctaggggcatctacttccaaagtgggaaccactacctggctagaattgttgtcaatttcaggagcctaagacatgtgttttacaaaatgtttatgtgcacattcatagcaataagtgtaagtcatcttaagcttaaataggaagtctgactgttctctgtcccctaaatgttcagttaagggtactacttaagtataataactgtacttgtgagtggaaaagcctacattatttgatgagctgcttgactcccacattcacgacagcatagagccaagagccagggtgagtgagggtactgtgagaaggaagcctgtggaatcctgctagactgctggagggatcctctcttcttagggccaagggcacacaggctgccatctcttgagatttccatcgtgaacacactgagcacatctaatgatcatgttgctataaaccagctcacaagtaggattctaaaagatccctctctcatgcaactttttctttcgttcgcaccttgtttgcctgggaaacttgtcactggccctctccaccgtgcctggtagtcagagccctccatttgtctttgtcatagagttgaaacccagagccatctaccaagctctggcttaatggcaacccactggcctttttcctgaaacctgcctgccataagccaacttttccagttgatcaataaatgacttcactgcttctagggatatatacatggaggacaaaacagatgtctgcttttttcactccagtttaagctcaaattatagcttctgctcccacacccatacccctgccccagcaaaaaaaaacatgcctccttaaaacatagaaatcttaatgaaaatgatagaaacagtgttgtagctaattttgttaagtgatgactattaccgatcctcttgtaatagaaaaaaaaagaagaaaacacacgtgactatcttctgcttggatcattcatccaattggaattatacatcatctaatcttacagtcaaattctgctaagaggataccatatcttttttatctttgtgggcaaacatcaacgtaaactcctattacaatagtgaattgaatgattcctagaattcaataggaagagaaagacaaaaccctctaacaaaaaagtagattctacatgttttaaaatttcttcttagcaaaattcatagcaaaaacatttcctagaaaaagaccaaggtaatatgaactgagagtaactaatgaaatgctaaattatctgcacgcatctatgtttttattgctgaatttggtcctgcctccagacataaggaggctaaaaattcatattcagataaggaaaggcaaaccttggcgaacagatggagcagagttcagcataaaggtttaatcctatcaggccgattcctgtatggccatctggataatccggcacacacattcaaggcctgttaaaaatacgactccagccaagattagcgtcacagattttccactagacttgctcatatttggctttatgattttccaggcccaggaagactgcttgtgaataaagacttaaatagtccttgaagaagcagttgcatatttttttaacctgaaaattgtttccccttttcacaatattgggtgtccatttttggaaggttattttcatttccttttttccccttggctttcatttcccaaacttttcttacaacaggacaataaggagaattggactaaaaataattttgtgcataaaagttctccttgtcaggatgaagagagttatttacttattgtataatcagaggcacgtgaatgtactattgttgcaacaaatatcacaattggatccatgaataattcattttgaaaattctcttaccctccatgacaatttttccccattgctttgcaatggagtgactgacagtcatagaataagaggtgggaaagaaacccaaagaactgatgacaatatttgcctttggctgctctaggattaatattttgtacattttaattttggatttggcagatcaaacatgaggtggaaaacagtgtagtcacaccttgagttataaaattctgagctgcagtgtagttaacaaacaatttttgcatattatgaaacaatgctatgttgtgtgtcattaaatcaaaaagccttcaacaagtctttcaagtgcaatttagaagttacaggtacatcaaaatgtcaagatttcttactgctaaattgtcaaataaccccgtgtaatgaacctgcacacagttccagatctccgacagacaaactcaggaatccaaaagcgcttgccctggaatgttttggattacagttgttgcaccagcatttttgtccttcccttgctcaggtgctatgtccattgattgttgaaaaattttgctaattcagaataaaataagaaagctgcaaaataggaagagaatataatttgggcttagtctataattagcaaatggcataaattggaacttagacactattttgctaagtttaggtacatctagatattcaccactaagctaacactgccttaatgtagatggacattggagctacatttccaaatagtgcctgtgaatttttccttttcttcttttctgcgagagccattaatgctgtcaaagcaaagggcattcttgccaaatgaagtcactttggaataaaggatgaaaatcacttgaaattctcaatctcctcatttaatatttaataggtttaattgcatctagtatggagagatctctgtatcatgggttacatttctccttaaagtgacaaacatcacacacacacacacacacacacacacacacagacacacacacgactctttttcatatataatacatgaatctttgccaagtattatctagatatgctagtggacaggacaataaatgcagacaaataacaaaatgaaataaaaaccctaataaacaataaaatgcttaactgcataatgcaattactgaagaaaataaagtaaggcagaaacaaatccctagtaacacaagttaaagcaacagcataagtgttataaaggctgctacaccttgcatgaggaaactgtcaaatttgtttgtttgtttattggctgagtttatttgtttatttggagttagcattctgaaagtgaagtttgcatactctggtaccatggttcaggtcaggcattctaattgcttctggtttctaaagcatccagttggagaatggataaacaaagaatagatttgcctcctgtgcatggtgaaaatacagaggtccagtcttccagctggaagaaaaccttctgtttgtcctcttgcctgtccagtagctgctagtttcaggatcaaagaaggcaggttgtagtgctaaggagctgtgagcaggaaggtcatcattcactgaaaaaaaaaaaaaaaacaccagcaaaaacaagcattcagatcgagcaggaggaagagatatctgtgcgctgagtccaagtggaatattttgtgccctcaatagtctctccgtttctcccaagtacaacatcaccaaaattaaggagataaaagggagaaaagcatgagttttacgaggtcacaagtatcccgtagaaatgagctgagctcatgggttttatgttttctgccaagtctcaaaaatttgggacaataacattaaagtcgattcctcatttctgaaaagtttcccattaatattcattccaggcaaatgagatccttaaaaaaacattctactttggagggactgttgccagttccacctactcagtacatttagttggatatgttagcaagcagctgaactgggagttcttaggaaagtcttacaataaaatacataatctgaactgatgagagtatagggtattctcgtaaataaactctagttaatggggagctgatggtaattattatagcagcaactagcatactatgtggtgcatagtaaagcaacaaaacacaagtaggcattttctgtgtattttgctggaactctgtgaggtgagtgcccttatggaaactacaacttaaagaaggtaagagactgtttcaaggttgcactaggtgctagatgtggaatttgaacaactggagctcttgcccattttcaaatacagtcatactccaaatgttaaaatcaacttaacataatttcatatttctgtctttactcagaagccagtaaaggctagtgccagtattttcacctccactgtaagcatcagtggtctgctttgtagaaatgctcactaatagagagttctggttaatagaattctggaaaaggagagtgtgcacgttttcctacaccatatgtaatgggaatggaaaagaaccttatatcaccttgagatttagatttagatttagattagaaaatttctaaatttgtacattttatcaactcacagagtgttgtttctccagtgtatttagatacaggaatggagaaaaaagccaaacaatatatctctaattaggctttcataatgtcacatcgattgtcacaaatgcctcattttggggataagatatgataaatgctgaacctgggtcatctatatggctaccccaaacaagtgaggtattgatcacagcacagagagatttcagaaggaaaaataagagcagccctagggccctgctgatagctgcacacaccactaattcacctcaatgggcaggcacctctgagctcaattaacccttattcccaaggctacccataaaacccgaggtaaacatggctctcctggcccttgctttctatcaaagaaatagatcatttctattggaggctgaagtgcgattccagcttataaattcaccttgctaataaagagactgatgctcccagtgcgagtgtgcaggcacttgaatcatgtaacacttattctgtaaatcagaaaattttaaactaccgagggcatctctgatttcttctgccttctgtggctgttcgaaggaaatataaatgctcgggagatagagtaggtgatagcaaatgtcccctggtgcagttgtctgcacacagaacattagttgttaaatacgtactggagctgaacgatttctttctttcttttttttttttttttaattcttccctctcttttccttctcaccatgaccattgttcaagaagcaaattggaaatctggtaattaggccctgactcacggtgtagtattagagtcctgagccaaagttcaacaccctgaaatgaaatttaaaccaattaatctgttagatttttatcgcttgtccgtgttttctcagcaattcccccagcacgtggcctttgatcaactctcatacaaacgctaaaatgtgtgcctgctgctagcaagatgggaatgacattaacatggtactcataaaacaatcagagcagagaagccctcaaacaggcagggcatagtaatatttaataaaagcacacacataatcttcagaattagcattttgtgccttgcagtacctttgggagaagagcttttatttgtggagtgatcattattataacaaagaagagctacctaataatttccattttaactctgcaatgtgccatgagcatttcagagccattatgctaaactgtggtagggtaatcatgttattgtcatagtttgaaggaaggaaaatctcctctactttcgtggctggtgaggggtgggggaagggatttaaaaaaagaggcaaaccccaccccctaaccctaaacttttatttttaatgagatttaaaaccagaaattgggtcactggccttgcggatacttatgagtgtgaaaattcattggagaggaagaaagaatcttgtattaattaaatcaaaaatttgctggtaaaagtggttttgtattcaaacactgcccccacattccataatatttgcttggagatagacttgtattgattatcacatccctgtgctgaattgaactctttcataaatcttttcacagtcaaattccactgaatccatccactgtgactattaaaagtgatttttccctgtctcccctctgtttctctctgggtatcccaaatgtaagaaacaagtccttggctgctttgcatgttgtctgagctttctcagagaaaacatatccaaaatgaggagagaaggggaggctcagggtcagcgcagctgttttgtttgttttattttccttttttaaaatgtaattttgctctaaaaagtacaactgtttgctctcatagaattaaatgttctgctgctacttaattttttaaattattattacatagtaccttatttgtacacattgaaaaaatttaaatcatacaaatatatagggaataaatgttaatagtcctccttttctgtcaaccccagtctagttctttttataaggacctgctggggacagttatgcatatccttccttccaggcctttgtccatcatacttgttcacatataactgcatgcatactcatactggttcatatacaggttcatatatatcatttaaaaatcaacttaattacactgtcctttagtttgcaaattgtttttttcacctgctaacctattttgaaatctttccatatcagtttatagaattgttttgtgtattttaatgacactcctagtattctatcgtgtgaatataccataatttctttaaccaccccctactgggagcacctagacatctgaattttttgctgtcaataccgcaatgaacatttgggtacctatagttttagccacaattgcaagtatttccaggtcttcttttagcctggcagttgtgttgtgagtagggttaaaatgtaaaatagcagcctgtgagttaaagccagcccacaaacattttgtttggcctacgcattaaaaaaatactgaattcgtttccaacattgaaagattgaaaaatttgacataaaaatgtggcttcctggcttctttggaaagatcaccagaaacccagacgatgctaggcctgcatttttatggggtcaccaaaggctgaagctgagcagtgctgtcacctttccctggggcacgtgcaattcaccagcaccttcccgttgcattacagatgttgagaaacagtggccattaatctcatgcttgttctgagagcctgagctgctgcattcgtttgtatgtcttgccttggtctacatgggtctgtgaattcttaacaatagctcttgggcctgattctcttttgctggtcacagggttttctacattgcattattgacatgttggggttcttcatttatggggactatcccatgcattcatgcattgttggatacttagcattctttaatttaatttaattaattaatttatttatttattttaagagacagagtctcactctgtctggagtacagtggtgcagtcatagctcactgcagccttgaactcctgggctcaagcaatccttctgcctcagcctccccagtagctagtatgacaggcttgcacctggctagtttttaaaaaacctttcaagagacagagtcttactgtgttgcctgggccagtcttgaactcttgaccacaagagatcctttcaccttggcttcccaaagtgctgggtttacaggtgtgagccactatacccagtttgacctccagttactaaatactactagcttcccctcctcatcctctctctctgggatagctcatgattcctttacatatttttgaaatttgtcagtggggaggtgtcacagagcttcccctcaagactaatatgttataacagatgtataggaggagctttggaacccttagaggtctaaacttagaaaggtctgaatgacttacctgctctaagaatggcatatagtctcgaagcagggatggtggatggtgctgagtgtagaggtaggagggactgaggggtgtgtcattcttcctggggtacttcctttaaggctttatttctctaaaactaagacaatggtgtcaaatattgtttcctcacctggttatctctggaagcttgatgctctttcttgcctctgaggcattgacatatagctttgcttctggaaaattgctcacagtatttgaaaacattgcaactttccttgggaagtgtttgaaagcacatacacacgcatgcatgtacacccacgtgacttctgtatcctacgtataacaagtgggaaaaaagagggaaggggtcaagttcaaaaccagcaggtcttggccatgctattttaaggcctttcctgtaggagggtttctcaaagacacagaaacacccccttccacctccctttgtgcaatgatgagaaagcctgcaggagaccgtatttagctaaagaaatatgtgtgtgtgattaaaaaaataaaaattaacagaaattccaaagctaaaactgataataaacacaaagaccattttgtgatctgtgtgggtaatctcagggtcagcaattaatgaccccattggattccacagtttgactcagtcaggactctcaagaccaattcagttaaaccaataacctgttcttctcagaagtactagggatatcataacaccttttgtactccattctagcaactaagtagactgagttataaattaagaattgatatttggggacattaacaaaatgtttccaaactgcatatatttttagaactttatgtagttgttaaatatagtttatttctcttataacttgcttcaaatcatacatcatatggtaccactggtttgggagtacttaatcatgcatttaaacattttttacttttaaaggtcacttttgtttaagaaaaagccctatagttgtggaacactgatcacaacctctatgtatgttaaaaaatcagacaagaaatgtcaagtcacgaatcatttacatcttcttgattaattattttgtttttgggagaaagtagagaagagaaaagtcatctgaactgcccagttttagttgtaaatgcattgctatgagttcagccaacatgaaatgtttagtttggatatttccaaatttctctgtgcaaatttttaagattaatttgaatcaaaatcaaacccattctatttgtttgtgtggtggcacgtgagcaatggtcccaccgggctggacttaatattttctttccttcttgcaaaagttaaagcatgacattttgccaaatttgacaaagtccaaatatttttttgccagttttttcccgttaaaattaactagtgctctcattggcttcaatgctcagaaagtcagtcttggatacttaataaactttttattaaagatgagggtcccattttctctccttgaacaatatctccctttaggatgttgctttcttgttgttcataaaaataatcatgagaacagaagcatgacactgtagagttaaaaaccctcagtggcacgaaggtgcaccctgagagattttaaaaacaatccaagaattacatttatgcccagcaattctgttgaaagtatgccatgctcattaaacaaaccacctccagtctatttggaatcacagtatttgcaaattatttcccatctccaagggccatttataatggaaagaaaagagatatgaaattttgaaaaagtcaattctagggttttatgcctgggaaagacagcaaagcaaaggtcatggaaaactctgtggttgagccctgactcagctatttggttacataattcaccccgagtgacctgcattcttcacatctgtaaaatgggatctatgacatttatttgaaaaaaaatcgtaatgatttttaatgagacatgttgcaatgttagtgtttcagacagaaggcatggagcaagaatcatttcccgctccaggctcctctctttcttagtttcctattggatggtaatgtttatctaaaaaaacgtaagttttcttttcaggagatatatttaactatgaagcaattctgtaaggtttccaatatattccagaaagtcacccatatttaataagaaaaaaatccttagcatttcacaaattaaaatttgctttgtgttttatttcataaagtttcaggtttgataaagatttgggtaaaatatatgtatcttaatagaaacaatgaaaagaatgcttttaaaaactgaagttgcaccctgaagtttcaggtcctaatgtggctgggaaatgctgagatcttgagggactttctgttagtgaaaagataaaagattttttttttcctttttctcaagtcttcatcattaaagtttggttctaacagcagactccttctctttttcatgtgtgttgaaaagcagctactccctgtatcaaagccatcagcccgagtgaaggatggacgacgggaggtgcgactgtgatcatcataggggacaatttctttgatgggttacaggtcatattcggtaccatgctggtctggagtgaggtaggtgttgtctgaacattaatatctaatagcttgatctagttgaagatactgtctatacttgaatttctaatagaatgtgtagactctagtggtgccgctctgggtgggccagcttcagtctacagaatttggggaaactagaagagttggtttgggtttaccaggaggcaacagttactactggaatgacttcctttctttggcccataagcaatgggagagcttctgttttgcagtttgtcttcttgggcttgccatggtgtggaggtcctattgtatgttgggaattgaagaggagatgcaaagtcacaagatgtatagaaaaagcccattcaagttttagcaagggtgtaatctgtgactattttgcagaaagagtctacggtagcctgatcttcaaggaacatcattcaatggcagcataatccaggtgtaggtggttcttgacttatttggtgactattcatcagacagagtgatttgctgggagaacctagaaccacaaagggctttttctagctctaggaatttacagctctcaagcatctcagtgtgtgactgcaaccccatgaaaatgactatgttctaattgtgcagtactgtccaagcactgtgattgttcttttaacctaccagttgacttgtctggcaaccatcagcatcagctcaagattacaaaacatgcatcccgttatatagatgccgtggcaaatctgccattgtgttctcagttctgagccccagtttcttagccagcatgctccgagcactctctctttcacttcactaaagtttagaataaaaacaatgttagggttacaaggtaccatagggttcattcaccccatttgctttgtaagcatgtagtcatcctaacttactgagacttaccatatgctaggcaatgtgctaaaccttgaggtagatcatctcacccttctttctacactacgaggtagatactcgtagcatatttcttttcttgataaggatagtgaagctccaagacaaatagttacatagccagagagcagctgcccaaagcctatagaatgtaagtgatttgtatatggccacacaaagatttccatttctagctgtgctcccgtgacactggtttagcctatttctttgtgttgttttctctctagaggggccatgcagatgagcagaaagttaagactgtgatacttgggtatgtttgtctttccagaacagacgctgttctttgtaagccttctgtgtatactgcttactgccagtaacccactcaggcaggccccttgctagcttgtgctgctgctgccttggtattttctactcagcaaacaaggggtatgcatttggtcgtagaatcaaagttctcataaagccaaatcagagatgagcttcccagcccactcaactaatttttaggcaagatggaacatttcaggtatgaaaggtggagtaacttccccttgccaactgtactctatgttttgttgaaactattgggttgtaaattagaagcatcaaattcatggcatgttttgctgccagcctgctgtcttcctcctgctggagacagcagtcctcatgaggacagactgtcccaggtcttgtgggctgtatcttctaccttttccatctttctttctgttgcttatcaaggaagttgagagatgggaagagtaaatataatacggactccttgtttcatgtcattgtagtcaaagtggagctcaaaattggcattaaaaattactgaccctttgagaaggaggtgggttagtctgaagcttcctgtaaaaccttgtgccttcttaacccaagtggactccattgaatatggaataaggacacatcaggaaatcatgcatttgcacctctgccttacgcttaatcaaggtccctccattttttctcactttcctactttcttgacctgttttgggaacagcaaagggaggttagcatgtaacttggatttatccaaattgctttaaaggatctgtttctatataacaaaattgatgaaagtcataggaaggaaaacccattaatgtaatatctttgtcctcctccctcctctgtccctccagtgccactgccttgtgtgtgccaggagcccctcttcactctgtcccaggggtcagggtgggtccagccaggagctgagggtggaggatgcatgctccttcattgtccagcccctgctttcgtgctgctcttggttgtagctatgtcataaatcaactatgaccctgtcctggtgcaaactgtttcccaaaatatttgtgcagatcttcttttaaaacaagcaaatccaactgcattagcagttgggtacctggatgtaggactttaaattgggctgttatcatcatgattgtcctgatgttcagaagaatgatccttgtagaagtgaacccttttttgtaatattctaaactatttctatatttaggttttcgtacaggctacttggcacacacaattttctctgccttttcatgcagggagagaatttgatactgccccaaataaagaaatccattgtataatggtgggaatggagaaatagctcagacttgctaagggttcatcatgtgtaggcactttatgggtattactttaagcctcacaataggcttgtatgcaatactcctgttattctaattttacatatgagtaaactgagtttcagagaggttaaaaagcttgcccaaggttacacagccagataggactagagactggatttgaactataccatattttttttataaaggaaggaaaagtcctagttaataagagagcacatgcaatcttgagagagggaagaatgacagaaagaggaaagaaagaaaaaaaacgaggtttcataagccaggtggtatagtagtagaaagtagtaatagtaattgtagtagtgatgatggttgtttttaatcgaataaaattacatgagtgccttttatttttgtagaagcagaaaaatattaaccaagtttgaggccatttgtcaaggcttgcattgtacagaatcagaatttgatcagaagacatctaagaaaaagctacagaaaatgcagagtgtgactaatattagctaacattcattcactgagcacttagttcctgccaggcaatatgataaatgtttggtagtgctcttgtgggattctcaccactgcgtatgatgttgttctcattttactgatgaggaaattgaagcttggggaagttaaataagtaagtggttcagttgccaagtggtagagagatgggacttgaacccaaacagtccaaccccagggcttaccttcttaactttcataatttagcctgtgccaccatttttatcatagggtgttatcagatcagggtgataggctcacattgccatgatgtcttgtgctgggggtgccttaacagttgctgttaccttccaaggtcaggtagaattggcatgtacagactcagagaggtaagagggcttcccttcatcttccagttgtatatgtttgtgatcggcaccactggattctaggtagaatttatctttatgaagtaaaggatacatgcctacgctagggcaagacagttcacctgtttagcctcatctctagagctggatccctgtccatccaaagtctttgccccagaccacatgatcttgaggtttgtgccatgtctaagatccaggccttctaattttaagtagacttttatcacttctgcatttccttactctatacccaacacacccaggaagcaggctggcaggctaggacaagtggataacattttagattagcagctaatgccattatttagagtctttttttagctaaagaattttttaaagagccagagaaaatcaggctggcttaacagactctaatctgtgctctttccctaccaatccaatcttctgccaatgagtagttcagtttagctcatggatcaccccctgaggggtgggaagaagaaaggggcactttattgctcctaactcagctctgccttctgcgagctcccaagttcacatggcgttcttgtgaatttgatttgcccccttcctctttctttattgtttcttgcgatttctcctctccctctttttagaaagtaaattattttactcttattcttgtgctccttgccctgtcctactctaaaagtcttttaaaaaattgttttagtattttatatacaaatctaggaaaactagcagggttgatgtgtgatgtttaatgtggggtgagattatttttcttgaccagagccgcacttggttgttttgcttttctaccaacatgtgatttggagcagggaggggctcctgcttctggtgtgcagaactaattgttagtttaatatctcctctgaattcctccaatttctaaagagtgagcactggttggcttgcctgctgggtgtctagcactgggataggtaccatgggtaattaaagttgggctttgtgggatctggtgttttatttggaaagacaacttgcttccatgcagcaaattagagagttacataatatatttatataatctagtattaaattggtagtttacaattcacgctaagttctggaaagcagagagagtggtgtagtcagaagtagatggtttgaatgaccaatcaagttcctcttacatatggatgtagctctgtgttaggtatgttaggctctcatgacccttttattttatcacagaatttatacaatttagagtatttaagctgtcaattaaaaaaaaaagtacaatggtgggtttcgtggggagcagagaataatattccaggctgcaagggttgagattgcatggggtagcagtggataaggaaccaattgagagacttgggtattgattgtccttccattgcccaatcagaggatatagatttagtcattgttggtcgctggacctcagtttctcatctgaaaatgaaagacttagtctatatcctctttgaaatcagtgctacaattctagcaattcctttttttttttttttttttgagatggaatcttgctctgttgctcaggctggagtgcagtggcatggtctcagcccactgcaacctccacttcccaggttcaagcgattctcctgcctcagcctcccaagtagctgggactacaggtgcgtgccaccacacccagctaatctttgtatttttagtagagacggggttttgccgtgttggccaggctggtctcaaactcctgacatcgtgatctgcccgcctcagcctcccgaagtgcttggattacaggcatgagtgactgcacccagcctagtgattccttttagagtttattcccctgagaatcctcccacagtcagaaggggacagtggtggcaggtggaaactgctccttttcttccactattgttcttttctttcagagcacacttgcaatacacagatgtgatgttgatttgcaaaagaattatttaaacttcatcaaaacaatttaattggccacaaaactgcatctccctattgataggtctttagtcaatatttttactctctatgcttcagattctggtatctgatataaatctgagacttacgccacagtgttggcctaattcgtcttctagataatgttatggaagactagttcttcaggatattaatagatacccattgggagatgagagagggaggtttttcctggtaagtttgggaaatgctgagtcaaattctgctggtctttcttctagggctttgcacaacgtttgaggtactagcatgcaccgcaaatacttagatgcagtattcagcatgtcccaaacttttgtgaaggcagaactcttttttttttccccaaggatcaccttacagggagatatattggtgatggctgaagtgcattttgatttcatgttaatggagccaagtcatgaaattcaatcacaaagtggttggactgggatagatgtgagaaaaccatcttaaatatttgcagaatatcattcagattagaccaggaatgtttagagccattattctccaatgctgcaaggctttgaacaaaatttccctcatattttgcatctggttttagtcagtacacacttggcattagatgctatatgattttgtagggcagctatatttaaagattgccagtaccacttagctcagatggatgaagccaaagtttcctcgtgtgtgaagcaattagtctcacacaggttctcctcgttgtctttatccagatgcatgctttcttcagctacattcccagacacggggcatgaagtcaaaagaaacctctgggggagacctgtgagtgaatatagttgggtaaatggtggtttaggggctcagaagcaattttgccacttaaatcaaaaaattggaaaaccaagtggtaaatgcagtccttcatttctttctttcttcctatctatctctactttccattctcctttgtacacatagctcagaggaatgattgtcaataaacaagaggattggcttccctatgatattcaagagtggttgactaagatgcatacaggtattccaccggaagtttcccaggcctttttgcccggccttgactcttactgaaccacatgtagagtcaccacattttaagggccttgagaaaccttttttcagtcaagtatagtttcttattttgtgaggaaaaagagacttcacagtggtagggtggcttgtcctgggagcatattatctacttaatgctgggctcagagcccagttctcttgacatccagcttcacccccattcagcttttggttataccagattttctcatgaaatttccatgggcttttaacatacttccagaaatttaccaaaccttcctaaattttatacataattgccctaacactctgaagacttatctataccaccttttatgtgagatacagctccactaaaataaaaaagaaaattaagacggagaaagacattatgtcaaatattacctctttcaaaatgtcatgatagaaatgtaatacaatgtaaatagttgtgtccatttattttacatatattgaggcttacatgtataaatttaattcaaagttgattaaatgtgtggatttaaaataactcctagttgcctatttttttctaaatatgtttcatgtcctatatttaacctgtgcttattgaccatctattatatagaagttgctttgtgcaaaattataaactttatttgttaacaaatttaaaagcagtctggattagttgcattaaactttgaatatgactttgaagaacaactttcaagcccaagtaattttatgagaaatcatttctaaatgagccagcatattaaaaaaaaaacagataaaaatggtctaatggcctttttaatatagttacatagttacagccatgctcactttattcctaagaagccttagtctatattgttatttttgatgactgaggcacttgaaatctattttctatgttgataattatgaaatagttaaaaaaagactttaagatgacattttcagctcattatttacagcgtgttcaggaggtacacgtgtctgtaacttgaaaataggaaccacagaagtgtgatgaatttctaattttcatatgaatcaatgacagaattcacacctggctgcagtcatgtgacttttatgaagaaaatgaatatttatggatatctagatagtgctgtattcctttcttgctgattgctgatcactaggttggctccctgataccctgaactaaataaagccttctaccttatacaacctttactggctttctcttttctaaagccacaacttctttgggattcaagcacaccaccttgactccaacctttcttttcaacatcctcaaccaacattcattttaatttatgttctattccattgacttgttagctgctccttgtacctgcagtaacttttctccctgtcttgctggtgccattgctctccatgggatccttttccctcctttctgtgcccatatccctctgccctttaagatcctgtaaaataccacctttttctctggaatcttcccatatgactccaggtatagaatattttctcttctgtctaaattcttatgttgccttatttctaccatactgtgttccttatacctttccatctttaattatcctgatttaagggcattccctcttccttgaatgcaggatccaggataaatacagcttaattttctgtgatgcccagcacagagctttgcacttctgaggcattagtgaaaatttgttgaatgacactatttcccctttcattcattcattcattcagtcaaacaaatgctccctaatagcaactgttgtagttgacaatgcttgaaagtgtcagtactagacagattgtggtccaggttttgctaatgcatgtatgggtaggtagtttatatttagatataattgttgtgtaataagtatgcacataaatgtcttaatgtaaatctattggtgatggtgaagattgagtagtaatagaagtaacacgtgttgactgattgatacaagtgatgccttttcctacacttgttacaggaattgtgtcaattaatccttgtaataaactatcagataacaagtcccatcctactctctccccctttccccaataaggaaactgaaggtcacagaggttgagtgactttccaaaggtcccacagctgattattgacaaggcttggatttgaatcaaagtccacctgactccatagctatctcttaactatctaatatgaatgtaataaaattcatttatccagagatgtgttataataatctcaactccctaaaattcagcatgaaaccagaagcaagccaaaaaagtaaataaaataaaaagctttgggttaatgagaacaatacttcttaacaaactatgttatctgttttcctaggtcacagcaaattaggaggcccaaactagaggaagatcatgtgtggaggcaggctattggatacaggctcagtgacagctgatggcctgatgtctagggaagaaatggaaagccgaaaaagcaaacacagaactatattactgtgcagctcattaatgacagtggccctgagtaatcaaaaaagagctggcaattatatttagtatattctatttaaaacagcaggatatatataaggcaaccttgaaagactttcagcagaagcagttgtacagccacattattaaaaggggtttggcttcagttttttgtagtgcttacttttattacatctctgagttcctgaatgaacacgttaagtgaggaattactggttgcatgtgctagtatcaatgtatatcatatctagatatgacaaacaccacaaaaaatgttagagtgagtctctgtatcgtaaagctttgacatctttttttgtttgtttttaagcttggagagactctacaagtcttttggtgaaaggtgaatttattccctgactactttatcagtcttttggcttttatatttttctttactaattccataggcaaagattctgccatgtgaattgccaatgttgataacaagcattcatccccttccataaatgcattctgatttccttttccttttatattttaattttcaaacaaacaagcaaggaacataggacactgagccaggcctgagtagggaatgatgttccttcttgactgaatttagaaaaacaagccttgagaaagagctcattgtgcagcctcaaaccacaggggctggcgttgctggtgtctgatgctctccttctggaataccctgggcctcaggaactcacccttgcttttccagctcccagatggtcaggatgggatccagtctttaatggggcccaactggcacaagatctacatcctgggaagagagctggagaaagtttatttaaaaaataaattacaaaataaataaataaataacccacaaaaccagaggtagtggaagcataatgtatttacttcagtcttttttctcccaaatctgttattttgaaagatgatcttgttgccattttgttttgtacaattaactgcattgatttcgggacctggttagatgcctggtcagaactgggcagtatatttctgtgaatgcttaatgaggataccaggaagtttgtggtggaaagtaaaaagttttttttttgttgttgtttgtttgggaattttttagtaaaaagaattctgaatggagtggtgttgattatttcctttttgtagattcataagaaactttagtgaatctttatcttaattattagtggtggctaatggcatcacgatatttattcattcaatgttcaagtatttattgagtgactactagttccagggccttgttaaacactggaaacatagcaaaaacaaagaaggccaaggtcatatccttatggggctgatattctacttagggggacacggacaatgaataggaaagcatatctacatctctctaccatccatctgagtctatgtcgatatctatattgagagaaatttcagtgttaagtaacatgactgactattcaaaagctagattttaagtcccccatttaactcaattcctgagactttaatttcaaaagtctcctttgacattcatacataaagtttatctttaaggattcatgtgactcagcatattttggtaaacatcggtttaaagttattttcttgaaaggacaaaaggaaaccagaatttttgtgaaacagtaaatgcctcctctggctttttctcacgttctctgagaaatcatacactgcttttgagacaggcaattcttgggaatgaaagaatctgtgttatgaaacccagagaactctgattagggaacaaaccaaaacacaccaaggaactcagaagaagagctggcatcccctgatttatgtggtagccacttcagggaaatagagatataatatggaggttcagccagcacagtcgccaagaatatatacttttcatatttcagcttcctttagcaaccctgaaaataatatattttaaatgccgtgtctaactccaaaaagatgcatgtttcagagtagtggagggaaaacaagtttgcctgtttgttccctaacaccttggtatctctttaaaaatccgtagtttgatttggttctagagctttaattatgcttttatgttacagttttcttatttaagtgtctgcttcatgtctatcactcagtaccccctgcctatctcaaaagagatggatattattatcctaactgaggagaagggagaatgctgtgagaattattaatacataaattaaaaaattaatctggaaagtgctttagggtccccagagaagctctacccaaacataaagcatgtataatattattatcagcacctccacagagcacataggagctggtgcagtataagattagtaaactgaggcacagagggtgtcaatgagtgaatgggctagcatgccttagaacgcagacccttcaatgggtaacatctaaaaaccaccttgccagtgcccactttaggctttttctagccacaaatgctcattatttttccagagaagaaacatttccttccttttatcccttctctttgagtctttgcttgttttggactttttttctttacttttaagtgttgaaggtgattaaggttaaaatattaggtcctaaacctagtaatgagaaatcgctggtgtgctttctagtaaccccagttattttttggctttgtggcttgcaacttcaacttgcatttattttacctactcctattggttggaaaacatggataaaggcttatcttggaattgcttttttgttttccttgggaatcattctcagcttgcctttcaccagtgaggaaagttgttttgagtggccactatgttcccagttcatttcaaggtatgggaaaagctgcagatacaatccatgctttcaaaggcagaggtcagatgcaaagtacatgtaccaggaattatggaaaaacaatgaacagtcatatgaacagatagtcatggttgtataatgatggtcattagtcaggccgactggccacttccagttggtttcttgatcatatttcttaactttcctgaaacttatttttctcatctatgaaccagctaataatcatacctaccccataatactacaggatgtaaatcactgaaagagtttaacatagcgcttgacatatgggaaaaagacaacaaaaggtcattatagttgaagtcgttatcaaggtcattaccatcatcaatttagtgagaactagaacaatatagataataaaagctgcggaattctacaacatgcttccactcatatttttaaacactagatactctcatttacctaccatgtgggccatacttttgatatgatgggaggctgtctaatacgcatgtagaagattgtcctcttccctgcctctcttctgggcttccagactttgcaggctgcctctttggagttctacgtgcacagctgcatgaactaccatgcattctctctcctgatttcagctcttctgtcaaggagaggccccattcaaccaccttcatgtctggctccatcttgtcatggccacagtggctttactttgtacccagaggccacagtgggcatatctcgcctggctaacccccacaggattcttcaggttctgtggtctgagtctggagaagagaaaatgctcacacaggcagcttagagggagcagaagtgttgctgccggcaggtccctggcatgctgacagcctcacctggaggcctgcagagattatgtgtgtttcatcttactgccacatagaaaaattatttcttatgaatatagtattaatgcatttttattgttgagcagttggagaattcagagaagcatacagaagaaagtaaaattacccatacctctaccatctagaggtaacttccattaacattttgaagtttttcctttcttctgtgcaaatacgcatctaattcttatataatcacatgtaatacatattgccccaaactgatgttattctactttttaaataacatttttctcataataaaaataatggctttatatgtacaaataggtttattccataattatttacatgatccagtgcaagtttgggacatttacacacacagaaatacatacacataggaggaagaggcagacagagaagacaaatcacactgaatgttatcagtccagaaataaacactcttaccatttagcaaagatcttgtgtggcatactttttaagtattaatttttaaaccttttttttttcatttcatcttatcatttctcactggagttacagacatttagacatccttttcttttttaccacttacatgatatacaagcagtggtctcaagctcatattgagatctgagtgtcgagctagtcagataactaacattaaaagcaacttaggtagaaaacaagagttgagtattatcaggttaagaacagtagactcacctggactcatggataatgattatgatacccagtggagtcaatgatttagtagaattctggcctaatttatgtaaatatttattccagaaatattttgaaaatatcttgtatgtaagtcattaactacttaatttgttttttattttattttattttattattttttctgagacagtcttgctctgttgcccaggctggacagcagtggcacaatcacgacttactgcaacctcgacttcctgggctcaagcaatcctcccacttcagcctcccaagtagctgggactacaggcgcatgctgccatgcctggctaattaaaattttttttttgtagagacagggtcttactttgtttctcaggctggtctcaaattcctgggctcaagtgatccttctgcctcagcgtcccaaactgttgagattacagatgtgagccaccacaccaggccaagttaactactttagaggttgcaaatgtgaattagactgtgttcctgatctcaggaaatatctaatgagagaaagatgtataggacactatttatggcacaaagcaaaataggctgctaagtattatagtatcaatatcataacagtataaattcctcaaaaatgcaggcaactttcacccttaggatcaggtaaaacttactggaagagggaacgtatgattggggtcttcaagaacaagtagaatgtcagtagaagaatgtttaggaaagaatggcatggagaaagcaaaactgttgggcaagggaatggtgttttcgtgtatccacatgccctttactccaatatgtggtaaagcaaagtgggaagtgtgcctaggaagggaaactggccatcaggccttggcgaaccctaaatattattctgtcaaggagtttgaactatgtaataggcaaagggggcagctgagggtttggtttgaggcagggcataatatgatgagattgtatttgaagaagataattatggtggaaaaagtagaagtagagggagaccatttagaaggcaatttttcctactgttgtaatagtgtaagaaacagtgacagcctgaacaggagaaagagaagaagcagagaagagccagtggggcccagtttggggcagaatcaatatgactgaagaaaaataaaggaagaaaaagaaataatgataaactcaagttttctgttttgggtaattcaaaggctaacattcctttaactgagacaggagacacagaaacaagaaatatatttacaggtagtaagatgataaatttagcttgggtcatgttgagattgagatggcaagaagacttatttggggagattctgttactctgttgctaataaaatttgatgcttagccaaagagatcaagtctacaagtgtagatttggaaatcagtttagctgaggtggctgagctaatgagtgaaatcaagaagtgctaggcaaatagagaaaaaaaaagaagacaaaacttgtgatatttctacaactaacaagttgacagaaaagtggagcaaatgaagaaaaccaaaataatcaggaatcaatgaataagagaagatatctggaaaatacttctttataagtataagagattggttttcatccaagtgttttaaataatattaacttgcctgaccatcaacttttctcatctgaaatacataaaccacaaacatgattttaaaaaattagtgaacatgaaagtgctttggtaaaccatcagacactttgcaagtcttacgtcttatgattattgtctcataagaaaatggagtgttccaaggaagggaaagagtagtggcagatgctacagagtttcagaagaatatttatttctagcccaaattgtttggcttgtaatttaaggaagttaagtcaaagaatgaatctgttctctaatcacttagaacagtatttaccaaagtaatggggcatgggtccttggtagtacaggagacatttttagatttgacacagacatgaaatagaactgaatcacactgtgagaaagttagtctccttttggtttctcttttcatcactccttttgtttctcttttaatctttgttttattccataattatgatttttattaaagggataaagtctcagggcaaaaaagtctttaatatttaacactagctaatcacccttttcaataaattccttcaggttgtcaacaatatctagctataatttatattaacttcaagattaatatctacaataccttcttattttgcagttgatatcagttttccaattatggtagtgacataaagttttcttttaaaataagttttttaaataaaaagataatcactttttaaattattaagtatgtaattgtataggtggtatatagatatgacaaaactaagaaagtgatattccaatgatgaaagtttgaaaaatttagactagccctccctccttctgttgctttgagtggctgccttgggttcaaccaggctggaacaatgtgtgaaatttattttgtgatttgtgggtccggagttctacaccctagatctagaccctgtccctcctctagcatgttgggtcaattttcggagccaccagacatttctagatttttgtgtccttatctgtcaaaataagaagattagctttaaactatcactagcattccttccagcaataaattctacagttctttgagtgattagtaaataagcctgtgctttcaaattgatcaaagttagctaaaatgtttttcctccataagcatcaatatcatgtgtcaatgctagagattcttcccagactaatattcacagctaggaaaacatcaacaaatttattctctattatgattcagattctacctcatctgtgaaggattgttgtttagaaggaatctctgctttagttagggcaattaattaaaattgaaaatgaaattgtaaatgaaaatttgtttgcatttcctgagcctaatgctttatgctaaagcctcactctcagtctgtagttttattgcagtcatatctaatcaatttataaagcccgtgaattttgttcctcggtatagcaactcatacatattaagtccctatacttaaaaagaatcttcatccatctatttactaatatctttccatcttttaaaatttatttcccctgagaacaaggagagcaggtgaagtgttttctaactggctgaaagttcttatcagtattattgtgagttaatggtactctatatcccaagtacgtgttaaaattagaagcataccttctatttgaaatataacaacatggaacatcctttaccaccaaaagcatggcaaagctccaggcaataaatgaaaaatggagagagcataggtacagaaaacacacacacaaagtctttggatcagaaaaaaactgagtttgttactacctttaaaaagcttctatatgaacaatttttttctctatgattacaaaggaagtgtttgtcccgtgacttttttgaactgcatcagtgttgccttttgctctgacttgctatgacaagggtaaagttgcttatgcaacaacttaattttaagattctgttttctcacctgaaaaaaaaaaggataaaaatacagtcattgttctgaccaaattagtgtttgtatgtaaaatatccagcaatgtggtagatacctcctgggtactctacaagttttagttcccaacattgcagtaacagtgtctcaacaattaacatgctcttgatttggggaagatcatctttcactgcccttcagagcctctttcttcttattctctctacattattaaactcgatttcctgatttccatgctcacagattacaagagcaaattagaaggtgctaagaacaacaggaaaaaaaaagacaaagaagcggaataaaagagaaataatttcaaaatcttagaaacctggagccatttagtacagggataaatagttcttcatacctcaacagtcatttagggcttttttatattacaagatataatacagggtatttgtaattgctaagttaaaatggtttttatgcagatatgactttttcttgtttcaagaaggaacatttgatataaattacttgtgggctttagcaataacaactttctcaaattattttccctaggacttggtgttagaacagtttatccagtcagggacccattggccgcatccagcctctcatggtgttatctgtgattctctgggcaaaacactcaaactgggcctggtttgcacattgatataagagccctttctaagttatccccatgagaacagaacaagcatgttagtttaaactcatgtatactgtataaattatccactgtatgcagtggactcaataccacaaatattgagctaactgcatctgaaaggagtcaaagagtagacaattgcagaatcccatagaaagagaacatgtagaatccagcaccatcagaggtcaaccagtcaaataccagggctggatttttcaaagaaccagataatgccagttttatggccattaataacattttagttatgtaaacaaagataagagtaatacaaaataaattctgcttcatggtgtaatctgattgccaacagagttcagaaatgaactttctcattgtgcacgtggcattgcataatggaccagtgatcattccgcagcctccccagccttccctttccctttcccttttatggagagtccttagttctgctagatccataagctattccagggaggcagattctttgctttcccctgtaaagctctttgattgtgcctctggtagttaatacaccaaatggtcttcaggggtacttcatacgtgcactccgcagctaatcacagtgccttggcctgctgtttccctacctctgtgttttccacatgttgacaggctcagttcaaacaccaggcccatcagcttctggagagtcacggcaaagctcggctctgatttgggtgtctgcttcagagattttccaaaggatatcctgtagtagataaatcatttcattaggccaggttccctgttcaaaccaggaagcagagggcctgccatgtaggaaaacccagataatattgttatggctgtactcagagcatttgtaaatattgttgtcagtgtctttcacgcaggttccatcaagattggatttaaacatagacaggttaattatgtgttttaaagctttgtttatggagagctattaggaagactgtgaagttttaactattgcaatgacaatttttccccccaaatgtctcctccagttgatcactcctcatgccatccgtgtgcagacccctcctcggcacatccctggtgttgtggaagtcacactgtcctacaaatctaagcagttctgcaaaggaacaccaggcagattcatttacacaggtaagaaccacagcacatggtgagcacagaactgccgtggtcttgtggggtctttccccttatcttgtctgtataaaagcatgtattttattttaaaatctagttaaagcctgctttctttcttcattttaccatatgtatgaccaaacatggtgcttttattattgtattaagaattcttctaggtgtccatgttgaatggcgcgttctgttgaaataactggttggatacctaaagatgccacatgaaaaataagagaaggggaaagaggtgtagctagtcctgagtttctggatgttaagccaccttgttagggtttgttggctttatggagtaggtttgtgctttcatgaacagtacgtctttcctctagcctgttcacggcacttgtattacatacaattggtagttttcatatttaattctgggttggtgccttctttccaagtatgctgcatttttgtcctcccaaaacagccttggcacatggatccgccttgcggcaagaagctagggtttcagagtgaatgtgaattccctcccatcagacagagagaaccaggcagcatctctgtggaatgacatcaagtataaaggctgagtgcccaatgtgtacgctaagagatccctagattgtgaagtgcaaaccaaatacccagggatcttttacaattcacattctgctacagtaggtctaggtagaacctgagatcctgtttcttaagcaatcccaggtgaggctgatgctgctgctcaaagaaccacaggtggagtgcggttctgggccctctgcttagtgtcagtcatccttggatagtggtagctgtctccacgaactagtcccaggtttccttttccattcagtaaaagaccacaagaccagattaagtacagagcggaagttgctttcacacaaagagataacagagcagtgaagggataacagttaacaaattgtaattataaccatacaattaagtggacgaattttatttttctgtgacattttacttcagagcatctttcccttgtatttcaatattagaagtaaaaccaaacatacttcttagtcacccagtttctctctctctctctctctctcgaaattataaaaacaattaatgcatcctgacccttggaaatgcctcccagccctttaaacaaaatgcaggtttggtgcctgcctgacgattagttttagttaactgaaaattataggattgacccaagaggaaaattttgtttgcactccaatcacttttacaaattaaggaaaattaccacaattttgtttagctaaggtttcacactgagttcaagaaattagctcagccatcccaacaaagtcagcactttgttagtgagcacttgaaaaaataatagtctttctggagttttgtggtgtatacaaacgaagcgtagagaaagctatgatgctttatagaagtaggccaagtgtttttaattaggctcattggttcagcgtaagttttgaagaataatcaaactagcagattagctgtttcttttaaagctaggatttcttgccattcatttttcccatgagaacttccacatagcagtgtgtgtgtgtgtgtgtgtgtgtgtgtgtgtgtgtgtgtgtgtctgtgtgcatgtgtgtgtgtgtgtgtgtgtgtgtgtgttttacaagtctcattatggggctgcaggaaaaggaccaattgaaacttctgatactgtaacattccccagcatcattccaatggatgggagtttttcacaatgttcccccactgaactcggtgttctggaacatatttcaaaaccacagaggccaaatgttttctctgagaagtttggactctgtttttggccgaaaacattaggcctcgctggctgcttatttactcagctattaagaacaagaaaaggagaagaaaaagaagaaaatgcttgtgtggtgggaggtacaggaggcaatcaggcatggtttccgctttggtgacaacgtccctgcccattaatggttccattttgtggtcaggtctcatttagaagaaattatttttaatcagtcttcaacaaaatatcccctagagccacctggccataaaagttagaaaaaaaaatcaccctcattaaattacttaagttctcaagagaaaagagctagggatccatcattatttggagtttttttaaacactaaaaaaaaaaattgccatcagtttaagaaatcacatcttagaaaatctatatcacactggaattaagaaaaaagtgttggattttcaagcctagaaaagtagttaagggtaagagcaataagttggcgcatatgcacatgtatacatctgtgggaaatttaaggtatgaaaaaatgcttctggtgatctggcctcaaactgtgggcaccagacaagaagcctttttttttttttttaaatattctagaagagagttctaacctctccccatatcggaaaaataaaaatctgaagaaattggcacaatgatttcccctctggtatagttacttggctgttaacagttattgtgacatcacatcatttctgatgaaagggaatctgtgttcattggtgacctacacatggaccttttgatcattagcattaaatgcctctaccatgcgttgcttgttcatggctggggctactggcctctgtgatttactcagtttacctctgctgtcaccacttaatagtaagggtatagagatggctcataaaacctctctgttctttgtatccaaacaactgctcagatcattgcaaatgtacggccccctcctttgtccacccacagaagttcacacttcattttctttaacatccatagtatttcaagatgtgaggcttggttttctggattgggtgagctaaccctcttatttgttagtgaaatatcacttggaatttttcccttgaaaaatattattgagctgaaaagtaacaccccaaactaaggccttattgctgtttttaaagtatgcaagagagagttggcatttgtagatgtaaatgtctctaaaagtccataacattaaaaaaaaagaaaaaaggcaggaacagcatggcctaatctatactaataaaggcagaccttttggggagggaagaatctgaccaagcacagattgcctgcaagctggctccccttgtaaggatggtaagcaagcgtacatctctccctcattggttcttcagaccagagacgcacgaggaatccatagctgctaatgtgccatgcccttgtgtttgtccaatcagagtcacagactctggaaagtgaatcctgactggattagaagcagaaaagctcaatagcactttctagatcttactttattgtgtccagttattcttatgtaaatgtagggcaaggctgactttaattttcaataaatgttttctaagagaaggaaacaaaaacactatctaatcacaggattgatttcaaagccctattatcgtttctggtcagtccagtgggaattaaatccactataacctcactgccatgtaagggctctccctaatacctttattattctcacagcttgttttcttgcaggtgttacatctttaagtggcttggatcttttcgaatcgtgatctctcctgctaatccctaagtagccttggaagctaataaaagactcttaggcacctttagctgcttcctcaaagtttttgtagttggttttcctgataagaagcggccaattccaaatgcatgtgttgccttcattctagttatattttctgtaagaattttcatatattctcggggaatatatgactgaaagaatgggacaccaggacaaggtttgagcagcctaggggtaccctgagagctgtacaccacctgaccccccaaaagttggtgaaaaccctgatgaatgatcatctaacaactcagatgtctggttaggtcacttatcagatcttttctaccactaacttttccaattccaaacatttttcacccaatttcctgttcctgtggaaggactaacccacattcctgtgtattagcctgtgaactaacttcgaaatgagaattcttcgtggaaatacttcctgtttgtaccttgtgcccagaataactccacatcctttgccaatgcataacacgttgctttgcacataggaggggctattttgtctgcatatgctctgtggaacttgacatcttttactatgacttttaagttttccgttttttctccctatccctcttattttcttcttgctctcccatctctcctatctccctttcgccttcctctctcttttctttactcccctcatcctttcctccctccctcctaaggggatagtacctcgcatactgattgactgcttaggttcaagatgatggatatagattgaattctcagatctaccatttactagagaggttatccttgggacatcatatgatgcctctaaaccacagtcaccttatctttataaggaaataataataataccttgctggggttgtttttaggatcagggaaacatatgtaaagttttagaatcatggaactgtatttagcatgaggctagatactagtagtttccattaataaatggtggccattatgattcattcctttgtttctgagtccctaccaggagtaactattttccatggattgtttatcatccttgtcatctccctagaaatctaagaaatgtcttttgggatttttagtaacacaactataggcatcagtttaaagaaacaagtaacacctgtcaaccccaaataaaaggagcaaagtgtaaataaagtagcaagaaaaagaaatgcataagtgtaaatgtaataatttgcttaaaacaaatatttttgcaggaatgcatcacacagctaatattttaatcagatactcctgatttgtaaagttctctggtgttaacttttttagggaacaacacatgcttgttctcttatttccatctcagcccctcctctggaggtcctagcaacaggagtacagcctatcaccaactgtcttcaaaagtatttagattataatcagcttcaactccagcttccagagttttcaccagaaatctctgtttctcattcttggaaacctcctccacaaaataaaggctgccaccttgggcttgaacaaagtcattggttttagggaagaagtggagagtttgcacctaatggatctcctgcactttagtcttttcttacataaattctttgtcacagtacgctctgaatagccactttcatgtcattaccctgcagagaaaccttccctctttgctcactgtatgtaagacgtagcccaagtcccgagtttggctcactgtgctctggggctagggcttatgatgctccagtcaaaccagtttccttgctgtgcctccagctcactttagctactttgggcatggtgattcacctgaaggatccagttcaaactcttacctctctgaagtgttctctgaccgctgtggtatagtggacagagccctgggctgatagcaatgaggcttgcatcgtatcccagccttgctactcgctagctgtgagacaagttgcttatgtgctctggactccagtctcttcattgtgaaatgagtcagtcggactgactttggtgctccctgtaactcatcttgattgactgggagagtctctgtccttgaatctcttttgtcccaggtgctaaaaccatcccattcatcattcacttccttttgtccttagttctcttgttctgttcataggtagacaaatcataaaaagtccacaagcttcatgaagaaatagaaactcttcctcaatcttattttatacactatgttgaagggatttggctcagcattttacttgcaataggtgctatcattgacatattgcccaggatcaatgggtcttcattgatttttgtcctctggataacatggaatgtaaataagagctgttaattaagaatctgtccctttctacttgaagttttacatacatagaacatagtttctttaaatgaaaaaatgggatttggcttatattatgaatttcattttcttatctgtaaaatggagctattttaatagtaccttcatctaaggagtaaaagggttaatgtatgtaatgcaatcctgagagtacctggtccagtatgagtgctccccaaaagtaagtgagaaaagcagatagtgggtatatatatttttgaaaatccaaagaatttgtcattagagtttgatgttatgtatgtgtcagctttgattatgagtaaagacattgtttctttctaggcattagaataggaataaaaatacctgtgttctgttctgattttaccacttccttttgttacttcattcattcacctcacaaatgtttgtggattgcctgtcttattctaggcaatgttctaaaccagttctaggccaagtcctgaaacagtgttaagcaaaaccagacacaatccctgttttctttattctaaagactaagagggaaaatgggtgttcataagtttactatttcaaacctggtacgtgtccagaaagaaacagcgcttttgatcagcacataataaaagagccctgaccagtcagttagagatatttctctacaggaaaaattgcacaagctgaagtttgaaggatgacaaagagctaacccaacaaccagtgaagggtgggggtagcatggggttagggaatgagccttccagcagagggagcaaatgagaaggccctgggtgggaggaaacacggtaccttggacggctgtaagaattgcagtgaggctggaaaatcaagagggaggaggagaactgtgagacagaaggctgcgagaagtagtcagggacaagggtatgcaaaactttataagccatggggaggagttttgttgttatcttaagaacaatggacagttttgaagtgtctgaaatgacaggtggacgtgaccaggtttacattttgggaacaaactaactctggcttcaagaagcataggagaccagaatgtatcttggaaggcctcttaggaggtcattgcagtagtctgggaaagagatttggtgactttgatttgggtggtaatcagtggagatggaatggagtgagaggaatcaagaggaatttaagaggaaaaatggaaaggacttgatgggttagatgtggggatgagggagacagaggggttaaagctgctagatttttgtctccctcaacttaagggatggtagggccatcacttttctgtgcatcccaaggatcttgtgaatatcaatgaaaaaatggccatgaaaatattttgcatagcgtaatattctatacatatgttaattgttataaagacaagcctaagcaaactcagaaagaattggagaaaggaaggcaagaatgtgttttcttttttgtcagattgttttcacttagggattcagctgaaagagggctgggtaatgaatacttgactagcagctctgccttagcagtgtcctaattggaatagacccaacaagaaagaaaaattcacaggctgctcctgtccacatgtcttaaatattactccaaatgaaccatttacacacaaagaaaagaattcaaggcagagggagtgtttattctttttgcttttgtgatacaaagggtaggtcccaagcctctccttttttttttgttccacaacatatgatttttccctgatcagatgtatgctgatgtgatcagtgattctgaatctgctggcatttgtacagttaaatactgttggtgtcataatgagaacaacaacaacaacaaaagtcactgaaagtaaccattgtacttccgtgacagctataaaatgagagccatttctgcaaagaataaagctgatctgaaggaagcatattattttgcatattttacaaatatactttccaagaaatatgacctttatttcctatttggagtggagtgtaatcaggacttgagtagccagtataacaggatcattaaaagggatattttcactgacattagaggtctaaatggccacgaggccttatatacaaccttggctttttcctgtctacccagagttaataagtgataaggccgggagagagataaatcacagaaatccctgtccaaagaaaacatattgactacagccaagcaaataacagaccataaccaacggtcccattcatcattcatgtaatagggatatgaagtatttcctaccaatgaaaccgtacagtaggaagaagcagataagctggtccaatctaaggcatgagatttggttattaaggaacatgaactatttgtcacatggctttaatcttaagatgtgttgccatttctaaactataaatttctggtaagggattagaaagctattaacaataaaagtaggaactgagctgtatatgtattcttgccaatgtaatgcaacactgtaaagttttgaacctctaatctttttagtatgatataacatgatttggttttcaaagccaataaactatttggaagtattcaagttttcactttttttaaaccgaacatcatgataaattaacccttcagcttttgactgtatatcttgaaattttctcaaatattgtggaataggagtaggaagtggaactctaaatttcttttcctcttttcctaagatgtattccaaatgtttgatggaggattattcgttttacttatctgtgtttgcagtgatgtggatgccagtcctgttcattgttaaagttaacgaagagacgtgggacccgctagggcattcacttttgtttttcattctttactgcaaagttatgcatattgatttcagatcatttaggaagcaccaataaaacataattaaaataatattgaaattgcttacattcctaccggtttcttgttacataaacactcaataaatgtgagctattaatattgtttaatgatatatattttgcagtatttttcctatgcatatatctgacttattaccataataattatatcttacatcatattatttatcttttttcatttaaaaatacataaatatcagggagttatgaatttaaaacaatttttagtcattgataatcatcttatgccctagcagaaccttatactgagatatatcattatcttcatgttaaagcatagccccctggaatttggtttctcctctctttttctttctgaaaaacccacagcacagggtcaataagtcctacacctggattatttggggtcaggatctgaaatttatcagccatccccaaatgagtgggtgtgtgttgctccaaggacccagtgtcctgagagcttgggagcggctcccaaaagcatttagctatatagtgtggcactgcttctgttttcaagctaaacaacctccaaggtaaatgaattccataatcatgctcccctgcttcccgggacccaccacgtgctgtacttttcgtaagttaaaatggaactcatctaaaaccctaacgatatctgaaatgtaatcaaatccaaaattgtaacaaaaaataggtaaatgtaggcccctctctgatcctccataggccagcagcatttcttgctagagctttcagctcctcctttctctccctgctcttctggtttcccacttcagtgggcttttgacatttgttgacttttctcctgttgttctctcctattccacaccttttttttcaccctaactctatcttttctcccagtcttcttgttctctacaattactaaatgtaaagcaatccccacccccaccccctggtgccacccctgagaatctgtgtaagacaagccctattattagcctatttttaacaccaaaaaactcaggtgaagtgacttcctgggttatttagtaagtggaggagccaggacttgaaccctggtgaagggtaccagagcctgcactgagtaagcctcctggcatgctactttaccttgttaatttatggaattacctgattccctgaaatgcagttgttggtgatgggagagtggcaggtatttctaggacacgtgagttctgacaggaactggagccttaagtattttaaccaaattatataattgtgaacataatgcatacttatatggaagatttttaaaatacaaaaaagtatgaaataatgattatccattatttcatccctcagggataatcactgttaatgtttttgagtacttacttctaatatagaaaccatatagaaggaagagacagataagctctcacaatctaaggcatgagatttggttattaagggacatgaactatttatcacatggctttaatctttaagatgtgttgccatttctaaattataaatttctggtaagggattagaaagctattaacaataaaagtaggaactgagctgtatatgtattcttgccaatgtaatgcaagactgtaaagttttgaacctctaatctttttagtatgatataacatgatttgcttttcaaagccaataaactatttggaagtattcaagggtattcaaagaaggtactaaaaaatactcctatatttttatcagcaagtcacaataggtttatatagttttgcgtcctgctttgttgtttatattatacactacacatttcctctgttagttcaaattctccctgaatgcattttggtgggtgtataatagtccatctgatggctgcaccataatttgcttcatcattcctctatcattggacagccatatcttgtctttttttagaatttttaacatcagctatgccagaatatagtgtgattctgaatatttggtgttctcccttttttctagtgaagtttagggcttccagagcaagtaaaccatatacatatttatagataccaatacattatcaaatgtctacttacaatatttcacatataaattttgttacttgtacatgtctaatatcacatacataatttacaacatttacaaatacaacttctgcattttgggtttccacccttaatcaaactttttcaagtcattttttccatcagttgttttaaaaaaatcaaagccagagccatttttctcccattatagtctcttctaagttgtttgtgatacacctctttttaaatctatgcatggtgctttcactggaagatttttttctcagccataagtaaccattagcaatattttaaaaaccgatatttaaaaggcttgttttgaggaatgcttgtaatgataagaggtcaatcctccttaaaaagatactacatttatattaactttctaatcctttttgtcttgactgacttctgcacctccgtaagcattactaaaccaccattgattatgattatttcatgcccctaccgatttaaagtaacataattgagaaagcatcttgctttaaaaatactcaaatatttaatgagataactttttttggagggcaggggatctgcccatatatagttcagcatgctgatatttctttcccgttgctgggtcctcagccctgtgcaatccttggtatgagttgaattatctgtaccacaagtcagatatttttgacttgaataaagtaggctcacccttttacatggacctcatattattcaaggtactgagagtgcaggtggaaaccatcccattaatatcaggcctgagtttttctgcagtatctctcaatggtgagaggtagacagaaactggcactccctaaatcatgagcagaaacaacaacagaagagcgacttcccctcatacccactgctgttcaacctggcacatgtaattgttcatctttttcctgttaacatcaactgtggttaacttctttacatcacgggtggaaggcctgacttgctaggcatagccacctgggatcagcctcggtggttagctgcaggaagcaccaactcccagtcattatggagttaatttagatctttgtttaatgccaaaaatatattcacatttaaatatctgcacaaaatatggccttcccagtcattctacacacgttcatcatttccttttagttttaattgatttttaaaatagtcaatgaggccaggatgactctttgagcttgtagcgaggtttagatgaaggagtgtctctgaataatctgttttcagcaagcttgtaattctcataattctctacttttttaagactagaaaaatgaaacatttgcattggttagctcagaagacataggagggttatctaaaggtttagaaattttccttaataaaattactagcatcaaagcaaaaaaattgttgtgacttactggaatgttctgtatcgggggtcaaagtacaggtctgactactgacactatgtgtctcttcttcatcataatgtttgtagaaacaagtaaatgtacttaaatgcatttttatagttgacaaagcctttctcattcatcaattcctttttgttctttatgaggaaagacaggtatttttagccccattttcaggtgtaaaaatgaggtgtagaaagaagtgaagcggttcacttatggtcatttaagccatctagtgatgggtctgatatcagatctgtatcctccaactagttgattatacctttcaatatcttagatttttatacctaccaaatggacttatcccagttttattccactttttagttttctatgaacataattcactagttagactgggggcttctagaacctcaagctgcctccccagcattgacactttgagtacatgtagttcttttattgacagcgctatcaccagctgatacaatctgaattatttctttgcttccttgtgtgtagcctgtgtctctcactagattataagcttcctgaaggccgtgtccttgtctttctcaaccagtgtattcacagtgcccagcacggagtgagatgcaataaatattagtcaaatcaatgcattaaaaaatgtgtgaaggaatgactgacaaatgtgaccttaaatatatgggatgtgagtcttcaagataatctagttgtccaagttgttgatgtctttatagatggtgaaaacaaggcttacagagttttaaagacttggctaaagtctgtcagttagtggtagatatttacaccagattccttttcttccacctatcagccaagagcttgtctccacactacatatattttccttaggctcacctagttataaagaaactgtatgactatagagctctagaatcatgacagatcccagtttgaatcctggcccaaattcttgccagtttcttaaccactctgagactccatttttctcatctgcaaaataggaatgagaatatatcacaggactgctgtgagggtttgataaggtcatgcatataaaaagcttagtacagtgcatggcatacagtaagtgcctgattaatggtggatcttatcaaaagagcatccaagagaacagttgcctgtaattttgagttttagagttggaaaggtcctcagagatagcctggaccaatcctaacattttgtagaggaggcagctgaggctcagataagggaagggtctttcccaaaccaacacaggatgtatttgcttacaaaaccagagcagatcacatataaatggatttactaattactttgtgaatagattcccaagtatgcaaatatataaaaacataaaatttttgaatgtatatgaaaatcaatcaacaaacatcaccatggtcgtttgataaactctttatttctctaatttcatgaatctttcagtaaactctcaaggaaagggtgaggtggtatagacgcttaattccttggaccttccaatatgtgatatgtttacaaaaagggtgtcatggacatcattattctgatttgtttacatgcttttctgtctgttgacaaaaaagaagggggttttcttgacctctgagtaaatcaaagccccacagaaaagccaagtgccattttcactgtgggtgaagtggagttacgcaatttaaaggcatgtcctttatctcatctttttgtgggagcccactgtaagagcagggcatgtcagacaccagcacattgttggaagacctcattggaactggtggatcatattccctgggtccatttggggagggacttagtggggtccacccaaatatactgtcccctgctgcactcttgtaatttaatgcccagtggagacttttggtgaaattccctcttggccacaaaatgtctgtggaccctcctttgtgcctcagtcccctggtggtccttgaggagataagatgtaaatgcctttattcggtgatcttctgcttagtgggtttagaggcaaatcattaagggccaatgagagagaaatacttgcaagatgatggtcatcagggataagattaaaacctgtttgagaagagatctgtgctgtgttcctggcccagtgaagttactgtttgtttgatgcccgacaggaacgttgactggctaacaatgaacgagtccagaaagtgttgttaggattatactgcggttagaggtgaggagggtatcattcaatttttccatggcatatcccaattcataaaaaaattagctgggtgcagtggcttacgcttgtaatcccagcactttgggaggccgaggcaggcggatcacgaggtcaggagatcgagaccatcctggctaacatggtgaaaccccgtctctactaaaaatacaaaaaagtagctgggcgcagtggcgggcgcctgtagtcccagctacttgggaggctgaggcaggagaatggtgtgaacccaggaggtggagcttgtagtgagctgagattgtgccactgcactccagcctgggtgacagagcaagactccgtcccaaaaacaaaacagaacaaaacaaaaaatcaagattgtattatataagggatttctgttctaaaccttatttggggcttgtgttaggattcaaagaaaagattttgtttccaggccttcctaaaaaggcactcaattattggtgaaaagccaaaaagggccagttgtccattgatgctacaggtaatgagtagagtaaaaagtaaaacatatctattccccttttccaactgcagctaattaagggtagctcatttaaaaacagacctaatttaatctctaatataagtattcaattaaagttgttcccgctgctttcttctaagaaggctgctttatacatttatatatgatgcatttatggtgtgaatccttctaaggatccaggtggtaatagaaaagtgctttcaggacttcataattgcccaaattaaataatatgtatgtaaatgggggttgaggtataaattgtgcactgcaatgctataaggaattgagcccctatatcctgctatcttttagccaaccagaataaagtactccccattttattctatactacttagaatagtttattgcattattaagtacatgttacaagaagcacattgttgtttaagactcattgatttaagtagaactattcttataaagttccataggcttttacataaaaagagaagagcccgtataaaattataaaaccttaatgtaataaaacagcctataatataatattctcccattttctaaagaaatcaccaaaaatttttaatgagtttattagaaccactgtttgtgaatcctgggatgtcatgtctaattagacttaatggatttaagtatttctttaatgaaatctctagcttaactcaccaggattatattccttgtcctcctgcccttcaaatgattttactttatttttattttgggtagcattaaaaagaaatgaaagactatgattctgcctcattctcagatggatatagtgaaaaatacagtgcttattatgaagttaatgtgaattaccatgtaattaccactggctgcactgtaatgattatttagttaccactgagcattctctgccaaataacacacattatttcataggaagcatagaattaactcaagtcatcccggaactcggggagagagtatattcctgatctctttcgttgagtgtaggcgctgctaatgttaacatcgaaataatcaagcttggagcaaaccgacagcagaacaggatatgagtttacatgatttgatttgctgatgttttaaacacttagcaggagacagctatagaagccaattaaatctctccaaggtgcatagagttatctcctttgtgagaaacaatttaagggaattgcattggccctttaactgaggggagaaaaagcattaggaatgaaatttcagatgcaaagtgctgatcaatcctgcctctttttgtgtttttcagctttgtgctgtttgggctgttgctattttaaaggatttgcacttttattttgcaagcacagggttatgttaaacttttctttggctattgattatgacgtgctttaaacaaggcattgtgtctaaaagagtaaaacaaaaacaaaaacaaaaaacatgtcagtacattctgtccctttcagatactgcatcttatttagtgtaccggaattcccagtttaaagtaatcacaaaatttatggagaagcggataaaaaaggttgtaaaatatcgatttgaggaaaataataacacaactcatctataataagaagaaaaatgaagcaataattcagggggtatcgagcggcttgctgctgggagtattgatccagtcctttacggtataagatcgcacctgagattgctctgaaagaaagaacagcattccttcgctcattatttcttagatactatcgccttgttacatgggtcctgcagagttggaatagttgcggctgggagagtgggacctgcaataataataataaataaataaatagctcagaaatctatattgccttaaagccaccatgcctggtcttaataacacattggctctggttttataagttcttcattgccttatagtagctaatgacaattcctatgttgtgtggttcatttaggggccgaacagatcttcatcttatataatgggttctcatgtttggaaggaattcctgtcttggctgttgtatttcttgttaagtcactaaattgaaaacaatacacttatgccacgttgggccatggaaaatgttggcttttgctttaatggggcattgttttacattttaagacaatttttggactcagcaggactatgatggttcctgagcaaaatctttaaataaatttggcctgaaactttgaaattcaagttcataagtcatgaatttctgatttgtgataaccgtgaatttattaattcacctagaatttctaaagtcttaaaggacaaatctacttggcaatgtactatcatcacagtgaggccttaaaatggcagactgtatttcattcccgaagaattctaggttcttttcagactttaagatgatcttacaagtagtattgaggaaacatgaatattttgttgtcacattattttttttttggaggggagggtgcaataatattcaaattccaatttaattaaaacattttgaatagctattatgttccaggcattttctatgttctgtaacccagaaaggtgaggttcttgcccccaagacacctgtattccagtgaaagaaggcaggcaatacacaaggaggcagagaagataataatcagattggcaaaagtgttaagaaagaaatagggaggatgatctggtacagtgcaatgaggggagctagaggacttctttagacagccatgtgtaccttagaatttgtacagtatacaaatggatagcactgtaagccctcacagcatcacccaggtacacttatttttatttccaagcatctgtggactttccccagcgctcacgctatgctatcatttgcccagaagattcactctccctatcccatcccccagccactctgtgatcattatctagaaatatgagccgtaccagctgactatgttctcagtagatcaagcttcctgaaatttcaaaaacattgattcatgtcattgtagcagatccttgaaactgttgtttctgtaatatctgtctctccctttctgactctaaaaaaataggtccatggaacaagaggctcatgcctggtgacaataaaggcgaatagagggggaaggatggagaagcagaaagaataagacatctaactatcaagactaactcccaaaatagctttcaataaactgcaaagcacacccctccttctttatccacatagtaagattgaaagtcgtcactgagtcttaaactgtgaatattgaaattgtgagatgtatggtacatttaatggagacgttggtgaagtgcacaagtcattttaactttgtcttttaattttcaagatttattggttccaagggaagagaatatttataagcgttttaggtattcacaaaacatgtagttgccaaacagtgcaaagaatgaaaagaaatcatcattatgaagctggatgattcaggaaatgtggtgataaatatgggagtgacaacatattatctcagccttttctagctccacatttttgagtcatgattatcaagtgtatcactgcagggagtatgctaagtcagtttggagctagaggaattttagttttaaaagaataaccacgccatgtttgggaagtacaaatacagtaaatgatgtcacgtcatctcagtttgaataaatatatattgtataatttgcttctgtcttttaatttctcataatgaaaagaaagtggcaagcaacatgaaagcaattaattgcaacaatgattacttagcttcttggtgcctgaattaaaaagaatattaagattacttttctaatagctcatatgtttttttaaaaaagtcattgatgttttataaagggcaggtgcatttgaattgtcctaaaacactagtttttcccttgtgggcaaacagattgtcaaaagtcaactgttggccattctgctggttgtttcatagtgtagtctcaaattcaggaagataaatgtcatatcctagctaatctattgtaatccttctctgttgtgtgcttctttttaatttgagacaggctgattattgaaatacaaacttgtgactgtcactgtgattttcttacgtgtataagtcctctctcatcagcccagagctttgtattcagcagtacccagtagatgttaagtaaatgaatggatcaagagtcaagaccttgccctctggccatagagagattacattatcatttaaacctctattttcttacctcaataatggagaaaataaataagcatatcttcttcactagtttgttgtgacaattgaaataatacgagtaaagtacttggcacatgataaaaggtgcacatgaagaactcaaaaaatggtagctgttattaaagactttaagtggttctcaatctgtgattatctcagagtttacttccatttggtttacaagtgtatttccagtgcctcgtactatgccttgtctagaagatgctcaaaaagtgcttgctgaatgaacaaagcccccgattcttattaataaataacaaacagctactgctgctaacactcacaaagcacttactctaccacacagttttaagcactcaacatatttttagacatctaatcttaaaaacactacaagacaggtagtattattatcgctgtattacaaatgaagaaactgagtcaaagaggtgttcagcatttgctgaaggttatgcaactagaaagtggcaaaggcaggacttttacactggcagactggcttcagagtccaggctcttgtgcgtataacatgatcttcagtatttaggcacaaaggtaatggaaatgttgcactgtgccccatttattcattcaacaaatatttattaatcatcctcagtatgttagttaccggagataccacgtacataatgtgcaaagatgtgcataatccctgccctcatagaaattatagtctaacaagtctgatttcctcaagtttcagtttgttccatactttcctcagtgactcttgtaatgagagacagttaaagtctgacttgatgcagtagaagggaggctataaacatttgcaggaaggagagtgcaggggtaagcctacaagggaaacagggtggtattgtactgatcactatgggttacccagcagagagcccgccttccctttaggatgtatgcatgtagcatgccttttgaagccctggatgccactgaagcccttttctcctctcaaattttgtaagcagatgtgtggtcttgccatctgtaccaccacactgacatctgggtccaaactgagcaaagcattgttccaatttagccacaaggaggcaagctcctggctcagcctgtgaagggtgatggggtatttggaatgagcccactttctttttcttttttttttttttttcagcatgagggtgagaagtcatgttattttacagaaaggctccactaactttgtcttttatgtccagtgcctcaacttcaaggctacaggaattagtgcccacgtgtccacattttaaatctgtggtagaatgtcctaaatccataggcacacacaaaccgtggcacatgcatgaatttcacactgttctgcttgtctctccagtttgaatttgccctcttcattatttagttaattcatttgttcattctttcattcattcatctatttctttattaaatgtttactggggaattaaaaaaaaaggcagctgcaaggatagagtttgcatgttaggcaccacaagcacaatgactggcagagagttaaagtcctgtaatggttgtcagataagtggattgatgaaggaataaaaaaggaattcaaaaaccattacgtttatacttcaagaggttatttttaatcaggaatggattcaagtaaaatattctaagtaatttttgaagaatgagtaagttactcaatttaaaaaaataaagggggcaaaagaaaaaatcaaatttgtcccaacagagttcagtgattttacaaaacaaatccattgatctagactctcccagttttgtctgccttttcctgtgatcacaggtcaagatgactgattaccctgggaaacacgctatagtctatctcataaacagaaaaaaaaaaaattctcacacttggtcagaaggcagccaaaacgcttcatctccagaggctgggaaagttgatctgtggttgagatttggccagagggaaacagcctgccagaatgagagcctggaatctggggggctcaaccaagactccagtagaactcacctcaacagcccaacacattcagcaagttagcagccagggccaactacagaacttagtaaggtttgctgctgagctctttaagctgctaaagtaccattgacattttggccaagttaggaaatttaagaaagagagccttaaaaacaaaagtatctgatttcacactttctttttttcaataggaaaacttccagatgtctttatctacactatttcgttcagaatcataggtgatctttcaccaaactatgttttgaatatttgggcactagtttttgcttccacggataggtcctgacccaaactccctcaaacatagaggttctccccaaatcctatcatggcaaccattttccatgaagcccctctccctccaagggcattgtaccaaggcccttgcaggcctcagcctttgttttcttttttaaaattctgtgggagttccaagtccatcaaatatctcaaaatgccttcccaatccctgtatttctttccacttttaggccttcagctagttaatcccaataaagatttaggagcttgaaaataaaatgaacttcctaaagtagaagtctattcgtctcttgaatttcattctctgccttttattgaatgtcaactatgtgcaaagtgtggtacaaagcactaagataaaataggagacaggtgcagagcaaggatgaacaggaggcaggctgtgctggcatatgatgcaaatcaaagtgacaaaatgctctggtagaaatctgggtaaatggctagggagaagacagcctaacctgggagtccagggaactagagaagtggggaggggatatggccagggggctcagggtaggaaagattactttaaatgtgtgttttctacttttttcctaattactgagctccatcttcttaaaattgggcaatgggcagtctttatatgtgaaaaaaaaacaaaacaataaacattagtttataagaaattataagaaaaactctacaccatcatcatctatcccccttttaattttacttctcagccataatatgttctacaatagtccaggaccttatacaaatgatgtcccaaactcattgttgtcattgtcccactctgtcctcttaataccttatctccccgacctctcatgagagatttgaggttacttagggtgttttcattttctttatcatgctatggaaaagcctgagcactcaactgaattcaattttaagtaagaaaaattccttgcaattaaaattgtttgcattgaattgagtagagtttccaatattcatccattgtcatctaaatacttttgtttagagcaaaataaggtgcttattacaatgagtcaaatatttgggggtctttgtcaggtcaggatggtgtttttgatctggtcaaaatgtagtatttgctaatactttttctaactagaaaaaaatccaatctgatatcatagatttggaatcaaggctggtgagtggcataggttgaggaggctcttttggaaaagttattgacagaataaataaatgaatgaatgaagaatactccagcctggatttaagagtaaaccatatcacttgcttccttctcaagatggccttgtgtggattcttatgttattgaagctttggagcattttgctaggaaattctttccttctattgcaacatcgtggcgatcaggctgcactgtcagttgagcactggggactgagatgtttgtgaatgctgtggtcagtcaggtctgagttcaatgaaaagtcattgcctgagggttgcataacttgattgctacaggtagagaatggcctttcaccaacaccaaagatttattggcttttgggtgggaaaagtcagcttttatatttcaagagagtaaatcatctcttgttaattgtgaagcctttaaaggctatttaggatggtgaacttctgctagagcttcatgcagtaatatgtaaaatatgtagttgaccagaagtttacagttttgactaatagaagtattagtcaatgggtaatacttcaagtttgccaagtcccagcttataactggaccttcataagccagcctcatgttctaacagtcagaagcactctagactatatatatatatataatttagaaaatttagagaaaaacaggatagaatttaaggagttcaaatcatccaatagccatcacccagagttgaccactaaaaagatttttgtatatttctttcatatttttctatacataacaaatatatatgaacattttcttcgtatttgtggttatactgtatatgtgtttacacacacacagttttatatcctgtttttttcacatagcctaataagcattttcccacgcattaaaatttcttcataaacatgttaataggctgcatcatctcccacagtgtggatttactatatttatttatccattcactattgctagaaatttaagttgttttatttatactcgtataatgatacaatctttgctcttttctctaactttgatgctttaaaaaccatagtaatttgtggtaactaaatgttctatccctttatgaagatttttttttaaatgccctaaatgatttttttttgcaagtggtagatttttaaaaaaaacttttgaaataattttttcatataatgcttttattatttgcactataaaatgatgctataaaatatagagtagaaataaaatatgcccaagtgtccacatgaactcacaattagtctaggaaattatatctagccgtaaagtgagaatattaaagctcttgtatctatattaatacaatcagccatactttttaatgataagtatttaatctatcagtctcctctctcttttttatcacccagttgcaaactagattcattttggataattacctttggtactaaatgtatattatctgcccagttaggaaatagatcagagggaattcataaatcaatagtaataaagtaaacagagagaatggaatctatttcctctcttatcatttgtttgaacccatgctactaaagacagggaccctgtctaatggatgtcggacagaggaccacaagtaaaccccactgggaacagctctcctttaagaattgatctgatatttcaggaaatatcttattgtttgaatattataatggtaggtgcttaatgacaactacgatgctttgacttctgctgtttacagaattgatttcagtttctctttcaatgtttttgtatctattcctggatgcacctcctttctctccaacctctttctagccttcataaaacaatttttgacagagcattaatgttagatttaccagtgttatgctaaccacaatctcattgtccaaagggagataaaaatccagtgtcccatactgttgactacaaaagaggctctctgtagtttcaatgttgatgtcatcatgagaaaagataattcaatactcagagtgggacctgtacctctacttcagcacaaacatgggagagttagtttaccttgcccagacctctaaatattctagcaggctaatgaaactctgagaaaaggtatgtccagcctcccttgttgatatgctaaatccaacagccaagaaaatattcctgccgtgtaaaagaaactcatcactgctattattcagtgtatattcacctccctcgtgtaatacaaaagtattacctgttttccccaaatcctaaactctataggaacttattgacttatgtcacaactaatggcattgctaggaggtatactagagcccactttcacagttttctaccaagtgttgacttcactgtagcgtggttgatcctagactcaagtgacctgatttggtggtgccttccacaccaaagtttcaaggccaggaatatagtgagttaggaatctctttctgtgtttacaggattatggtcactgttggttttagaatcttggccaaggggaagactattagattctgagtttatttccaaagcaaaagcaggaaatctaaagagatggcattgcatattttgggaggtggatcttcttcatggtttccagtattttaatgacaattagaaaattgtttttgataggatccaagtagttccaaattcagaaagaacttaaatacgcttctgtctttcacaaagtccaattgtaaatgatgtctttattagcagagatacatactcttgcacccttgtcactttaagaggccacatactcgggaagaggtatgtgcttcctcaaggagcttgcttctcctggcatagaagggcagtcaatctaggccctcttccacagggaattgccatgctgtgggccacaacttgacaagattgccttggggacacacctcaaactcctgcttaggtttttctgctctggagagacaaagtgggactttcaaacaggccaaatatttcaagagagaaatctgcaattagttttcttcccccctcctttgatcattataccatccttttacatctgccaggctctatttacaagcctcctcttccctcagtaggcacatttgaagcctgcttaactggtattcagagggcagaatggcattatttgtgattcctttgccactgactcggagcagtgatgggaggacgtcaattttgcaagggcagcattatttgacgctcttactgctcagtcccagaacgctcgtttggttgtgaagatgagcacttaatatgctctcttcttttctctcctgtcccttccatattcctgctgaatctcacattcctctaagcacagccctgagaatgccagccttcagacaagccagaaagaagacactatgtgaaaatggggcattaatggtttgtgaatccgaagatagttaactgatatgtgcattcaattaagattggtttttcagttaaaagactccccaggaagagcagctttattctcatttctgggttatgagcagttaatgaagaaggcataccagaattccacccgtgttatccggagctacctctggattccataaccattttcaacttacttgatgaggggaaacttgccagttgagattaaacaagctggacgatggtcatggagaagcgtgtgtcatttcccatgttttttgtgggtgatgtcaccaccacacaccgcacagaaactggttttgtatttaagtgtgatccattctggcaactttcccttttaaaacatatgtcttaaccaagtcaagtctttatgtagcatatgtggatatacatttatatttttcaagtctaagacagatatttttactgtaggcatcttttactatttgttttctcctgtgttgtcctgaagggaaagataacaccattacttccaatgtattagctaaatgcttccacaggggcagtccatcacagagaagccagtgaacaatagtgacagcctgccctggttcagctcttactgctgtgcaacttaggcaagatccgtcacccctctatcgtcctaagggtctttctcctgtaaaatggtgatgataacagtacagacttcacagagacagcaaagagttggtgatttgtaagatagtgcttagcacagtcactggcacaaggtcattgtgcatcaattactatgaactactattcttatctcatttccattacaagaatgtaggtaaagtcacagcatgttgtttttagtcttggaggtttttgcaaaacagcctttaaaggacagcttggcaatggctttaaaacatgcggatgctttgtagacatggtccatgatactttcagggtcctgggaacatttgttgtcttccttttagttggtgtttgttttataaagtggcaggtctatttggctttgaaatggccagcagtaataggagatagatcatgtatatgaagatgtcatctgaatgacagatttgatgttgtctttttccataggtgcaattcaatcacatttcatttctttgcctaccaatccttcacccaagactagcagccacagttttctcatctgtgaaataggaatatctaccttttggggtatccaaaggaaaaaattaagtttgcaaaagtgaaatgctcagaaccgcttctcaacaaatgatcctatttattttaagtcaggcttacatggaggaatgacacagaggactggggttggttcggctccaacatttgagttttagttgtgattcagctgttgactagctgttgatcttacactggtcacttaggctttccaagcctggttgtgtttgctgaaggaagatttttgcagtaataaagttctgaagttgattgagtagatgtgcctttgcccctctctacctgaccacatcaagatcacactgttaaatctagagttagaagggagacttagaagaatgtattcgtatctaaaagttgttttggtagcttttgaaaaatgcaatccagtatatttgattttgtccttaaagggtcacaatacctattgtcccaatataatcacaaaaattttccatttgagaataggtcagcagtttatcaagccgatctctgctcctgtagatatgtcccagccctctgaaaaagccagcaacaatatctcacatattggtctcaggcaaagtgaattccgcagatggagctaaatatgtatttttatttcctctaaattcaccaggcttcaataggagcaggaagattatagagagagtatagaaggaaggtcactttttttttccttgttggttttaagcaggtccattccacccatcaatatagagagaaatgcaagattcagtttggggaacttcagtctcttaattccagttagaaggaaaaagaggtccagaggaatcttagcaagaacaagggcttctggtaacgctagatggcatttctaaaggcctttgcccacttggaaaaatagtttatgtggccactgggcctacttttggggatgcctctgaacttaatacagatccagtctctaagcttaaaattctttcatcctccccacccaaaatagccagtttgccctccagaaagcttgtactgatttctaaccaaccttctgggtataagagttctcattatctccattaaagttgctgttattaagaatttaaccaattgtcacttttattagtaaaagctaacctacttttgcttcatcttgtgctgtgacaaatgctatgctctaacagcgtcctgtcataaagtcttctaatgatgcgtgtaccttaggagaaccatttgcagctctcagacaagctaaacagaaatattaaccacgagtcttcccccaagctggaaataacccaaagcagtagtaataaaaacttaaccatgatgtcctgaaacatggactgtgctatcctatccttaaaagttcagggcataactttagctaagcctctctttcactccctacactcacccacattattccatgggaattaggaaagcctctctagcacttgggatggcacgtgaaagaaagaatcagagcctgaaggtggaggctgattggtttcttccacttaggttagtggattaccagggtgtttgcttatagatcaacagcaacagccaacattattttcactttctcctggacagtgtggtccatattccaattagaacccccaccctccctctttatcctctacatttagacaacaaattatatccacatggcaatttctttctaatgcagttaccagacccctttctttggggcctaaattcaaatgagattatgaaagcctttgggtcagtaatgtagcaactggtctagtctcttcagctcttgagaactgatgtaggcactaatgagataaattcactaaaatgcttttacatggagacttggtaaagatacacgacacaaagagtcttctgtgtacctggcttaggtgggtgggttcaaaccttttccttgctgaaggtcagaaccagtgtcaaatttacagcaaacccacttttgatgcttggtgttccctttggtttttatcgtcacagtaggtattacctgaccaagaagtaattacaccattattttttatgtggtgctttattacttgcttttcaaaattggtttccaccatctcacgagctaatagcaacaaatatgtgattgtaatgttcactctgtcaggagacccggggttattgcggaagtggccacatacccattgcccacacaataactgttactccaaaacaagtgaactgcttaactaaacatctattgattgtaagacgctggggaccaatattaagaccaccaacatccaaaggggaagattaaattctagttattatacactatattttgtcaatattttgtggcgaggagacggagcacaagtccaaatctagggtagattagaagaagtagaacttcactgggtaccttaagtcattaacttagttcaatccacttcttaaaagacaggcattaagagtgtcagcagaaaacatcaagaaccatggaaatcccctcatcttcactgctccaaatatactaacaggaattaaccaaatctaaaagtcagctcaaggtttatcatcatagttgtttccggtgaatgtgacagcttttgccttgaggcatctgaagttctacagttttctttaggactggggactgatctgggactgagtgtcctccacgctttcttgtatggctcttatgataagctaagctacaattgggcaaacaagtttgccaacctcacttactcatttaggttcatatctttttactgggagttatagagtgagactgaagaaaaccagaactttaggattaaagcatccacaagttgtctgaaactgtgtgtgccatttatgctaatgatcttagtataacatttacaacttcctaatatactaatttacaaatttgcttacatttacaacttctcctcagacctctcctggttggttgcttgactgcactagatggtgttgataacaccttatattttgagttcctcgtttcggtgatactattctctcctggtattctttctatacctttttgacgtgtatttgtcctgttttgtctctcaatctctctctaaccattccttacctgcttgtgttccccgtagtgtctgccctgggttctcttttcacatgtggtttttgctattacctatatattggtgttcctgatagaattaactccatcactgatctttttcctaagcttctggttttttttttgacagtgtctcactttgttgcccaggctgcagtgctcactgcaacctccacctcccagattcaagcgattctcctgcctcagcctcccaagtagctgggactacaagtatgcactaccacacctggctgatttttgtatttttagtagagacggagtttcaccatgttagccaggctggtcttgaactcctggcctcaagtgatccacccaccttagcctcccaaagggctgggattgcaggcatgagccaccgtgcccagtctgagcttctgttctttattctcgactgtctactaaatatttttacctagatcttctggcacctaaattccagcatgtctgaaattgaactcatgattttttttcctcctgtatatagttttctttctgctaaatggccactgtttccactcagtcagataaattagaaatgtcagccatcccccattcttcgtattgccttacatctggcatgttgctgaattcatgtagattttattctaaaatatctctctgaaatctactttttcctccatgaccaccccatcattagttggtcttttattttccatttggattattacaataatgctgcctttaagagccaaccttcattttacttctatggctctttaaaatgttgatcacatcgtgttgctcctacgatctggaaaatcttaaatgactccttgctctctacctgctcttagcaaggcaccaaggccaatactgttacttatggttaacctttaacacctcactctcaacatgttaagctgtactctgcccaaactggaacatccaaccctacttgaacacatcttttgtataactccctttgctctttctgttcctattgcctggaatgcttttcctgtccttttccgtagaaaaatcctatttatctttccatacccaactcagatatttgagctaagtatttccctgactctactacagagaattaattttttcctccttttgtgcagtgtacattaataatgctacagttttgtatatttttgggtagccaattacaggtctgtctccccactggaccatgttcttctcaagggtatggcacagtgcctagaagagtttttcaaatggaatcaatcatttccagctggggactcacagggcactggacttgcatgttgtacatctttttcttttcatcttcttaagcatggggccttgtatacagcaagcctgcaattttatttaattaattaaacagtataaaacaccccaagtctggaaatgaatcctgtcttaattaggtgtctcctatttttttctcctttgttcacagaacttacattgttttaaaatggttgtgtcctactccagatggagctcattttcagggtaatatttgagaaccagaggtggtagaattttttaaactgtaattccaagttagcataaaggagatggggaaggttgagtcccaaggacaagtgtaacacacccgctgttctagaaccccacatcttcctgctgttgtatttgccacactgttttagaattctgtttgtgtctttctgcccctctagactctggagttccttgagagtggggaatatgtaaatatgtctaattagtcctgtattcattgcacctgcccctgtttctagcacatggcctatattctattaatagtaataacaactgcctattgagtatttatgtgctaatcactgtacaaataatagcacattaaatcttcactttacagttgaggaatacttaaagaatgtaagtgacttttccaaaaggaacatatatcctgtcaattatgtagcctggctgcagtctagctgagtcttactccaggacggttgggacaaagggaagaagaatgtgttattaggaaaatggaagtcaaatgggttctggagtgttttcatggaatataaattgagacaaaggaaaggactaaaacagattgtagatagaaggatacatgaatagcaaaaacagtatcacaaaagtcctggaagccaaaattattagagatctgctctgaggagcccttggttggcctaacttgctgctctaatgaacaggttcagagtagggctctcgaggcagactgcctgggtttgaatcccagcccctactttcattagctcggtggatttaggcaaagtctgaactctccaagcctccattttcttctgtgtctaatgggaataatgatagtacctccttatagagttgttgtgaaggataggttaatccatataaagtgcctggcacacagtaagtccttaggaagtgtgagctgctgttgctgctgttgtaattattaaaagaagacaagatacacatgaatgaatgtaattcattgtggcacttagcatttaattaatattatgcttctcagtgaatccatgttttctaaacttatcaaccaaggtgtccctacaaacttaatgggatgctatgagatatttcaaacttgagggaaacagtgatacttcaagtacatcagatactgtataaactaccagtttaaggtagttcaaaactcaatattacattatactgcttttttttttttttttttaaagacagggtcttgctctgtcacccaggctggagggcagtagtgaaatcatggctcactgtggcttggaactccccagctcaagctgttctcccacttcagcctcccgagtagctggaaccacagtcatataccaccatgcttggctaattttttaatcttttgtagagacgaggtctcactatattgaccaggctggtttcaaactcttgggctgcagctatccttctgcctcagcctcccaatgtgctaggattacaggtgtgagccactgtgcccagccttacagtgcatccttttgatggtgtcatatctttgcaaagctggttttcagcatttactgtggttacaaaaaaaagtgccacgtgaaaaccaatatggaatcaaaaatgaaggtggctgtgtttagtctgattctgaggtgtgcaaagttgtgtggtgcccaccaggaacacatgtttcactagtaaattgtgattattttaaaatgaaataaaatgttatatattttttgtccatttctttatatagtttttgtcaaatatgtatgtcctactaagttgctggaacataaagtttaagctgttcgcatctaagtagttaataaacagaattgttgggcattgcttttggcttagggatgctttgaagggattgctgagatactcagggtactgtgaacagagaaagtttgaggagctctgaagtagtagacaataaatgtataagcaaaatgtgtgttaaaagtgttctagagtataatagtcagggggaggagacttcttaggatcaagatgctcagcaaaaataatcatttaggttaggtcaatactgaagaagcctgacttcatttatttttaaatcaagatgctatttaagttgaagctttggctgataaaaacttccaggcttatctgcaaggccattgtagctcgctgcatggcatacttgttgtaagttctctgtaattccattaaaatgttaccaaataatcacttaatcttctaatatcttccagttacaagtactttcctgtcttattagtggaattagtggatgatttggagtcacttttttatcaccattcttgggatttgttttttcctttccagtctgaccgtctgcagagctctgttataatttcattacaactcttctgaaacctgtccactggtttggaggaaacaactctgtgaacagtgggagtcattttctgagttgtctcataaaaccatgatattaacaatcacaagtaggacttcagcccagaactccgcgtttggttagcacaaggctcagggaaggatttcttcgccttggagcctgactcggtgctgtcccctgctgagagccataagtcactggtaggcttgttctaggagagtaataagtattgttgtttagcaattgtgttgttgaaattcagctccactatgtctgacagtatttatctaaaatactttccctggtgcgtgttcaagttccagtaaaccgtgtcttattgtgcgaccttttcattttccagtgaaaagggatcagctcgtcagataaaagctacaagccagagtacaggaaaaatgcgtgctcagaaaatccaagcatgattgaaaacaagatgtgttaaatcaatgcggtttatcgcctgcctattcccggcaattgctgttctaagctcattctgaacacacacggggtgataaaagtatagtgtcacagcacttgctggggtggggatataagaaaacatgtttatcagacaggctgggtgattttacccccttgataacagctaatgtcaaaactctttgggaagaaatctgaagaacaattatagaagtaatattactcttgttatatcagaaactatgccagtagggaagagaattatggacgtatccttaaatgttaagaaagacagaatatgttggtctccaatatttaaacgccatcatccattacaaagtggaaattattcttctcttctcatttaaaggagcaaatttggctttgaaacctaatcgtgaatgatccaaattaaaaaaacacccaaatgaaaaagattgaaaggtcaaaaaaaaaattgtgtacattcaacttctgtttgctcaagggattttattttagttttaaagttggatcaaatttgggaatctaaattaaggctcctggacggccatgctgttcagagcactttaaacacagtaacaggggcagcttttctcatcaactgtagtacacttagagagcaatacagtttctcctaattattggaggttcacctacttcccattttagacacagtatagccctccagggcaagaaaggggtctgttcatgaagagatgctccacttctgccagtaacttctcaccacacatctagaaaatgccaaccggttgtagtataaattggtttaatgtatctcagagacagcatttgtgtctctttctctctaaagtcaaatcagcatttgagagctccttgtaggcttagaccaataagaagaacctgatggacagaaaacagtttcttgagcatttgggggcaaatttaaaatactagggtggcctccccaaaaggtttgtgttagttgacatggtgagccttacataataaaaatcaggccaccaaacggcttgttcatgtgtaaaatgtcaggagcctaggcacagagattcctgttagtgctgggattttgtttcacggatatttagtaaaaacaaaaacaaaaaacagcagtttaattgatttggtatcaggacttgttaatgtgtggcaaattgaggttcatcaatattaacataaaatagtcatcttggaataataaaggactacaaaaatataaacaatgaggcttctgtgctaatttatgcaaccaactctttctgtgcctcagtttcccacctttgaattaggagtaatttttaacatttacgtcaagggcatattgtaggaaccaaggagataatttctagaaagcactttgttattactggaaaaagagtcttatatgacctcagggtatgtttaaaatggcacctctacaaggaatcattgtgactgttaacacctacaatcttcagaggtccttataacttagagaataattgagttcaagatgcaaaatcttaaaaattagttttcttttgcagatgcctttgaaagtaacctgtcaaaatgtaaattggcataaattttatgaaggatagttaggaaatatgtatactgaaagacttgaaatgtgcatattcttttatcctgagaagtgcttattataaatgcttcttaagtcagtgaaaattttgggaagaaaaccttacattccagttagtagaggatttgttacataaattatgtctatctgtataatacggtaagctacaaacatcaaaaagaaagagataggtataagcctgtatataatctatatttttataaaacagtattgtgaaaatgtttggaagcatacatactaaaatatcaatcatgcttctacatgaatggggatattatgggggttttcctcctttaaactattttttatataataattatgttaacattacttttagatttagaaaaacagtaaggtgatttcattttgaaaaacaaaagcaagtctcttaattctttgttcctcttcttgatggcttttacttctccaagaattgttaatttccaaacatatgcaagttctttgcattccaagctacagtcctgaggatcttccctcatcagtcttcctccgagtgcccctgctttgtttcatcctcctaggctctttgcttttcagttgaccttctgtcttcagccttttctttgcatgttaccctggctgcactctttgtaaaaaggacgtaaccactcaaggcacctaatacctctgattgtgcctgtggtagagaggccttgcttcctttgcttgatttttgaatctcaaagttgttgtcacacatcaagagacctgaagactacaaataagacatcagggtgatcggacgcggtggctcacggttgtaatcccagcactttgggaggccgaagcgggcggatcacgaggtcaggagatcgagaccatcctgtctaacacggtgaaaccccgtctctattaaaaatacaaaaaaattagctgggcgtggtggtgggcgcctgtagtcccagctactcggaaggctgaggcaggagaatggcatgaacccgggaggcggagtttgcagcgagccgagatcgcgccactgcactccaccctgggcgacggagcgagactccgtctcaaaaaaaaaaaaaaaaaaaaaaaaaaaaaaaaaaatcagggcatgttcaaaggcagtttggaaattttcctctggcttctctattggttaattctgcctatgttggcttcgtcttgacacccttcttgttgcagaaagttacagctttctgtggttccaggagtccttccctgaagccctcctgagcctcgctctctccgaggcaggggcaccaggctgtaaaagcatttcacgggaaagcaggagctcacttgcaaggaatttggtgttgggtttcttaggaagtgtatcactcccacggaagaggtgacctggtgtgccgtttgtgcatcaagtatctaggcaggtaatgaaatatccaaatggctggaaatgcaacaaatttcctcgtgaacaatatttctggccttgttcaggtttctggctgatttttcggtttatatattttaaactcagtcttaaagatagatttgtgaagataacttgctgttttattgtttacctctggttgttaatttagtgactgagggaaaaatggggccattatggaacaaaaaggctctgcctaacacatatgtaataactctcatgcccagaatggatctgccttggagggaaatgctctgctgttactcctttagttcaaatatggagtagtcaccagggaagcttggagacccaggtgctagttttatcattgcctctgctatgaggttttatttattacttggcatagagtctagatatttgtttggacattaaatggcaatagaatattaatattgccttcctaatatctgcatttctttttatttccagtcaaaatgacatcatgtcacacaaccattaaaaaaaggaaattaaaaccccagaaatatgtgaaagcacggcagtgagtcgctgagctataaaagcagggaattctgtaagccaatgttggaatggcacccaaagcacttttcccctggtgtttctgaacagaactctgcagcctctcatttccatcgtttccaggaataagtattcaagaagttaacggggacggaggagtggcttctttaaaaggaaactccaaaaagagaaaaatcatttttcataactgagaatgcatctggcttgactatatgattttaatttgcaaatatacccccttacagagaatttcctttatttgatgtgtttgtgaagtggatttctttaagaaagaaaaagagactataggcatgaaaaggccacatatatatttggttagaattcactcattattatgagttttcaattgaattttagaagcttgtgattagtatgagtgcataaaaactagttgtgttatctcgattttctttgcatatagcatttcatgctgcatgcacatttggacattagagattatagctttgtagaaccagagctgttctgtcttgaccaccacctgggttgaagcccataaagagaaaggctgagagatcggttggaatagaaagttgctggtttcctttaggggactctgagatgatgagatccggaaggaacctaaagccctctataagcagtcccaacataaagccagaataaaacagtttgatttttttaaccatttcattaacttttttttcaaaagtagtaatgttgatacagttcaaatggcatcctggtgcatacaacagatacatcccaccaatatccattccccagtatcacatcatagctgtgggtgaggggatccttctcaaatctcagctgagacatttgccctgcaagcttactctcctgtttgggagcatttgattttgcttttcatgcatttacaggaacgtttcagatgtacccctccataagctgtacacaactccacgaagtcctactatgtgggttcagtaaatatctttctaccagtaaatgagtttgaaggggtcagtggaagacagcttgaattcaattgctgtggcccctcaacagcctgattgttctttaaattaatgtatccccattaagtgtattgtgaccctagactttgtcagaaagaggagcagaggaggtgactataaggaggacctggctgtgagatgctgagatgctgagctgcatcccagctctgcaagtagaggatttcatctgtctttgggggttggattatgtgtacctttcggaaagtttgttttaaagggcttatgatgttgtgacactaaacagttcattcctacgaatgccaccccctcttcttgagcatatggtaagcactaaaaatgattactgaataaatggataatttaatgtcttttggaatttttaaaatgcatacattggccccattttattctcatggtataaacattgaggcttttctatttgggataatggattcttctaaacctaactggtttagggtgacaccctctcagacccttttcagagtgtgtggactgggtatttggaagcagggccacacaagctgttctcatcattccattcctcttgcagtttacagcttcatctgtttttcttttttcaatctaagatgctcatgcttctttatttgtagttaattgtgtccaattaagtttttttttcttgctctaccagattctcggaattgtcccaagtttgagggggaaaaaaattggttagtcccatttcttctggtgcctcctgagccctgcgcttgggtacaatgaggtcactttgttgaaggattaactttatattacattcttgcagagtagatgtatgtccctaaggtatgactacccccactgatgaaataaatataccattctttatgattcctccctgttaccctctctgttgattttcagagagtttatgaatagtcacatatttatacaactggccaaaagtatactacttatttttcttatggtctgtaataacctatgcaaggttattaaagggtatacagacccctcttaaagcatagtttcttatgtcattactttatacaagcaggtcaaattccatctcagcaacaatctcttgctcttaacctttttctctgattatataagtaatatatgttcattgtggaaaatttagaaaattcacagcaaaaagaacaggaagaaaagcactttaagacccgctacttagaaataactactatttggcagtttatacacagacatattttctttattctatatatgtttgtttaaaaaaagtaactatattgtacacatgctcctgtaatctactttttaaccaagcaatatatcagtaaatattttttcctatggcattgcttttgaggatggcatcatattctattccatgcgggtgccttaaattaaccatcccccacttcccagatgtttaatatattttttgtgggggcagttaaaataacagtctttgtcagatggctcccccacagtcagtaattggtttactttttttctctagtcaatgcaatcagataaatcatcaggttcctttggatttaggacagtgagctttgtctagcatctttaatgttagctttgtctgcagcactggacgattccattgtaatattcaatacctgtattgagggcaggttaacttgtttaaagctatgaacagacagcaaatcataaaggcatgggacataagttaaaagcccttgccttactatttaaatatttcctctctcatagtacacgtccatggagtaaatccttatttttctttgaataatgagtttaatatgtctaattcaattactctgtggcagccgaatgacttctcttcagctctttagctattagttccatatgatatttgaattggttcttttaattgctgatattgtcggtcattcctctgtgagctggccatatagccggagaaacatctctctccccgccatacatcagacagtcattcaattaacaaccatgaatttctagacacaataggaattcattatgctaatgattgaagtggtggggcaacaattcaaattttactggtatcttagactgaaaagtaaaaccaagaattagaattttcaggatgctgaattatgttttcagatattaaaatgatgcatttaattgtctaaagctactatttatggttaaacatttttgttggcaattagcattatgggtgggggtggatattataaataacttaaaccttggtgctcattcctgtctctctcatgcatctcttgattaaatacagtggattttacaagttgcagcttccctgcctaaagaattctatggcattttctctacaagtctaatttgaaaaaagaattcttctcaagggtttagaaagtaattcataaaatggaaggaataataaatattgtgccttaactcatatactagtatagatagaaagatttgatacacctgggtgtaattttagttaatttccacaagagacaggttgaaagtttactgtttggaaatggggggagggttaactaaatctcatatttgcaaaaatgattacattatcttaaatgaaaatgccactctattaatgacttcaataagcattgcatttgggggaaaaaaatctttctaataaaaagttacctaaagttcactctaacttaaaatatacaagtgaagaaaaagtacttactctgatttatgtgtcttttggaggtgtaattattggctttttactcacctgtgtaaaacaatgtacttttgtaaatggatttctggccactttatgcagcttttttttttccttacataaaaagtaagcactgtcaatcaaggaattttaaggtttatttcctctttagaaatgattgatagccttttagatttacaagttgacaagttaaagagttctattggtataattatgtactaaattcacagtctttcaatttaaatgtccttttaaaaccacaagattatcatacctgtattttgaaaagtgggccagtcagtttgggttggtatacaaattgcttccattagccttgggacctatttgaatttaatacagttttttaaagttagtactagtatgaatcttacttttaaaatttaggttaatggaaatgcattttaagcaaaacgtgtggcaacttgttttttaatgtatagctaaatgtcagaactacacagactgtcttttttattcagcatgtgagaaaatacatggttgagcactttgattacactaaaaaagacaagaaattttaaaaaaacacccacctaccccttacttagagaatatagggatgtggaggctatggataggagctggagctgccgtgttttccatctccgctgtttcacgtgagacagcctgaagatatttcacataccagggagaaattttgaaaatgatagaccagagtccacttaatattgtgtttaatttaaggatgctttaaagagtgtgtagtcaatgtgcacacagcaaggtccattgtctccaaatgttattccaggtttgctcttcttttggtgttttcaaggattattcttggagactcggctgctctaagctagtacttcacagatgctggtcccaaataatatcaatgttggtgaaaggatctatcatttcagatgtgagagttttgaatcagggcattttcaatacccatccctttgcagactctctcaagggtggcactggctttccatacctcaaagattcacttctactcactctcctctactctcaccagcctcttgcatgcttatttgtgctgagatattgtatcagctgaggtccgctaaggattttgcagttaagcagatacttttaattctcctgctgtttacaatgtatagataccaccaggcaagcccttgagtgcttttacctgagcaactgaattaaagtggatactaaaaacctcacatcaaataccattttactttctatttatgatcatgtaaggagtgtagaatttggccaaaggaacactgttcaagacctactcctaatgttcttttgggcgggtcactccccaccgtggtataaagcagatggtggaaagtttagccaagagatcattcacacaaccatcttgtgatccaattcaaaagtatcagttaaactttggacttcctggttatttccacaccattagtgttgcaagccatgttcagctttatttcttgaaaatgtactaattgtgtgacttctttattgcagcgctcaacgaacccaccatcgattatggtttccagaggttacagaaggtcattcctcggcaccctggtgaccctgagcgtttgccaaaggtgaggatactgcctttttgtaattcctgaaaatttggacttgagcgatttgcagaaaactctgctgctgataaaaattagttcacaggtaaacaactcatatttttgtgttttgtgtgtttggtgctgtaaggtaagcaataataaaagtagcaagcacttatgtgccaggcaacactgtgcttacttttatatctgttatgccattttatcctctcaacaatgctctgatgttggtattattaccattcctattttagaagagaaaataagcaaggagagattaaataataatttgctcaaggtcacatagcatgtaaatcgctaaaccaagatttgaacctatgcagcatggccctagagtctgggctacttaatcgctacatcttaccaattctcaaaagaaaaagcagcaccaaatttctgtctacgaggatccgtacttagtcctggcaagaggagaatagttagagctcaaaatgttttggtagatcttgagattgggcaaagacaacctctcttctcctaaggcattctacctggttgggaaaataggcacaaatatgagagaaattaaacaaaaattcaagacagagtcatatatgtcaccaatacatcattaattgccagtgcagaaagaaggaaactgacctttattgactattgcatacctgttgtgaatgtttgggatatccccatccctgtacctgaggaacttgggctttatgtgggagagaatcccaaacacaactaatcataaaaataatagcacattaaagaaaagtgcaaccaacgttctgtgaggactcagaggagagggcagttaaatgcgaaggaagttcaaagtacagaattcgttgagcttgcattcactgtttactgacggcaaaaagcttcatttattacacaagtgaaaactattaacattaaattgaattagtagtttcaaggactctttcttgccacagtaagtctagagatatgccatttctaggtttatgtatccgtgtaaaacacttgcaaaaatgaagttgccatccttcttagcttggtgaacctccttggagtatcagttcgtcatcaaatcctacccgtgtgctggctgcccttgtaggcagggccacctgtcagaactggccctgtctgggagaaatccacccctcaggccactacacagaggtgaggcgcatggagaggaggagcgctaactgctccggagaggaaggactgtgatgagcaagggcctgtgtcctgcatcttgactttgagggaaaaacaccttcagttttcagagatgatgccttcagtttcaagcttcaatttccaagaacaacctcacttccactgaagtgctgtccttccctttccttttccaccccaatttattcttggtaagcaattaaatcatctacaggttatttaatattatttagtagattaaataatctaactataataataaacagcagtctccacccatggtatagatggtctgtggagagatttaccattaggttcctctgtctagcaagaacatggtcccgtgcatttcctatgggacaactggtaattttatagcacgatgatataaatgatgtgggtctgactaatggtaggtgccttagctgtcttcgtgctagaacaaaggcaggggtacaatgccagattcttcccattgttcccagtgaggaacatttgggcactgtattcactttatatttagcacttgctttaccatttgatctctagagtccactggaggtattgaggagagtcaggttggacaaagtggaattcagacattggccacttgctagctatgcaacctaggtcaaaattgtttacctctctgtgcctcaatgtcctcatccactaaatgtggatggtgctatgttgtaccttttcgagttttattacaatgacttatttagcagccaacaaaaggtagctatgatgatttgccagttgagtgagaatgggacccttgcttctgagagctcttccacccaatctctgcagagcaggaaatcctaatcctggtgagcagttgaacatgtgatttctcctctgtgcctcagtttcttcattgataaaatggggataattaatcatgctaactcataggggatcatgtaaggataaagaggtcatctcatgggtgcccttggcatagcatctggcccatagttgccactttaaaaatacttatcgagcagtggctcatgctggtaatcccagcaatttgggaagcagaggtgggagaattgcttaaggccaggaattggatactagcctgggtaccatcacaaaaccctatctctacaaactaaaaaaaacgttagctaggcatggtggtgtgtgcacgtagtccaagctacttgggaggctgaggtggaagggctgcttaagcctaggtggtcaaggctgcagtgagacatacctaccattgcactccagcctgggtgacagagccagaagaccctgtctcaaagaaaaatagaagacaaatctggtttaatggttgaggtctacggaaaccagacagttctttttcttataagaaaggaaaggagagaaatgggaatctagggttgagttttgtgtacttacttttgaaaacacttttatggttgcatgttatgttcagaaatgttgaacaaatagcataggcacgtgtcactttgtccctgatggtaaaattcccaacccttttttcctgggtttggaaagagtaatcaaggacacaatggatttgtgtgttaaggaaacactccacggcttgcatctagccacttgatcgtgcaagggctggccggagcccaccccaggaagctctcagtgtgactcagagccgagtggctgtcctcttggctttgaatgttaaagtggagcgagagttcaagggcagggtcaggaagtggcggatggagccagcacaaggtattcctgtggacttgggagatttatactcctgctgtccattgttagggagataaaaatgggctgcgcctttcttaggatcatggtcagtgtttgtcaaacaggagtgtttcagtgagctatggaccacacaccttaaaaaacaaactcctctttattaaacccatgtgtttgtgaatagacaaagctagattcatacaaccacccacacattctgtcaaatgaaactgctccaaagaccaagcagacagctttccataataatatgcctttgtatacaggcatgtgctttttcaaaaaaacttggacgtgctttgttttattggagtccctcctgcgagagaggctgggcagcagacatctttaccatttaccaaataggaaaacgggagcaagcggaatcctgctctgtaaattattttgtccctgaaagtcaccatcagtgatagttgctgtacacacaaatttaaaatactgtgattatgctaaccccagatgttttttggtttcctttttcatatacacagggagaaaagggcaggctaaggtttttaaatcacagcattctgttctgtttcatacagtttcgcctttctctctggatcctggcaggaaggggaggaacatgtgaccaactttgaggtcaaggttgacttttcttataatttagaggtggaggggatggggaacatggtcgatcagaaattctgagatgctgatggccgcagtgatgcaatccagacacattgggcaaggagcgctctctgtgttcaaggtcagaaatgtctccgcccccttgcagtttgttagttgccttcgtgagtggtcagtgagccttagccctaaggcagtgagtgagagtgagccctgagcttagctggcgtcaggcgtgtcagctgtgaatcctaggaagcaaggaatgtttacttcatgcctactgtgagcccagcactgcattattaaggttttcgaagatcatagaggccaagagagtgggctctcaagtcagaaggatgtgcgttttggaaacatgatcccctacttggtacacatgactcaacctcccatgcttcaggtttctcctctgtaaagcagctgcctcacggcattgttgtcaggtgttaatgagataatttatgccaagaggcatccctggcatctagcaagactccagtaaatgggggccactaatccctgcactgtgggtgttccccattttacagatgagaagttagagtccccagagatctgagtgacttgctacgacatcacagctagcacgcgggaaaactaccattcattcaaactcaggccctcagggtcggtagcctcactgccgtcactatgttgagttcccacttctcctgccttgaggtgtctcctctgcagacacctgacacctggcccccatccttatgtagattctcaccagctttctctcatttccctactgagaaggcttggcctggggaccttctcagggccaatgtcttttctccaagagccagcccctcttttagagaaaataaagcagtttgggaaaagtaacaaaggctgcatttgtgtattttgctttatggagctgaaaatatctggtaaattgatccagtgggagtaataaatacacattactttatcttgttcttcatgtcctatacccctgagccttgatagaacaccaccacttaatagacttaaaaaagagtaattacactcattggttgtgtgatttttcagccctcccagccctgcctgaccttctaatttagctcaccgtgtctaactaatgcatttatattcatcttttatgaagcatgtatagtacagaattgacttcagagcctttttcaagctgtcctcctaggtccccaatctggttagtagtaaggagaatgggagctatccatctctatgttggtaggtatagataacacgtagacatggctcaaagcattttttatcctttatgaaacataaaaaaagtatttattacatttttactttaaagcttttatacattcgagcattatttacagctaaacatgcaggcaaaagatgcgagtgtttttaaaatgattactgttaatgtttctgcttgtcagaagtgcttaaattttcctgcactttgtctaaaaacttagtactgttgccttttaagaacaacacatttaaaagatcttgcaagtcagatttgcaaacactgctgacagtttgtgatgaatgatattgcaaaatttgcaagatgtttgtcatttcacacagccgacatattaaggaacggattaagaaacgtgaaacccctatggaaaacaaccatcccaaacaaacctccgccaaaccttgaacccagagagcacaccggaatctctcacccgggttttctctcccaacttcccactcagccagtggaacccaattgttctcagtgcattttctctcaccatatggtctcctcattaccatacactaagagtccatatgggaaacttgtgaaatgaactgcattcattttaactgccagatgagcagccttttgctttgcaagcttagcttaagtcatctgctgtcttcatgttgttatggcaacacagcaccaataaaaaattctaatctactgtaagtgatcacagtattttaagtgcttgcctataactgccctcaaaggggaagagagaggagggttctatttgtccaaggagcaaaaagttgttgttcattccagcaggtgtcagtaaagaagtcagtgacatggggattgaagtaccagtgtggctggctgtgcagtaggttggaattataagggaggtgaacaccagtggggtggatggtgggaaggaggggttgtggacccttttggtgggtctccaaaagcacattgaatgtcaagcaccatagtatctctggcagacatgctactctggtggtgctgtgtggccagcctgccgtgaaggaactcaaggcttccttggaaatacagaggtagcaaatcctcacggtagcttctccttcactggcattcgaaaatctcagtctctatgaagtggctctccctgtacatgtgaattagtcatttcaaacaccaggctaattaagagtaccttaaagtaatggaagtaggcagcaacatccttaaatataaatcattttcacctctgctggccacatgatatgttgcatctctgtcgctctatctatattgaaagtgaatgtttatagtctcagttcatcagttcacattagcctcatgctgaatatttaaacacagaacaatttgaacacaccatgaaggaagacagtgactgcactttcatttggaacagcaagggctcatctaataataatttagtaaatcagccatttagtggctcagttgtgcactgcattgtgccaaatattattcacttcaactgtacacttgcaaaattgaaattcagactccagtcacaggcactgtttttgctcagtggagagacgagacctaaaatcaccctccctaaagagcattcatgtttagtgatttatcataaatacagagctggggcaaaataaaactggagttggctgtatacaatgtattctaattatgcttttattgttttagtctttatgcaaagactatcagtaattcaaaacctgcagttgcatcagtgaaaatacaaataagatatctttgcataaccacgttgcctcctagcagaaagggagatgactaagggtttcagcaaaggatgaagaacgacttaacatcttcatcttccacactgacactagcctctctctcactctcactatctctctttctctttctcgtgtatttacttttttaatttgaggaaactcgattaacattatatcctgaaatgaaagtgaccctcctcagacgaaaacacagaaacaaatggcaaatcttatggtatattcagctcttagaaaaaacatgcctgagtttgattccaggaaacatctctgcattctcttgtcaaaaacacaagctatggaatgctgtccatttcccccactctctcctgtatctaccagaaaacttacaggcagattccatttccccatttgataatatgctcagtctaggggcttggtatccactactacttatatttctttttatccagggagtttagcctggatctgtgtacccctgaaattgcatttagaattcctgtgtgtgtgtgcgtgcatgtgtgcgttatgaacatgcacacacaaatgcctgcacatgtaatttatctggggaaagaagttgtagcctcagtaaaaaggccgatgacccccatgaaagttgtaattctcacctctttaagttatttatctttagctgacttattttgcggcaaatgcttctgcttgtcattattgtttccttcccaatttagagatgaggaaactgagatttatacaggacaagtaaccttctcaagcttatgcagctagtaagtggaggtttcctaacttcccatacttcctaaccagtagtccatttagagtcttttatagagttttgaaaataggattatatctcaaacatagcactcaaggcacgcaatacacattgactgtaagaatgcatatattttgccagagttccttggaaaataaatggggattattaataatattgctggttattgcctgataagcactaactaaatataatctactaaaccaggtgttggtattaactctgttttacagatgaggacacagaggcatgtgtttacgctgctaatacatcgcagaacatggatttgagccaagtctattggactccagatccagagcctatatcccctaagcagtgcctcccagaattaagagattttaagaaaaaaagccaatttacaaaatcagtcttaaaacccttccagcctggttagggaaggaggcaagtggtggcctagacctgaggttagctcacaaagggctgagctaggtggaagcggcaggaagaattcacatgtaaatgcagacaaaccctgggtaccatgctttccctctttagctgcagagtcattgtgggagggacttgcagtaaccgttatccaatagctcagtgctggaactctttcgagttcctttttagcactgagttcttgatggggaggactaagggtaacttacttcatatcataccctgcatacaggggcattgaacataattactcattagttcaagggtaggtgacaggagaaccaagaggcaaactcatttctacctccagccacccaacatcctccccttaaagactgaagcccttaggaatggagatgcttggaggtcttaagccttgctcactattttcagccctgagtaacacttcagtggagcattagagtaataagtaccaagccccaacagtcttgaagcagtggattttaattgcagttatactcaggaccatctgtaaaggcttgagaattatcatttacagatatcgtttgtctggagatacatatgataaccgatgatgttcatgctcaacagttgaagaagcaaaagcaaattatatttttgcctcccttatgtatctatatagtatgggaacgtgtcactcaagtttccctatagtatacgtccaaaaatataaatatgcacgtgcatttgtatacacacacaccaaacatacaaacacatccacgtatgtgtacatgacaaatacatctctttgtttactgagcagtccctctacttttaagctcggtatttattcagccttggctgagggaaagaagccacagccaaaagacaaagagaaacagaagtagttaatttttggctttttgtgttttctaaaagcccaggccttggcgacttaaaggtgacttaaaagattttcaagggtaattttgactctaggccgtttttgtttcatgtgctgactttacaacctacccctgaaaaaggcatctctgtccagagctttctctttaagcagagacttttatcctgatcagaaagtcgatttccaaggcactcagcaggacctaacccacagcgttggtcttaaaccagtacaatgaattggaataagaagatcccgccagaggttaccaagttcagctctgtacctccaagcaggtcatagtcaacaagggtgcagacaccatttttcactgtatctgtggcgggaagcaccccaggctcccattcaccaattaccatgacaccatttagaagaaaatgccaggagaccaaataaaaaaaaaaaagggaggggaaagccattgtcataactcttctcagaaatacctggtttcacaatttatacttaactgctgacacttgaaaagtcgaacattttggtaaaatgaatcaagctgtaatgtttcttttatgagatccccttgcaggaaagggaagcttggcacctcatggagcccaagcttagttatccatcatagtaaagtcagctgtcctagccagcttctcagaggtcacacgatcgaaccaacagctcttacaactatattattgcttacgggacagtaattgaggcaccagataaaaattacctggtctaataggcagcgaacaattttcactcaataaaattatgagccaaatcatttatttcataacactctggctaatttatttgttgaccttttaatatccatagctcctcagtggtattaactgcaactcagacaaaatctcttgttcatttcactttcattgattttttttttccattgtggcaataacagttgcttgaaaacagcctttctttccattgtaaaagtcaatcacgtaagttagtatgtcttacgttgatatagccgcgttagcttacaacctagtttaatttcatatgattcagagtctcctataccatgtttttaacaaaggcaaggctttctggtttacctccaaccatgccgcatgctggttcataataatatgtttgagaagtaagagggctgtcatctaatctgaacataaaatcaactttaaaatcagaggaggttcagaagaggtcctcctgctgcattttctctagactagaatgtttttggtgccttggcctttggtattaatagcagtagactctttcaaaatatttaattcctttgttctggaaatgtctagagatttttactgtggtttgaatttcagtttttaaaaagactctgggcaaaaagtatgcgctagctagaatgttctgtagggcaatctaagcttcagctgaatcttcttatatactaaaatactatgaagtctttagaatgtggggttgtaaaatataattgttatacatttggcattttatgcctccctgcaaataactacttgctacctatacctcatttatgttcctcctttccatttcaatttactctaaagtggtccttagctataatgagaatgcccctttcaacagaaacatgtttaattatatccatgctaaatgtaagtgactcttctcagtcatagggcttctaaggaaagagtgtttaaagtgtgacactaaaggcttctaatgatctgcactaagctctatttcaagaagtttatattacaagaaaaatgaaaaatttgaggaatgtctcagaggatgggaaactaaacggtgcccaagtgttattttggtttgttttactctttccctcactgccctcattatactgattttttagaatgcaaagtctaccattgtggaattttccatttggctgaataaacacaaaggaagctgggatataaaactaccctccaaagaaatacatctcaggacaactagtatttattgcattgtacatccagctctgcaggaaatgggctgcaagaaacttccaatcaatttctcagcattcggcctttccaatcagtaatgtcacccaggctttcagaagtcagtggggaaagatccaggacttaaagtctaggagctgaatgcacacatcaaaatctgggtcctgcagtaaaccctatacgaaggaaggcagtgaaatcaatgctgatttcattgataggtgcttatcatctctacatcaagagtgattttctcatttcacttcattgtgtgttgctgatatttggccactatattttgaatcccctgataaagcaaagtagattggtgataaatgggtatcagggaaatgtgcagtgacagggaagtattgtgcttctttctcagaaatcacccaactcaacttgactttgattatggatgcttgtagttttttttttctgtttcaatctacattcctgaaaacatttcctatttgggtaagcataaagccaagcacagattatcctctgaaattactgaagcatccctgggctttaattttatgggcggagttcccagagtctcaaaatctaatgctgaaacatgaaaattaatgttgtgttcgtgtatgggtatctatcagctttatgatcatcagcctatatgtgctatgaacaaaagaaagttcagactatcttccctgctcatctggggttgagttgcccaaaacattgaactgggtttataaatgggcccagtattggccagttagacaacctttcccttcactctaggaggctagatgtggccagtgaacttgagcttattagctatagatttcaggtcaaaggctaaagagaaggactcccacagatggtgaataatcctaagatttttaactcataaaatagaagatgagttaactatgtctgcatatttgtcatgatatgcctggttcccaatgtgtctttctatgaatgtgcaaatacctaactatttccaagggcctaagagtacagctaataaaaggctgaggaccataaggaccaacctcatgttgctagcagcctataacttgagataatgtctgtactagacatgattcattgtattaatcacaaaattaaaatgtaagtccaagccagcaggaatgaaagagcaaattcataaaaaagtgacataaaaaaactcacagtgatcaaaacttgacctttgggaatttatatattggatttaagagtctgtagctaaatggaacaccaaatttaagtcttctacttttataaaccatgccaaatatgactttgtcatttcatcatacaaattaagtgtgtacttttaaaaatcagtaactgtatcttagaataacacatcaacatgaatttctcaagacttgtggtttgctaaacattatggtaggagcttagataaggagattaagaacctatcactggcctcaaaaagtctgcagtctagctatggagaatgatgactaacacacttcagatcagagcagaatgacctctcagtatatacttctgtgctgtgctgggtgacacagatggtcagcactctttttcagaggaaatagagatattaggagctggggtatcagtgaaggtggaattatttctgatagaacagtgtgattttcaagagccaggctctgatgtctaacaggcctggggttgaatccatgctcagccactagtcagcggtggaaactttgggaaagttagctgacctctctgagtgtcagtttcctcatctgccagatagtaatagaaagaataccttaagaggctttctatgaaggttgaatgagttcttgctccactttcaataaatgagagtgatctccttcattaccataccatcacgatccccttcagtacgaggcttcagaggatggagagaggcattgtccatgggcacagattgaagccagcattccctccaaaaaaaggggaaggcaaaaggagtgaaggtatggagatagaaaggagccaaatgttttacttctaggctggggaggacaagcatagagagcagttcttcaaatacatagggagagatgactggacaaagatggtaggaccaagtgatggcgacaatcttttgtgactctcatcaaactttgtaggtcgatgctgggaagataatgtgccctgaaagttgctggagaataagatccacatatgatgacagacaagggcaacaagaagctcaaacaatatttgctaattgggttgcaaagtagaaagtaaagctgaatcttccctttatatttgtagcccattcagcatttttattataaagcttccaaaatataagtaaaacccatgccagctacatttgaactgtttcttggaaccccattcctccttcggtctccctaacatttctgtagactctaaatagagtaagaataatgcatccacatttttctccatagaaccccactcacataaccatcaacctatggtcatagcaagacaggtgaagccacgttttgatagtgagatgaaatcaatcagtgaaaagtagttgttgtttttaaggagtaaagcttttttgtatctttaagagagaagaaatccaaggccatgagcagaaaaattgtctgactcagaatgtagattggagaacaaacattacctctacaaggagactctggggcttttcaatatttaggatactagtatttgtctttaattcccaaaagggatttttaaaaaaaaaaaatccaaggataggattaattatcttggaattgtctaatatccactcttatgtttgaaattgcaagcagggagacgttttaaacattatgaaaagaagagaaaatctcccctgacaaataaatgccttgaaacattagatattagtactagtcaagtgctctttcttttcagaaatattaaaattgcatattaaaatgaaagatccttagactgtgctcctgcctaatgccacaaaaaataagaatttaagaacaattttagagacaaaagattatatgaaacatccagctcttccccttatgggaaatttctttttttaacatccaaggctcaatcatttcctaatgtgaaattacagatttttcaaattaccatataaaactgcaaaaaaattacacttgtgaccacagaagagatggcatacactatcaatttgattttaaaaggcatacatcttttatactacctgtcatttttataatgccttttacaaatttaatcaatacattttaacattctatatactttaagtgcaatatacaataaatattcaagtttcatcttaaacatgctttagcctttaaattgttaaaactgcagtgccctttcaatctacttacataatgtcataaaatatacatttcaaggtaaatgaagtcagctacttcaatttagtccctcaaactggtagtaaatgagaggttaacactatggtgccaaacccattattgagtaaatttagcaccttggacagctctgtaaaatctttattgctttcctgacctgctcgtcatgttctgtctgtgtgttcagtggctctcagctctgattgaaaggcaatatattagatccccaacacaaacacgcctgggggctagttcactgggagcgtaatgacatggaggtgagagcaattttctggtcaccgaaatccaagcagtttgcaggtccattgcactaactcatggaggacccagaaatttcctttctccttcccatttgcagaaatacctaatagaagccaaatcacatgggcaaagctcaaccaagtctttcttaagtccttacaagttgatactacagtgaaggatattttttaatgggtaagatattatttaagggtgtccctttcaagacaagaaatccaggttcacactcctcaaatccaagactgctggcctgaagtgatgctgtactgatgacctacctatggcaatgtactcaatgggaaaacatgccccagcatggtggatcaaagaaggcagcatcatggatcaaagaaggatgctcctttaggaaacaagatccacgtgttttattctcaaaggattaaatggggatgagagctctggatatcgacataaggagaaaaaaaaaagtagattttgtcattgaaaaactctatcaccaaggatatataatatatactgatagatggtatgttttcaggcttatgaaaacttcaaagatcttggagtttaattttgaacttccctcctccctgcttctgtgaaattaattaaaataaggtacactgctctaagtcctcaattatagtgttacaagagtgaagttcacaagtgcagtttctttctgtgcctcatcacgcttttgacaaacgggagacttgcctttttcccccctaaaatggaaagaaaggaaaatacgttccctgccaagccccaacactggcataaatatttatttggagaaataaatgaacataggcctagagaagtctaatcttagtaaataaactcacttgatcctgttttttgttttcatctttcctaagagccagataaagccaagaggttttagtgaaggcaacacaggctgaatttgatctggggatagggtttagtgtgcccgtacaatagtaaattattaactgctgtggtcagacactactacagcaaacaaaaagtggtaaattagcttgtagcttacattaaaaaataaagaaatgatttcagatgtattggttcaaatccctttgattatataatgttctttactccctacatgaaaaataactaaactgttttataaagggggtctatcagcttaaggcaagcataaatgtttattgagaactgaaaaccccactatcttatttttgaatttaggacattagatatgtcataagtagttactgtagtatgacaactactttatcttatattatagagaatttaaaattgaaaaatgctaatatgtatctaaaagcttgtcatttcaagagttgttcaaggatttttgaagaggctatgatgacagcaaaatgaatgcgattatctccctattttctgatcagcgactgcagtctgtgaaaattgaacagcactgcttctccatgtagaaatctattgtgtaaaatatttaaagttacacttctgtttgaaactttacccacagtcaaaaatggtaaacatatcttcatgcaaatcacctctgatgatcctaccacacccttacgtttggttctctgacaagcccctaccttttacatgcatcaagcttaactttgcttttcttttcacattctagtggaaatgaatctgaagaaaattagggaaaaatgaagagagagatttcttttagttagaaccaaaaatattagcaccacactcactttgtagagtactccctattattagaaccaagcatgcaggctaaatatggaggtccacctaagtaaaaagagggagatatttttccttcaactggaatgagtagccaagcatctatctaggatgagaatgaatgagcaaatgggggaaatcacacaatactgaaatagcaaataattgctattaaagaaatagatactgccagtaatgaaaattggtgcagagggggcctctgaggacagtagagtcctttcataagagtttttgacaaacagtgcattgcctcagtatgtgggtttcctacatcaccctcttatattatgtctctaccatccaagagagataaacaaaagaagtttaatactacatgcttctagtagctgaagattgattggaaatccctcgaaaatgacctgtctgataaggtcatggttactggaataagcaattaagtgcaaaataaacacatcttagggattcataccacgactgaatgacatcaattgtagtaatctagtaaatgacctaggaattgtattcagcaataaacatatgagtgctttatcatgcctatggcagactattgagtgatgtattttatctcgcagtaccaatgatgctcaccttttgactcaattaagtgtgtatgtgaacagggataaattggtgatttaacacccttctggggttccccaagctacggcctttatagcagtgccttggcaaagtatggccagagggactggaatgtgatcatgtcaaaagataacgacaacctgccttcactcaaaggattgtatctgcttttctcttgacaggaagtaatactcaaaagggctgcggatctggtagaagcactgtatgggatgccacacaacaaccaggtgagcgctgtgggtgtctagcctgtgtggactgccacatgcaattaaagatctcagattcctcatcgtaatgagaaagcacaaacaatataaaagccatgtgcatgagttaagagtataagtaattcagatataacatgttgcaagatgattcaatcctcttttgtaaaccttttattgccctttccactgaatcattttctgtatgagaaaaggtactccatttaaaactaatctttagtgggaacatacttcctaattgaagaggagagttactggtgctttattttatttctctcaggttttcaagcaaatttaggaagagaaagagggtttaattttttctccaaaaagtatagcaaggcctgaatagtattgtctgcttctgtttcatagaactccatgtataagattcacatagcttaggaaactgagtctgacaaaccattcactcctttttcatgtagcctgagtcaatgtctgggggacacagtcccattaatactcagtaatgcaggtagtcatctacagccttcccttaacatcaataggggaggtgaattgcagcctctcttcctctccccctgggtaacctcagacttcctacatgttattgggaaggatggaaaaccccatggtgctgtcctgtatggactgtagggtagtatgaaggtatagttaagataatggactttcaaagtcagacaaatgggcttatgaatctcagctctgttcttaaataggtgagtgtacttcggtgaggtttttgactttctgagcctcagtttccccatttcggatacaggcatgatgatggtgagactaatataacaggtttgtcatgagggtcacagaagttaatgcagctgaccattgaaaaccctgagcacggtacctggcaccgaaaaaatggtattattgggaatatgactgggggcagctgaaggggatattcctttgacttttcaggaaatcattctgaagagagcggccgacattgccgaggccctgtacagtgttccccgcaaccacaaccaactcccggcccttgctaacacctcggtccacgcagggatgatgggcgtgaattcgttcagtggacaactggccgtgaatgtctccgaggcatcacaagccaccaatcagggtcagaagcttgcttttctcttccctccccaaccttaagcaccccatctcctcatttattggtcatgaacaatttttacattaaaaaattattttcatcccaaaagggagattcttagtttatgtgtataagatattattgtacaatattggtcctagctatcattcgggtaatctaatatagagggctagaaaggatgcatgcatttagccatctctctacatttgacttttcaccataaaccatgaatgacagatcacagagagggatggaattaaagttttgagggcccaaagcacatcattcttgcccagggaataggaacctgttaactccagggtacatctcttagatcgggatttatttctgctctaaaatgataatttataggcccagcattgccatttctcacggccctgctaagtatttatgatctcctaagaaatgtgtcttttgctcgcttcccattttaatcacagagctagcaccaccaacccacgcacatgaatcacccaatcccttccctctgggttgcggcgacggggccagaaacagagaccttcctttccccgagtcttccaggattgccaccatctgaatgccaccctcacctccggttttgcccccgcccctcaggtttcacccgcaactcaagcagcgtatcaccacacgggtacgtgccgagcaccactccccagcagaccaactataactccgtcaccacgagcatgaacggatacggctctgccgcaatgtccaatttgggcggctcccccaccttcctcaacggctcagctgccaactccccctatgccagtaagtagagatgcatatcctgcgttcctgcacgtttcgctagaagaacttggcatcatgccatgtggcccagtgggcagggcttctcggtctgaggccccccatctttccctcctgtaaggcactcccctgggtgatggtgctaaaggcaccatcgtctccagcaggaatctccgctctccagtgctcaccttccttcctacaaagtctccctaacagtcagaatgttgctaccatccaaagcagctgtatgaagtcgcttcaggaacccatgctctgagttagatgaagacgggttgactcctgcttctcccagttactaactcccacttctaccagttaccaccagctactcaggaaactgaggcaggaggtttgcttgagcccaggagttcaaggttacagtgagccatgattgtgccactgcactccagtgcctgggtgacagagcaagactccgtctcaaagaaaaaaaaaaagcaaacaaaaaaacccccataaacaatgaggacaccatatttgtcatctacttaatcccaaaacatctattagtttcgtcttgtttcacctgattattttagctacataaaaggaatcaagttcatttcctctccaagcctcaattttctcatctgtaaaattgggaaggaactagcacccaccccatccagtgttgtgagacatagagaagatagcgcatacagtgagcttgtcctgatgccggacacatggatagaggcacatttagtaaatctaataatcatagtgatgcaaagataataacgtggtggtggtggtataacatagtaacaatagtctaaaacctaacttctctcccttcataattattcataaagcactcatgttgaaaaattccaatggaataaaaaaaaataagacattcctctggtgaacacacatatgactcctttattttttaatgcttggatttttcccctttgtttgtgtttggtgtatatttaaaacaacaacaaatcaaaacacttttccagaaatctggcaagattaaaaaaaaggaaaagaaaaccatatacacataaaaaaacgttctttggtgccttgtctctgccttaaagaagtttgcctacaaaaacattttggtacatttatattgcttctaaagaacctcagagaactggcctccttatctataaaatgtcataacccgtgttctcacaatctcttgatctcgctctgactttgaagttcatcttggacattgcgagtgactcttctgatgtgtaaaatgtggccaaactcttagatatttgtggaaggatagataggtgtaccattaaattaaagaatattcatgatttcttaaggagtcttggctaaaaatacagcaaatgatgccctgtctcatagtgaaagtatggattgttctagttctttgaaagaggaaagatcattcttgccctgtaagagaagttatttctgaaaatgtacttacagacttttactttctgggtgaatttttctgctcaaggtccacaaaattacacatttcatcttagtttggaatcagcagtttgttgaacatttacaactccccaaataatctgcatatattatgtctgtctactcacaagtcaatgtttaggatcagtttcacattagattttgatttatcaaaagattgtttctcatagagatctataatttcagtgttctcccatttattcagtcagaaaatgtttcgatcatgacctgaaaattaaaagatggcattcttaattaaatcaataaactaattgctatatggtagcaattcaatttaggggcttggaatgctctcctccccaagcctgtgcagacactcagccgcttcagcctgagattgcatctgtcagactgtgaaactttgaacatttaatttccattaattgattttctcagtgctcacaaacatagtattaaattctcaaatatgctctcagatgggacggctttatctgcacaaatgcaaataaaacaataaacacaaagcccagttgatttgaatttttgcctccataatatttaattattcataaagcactcatgttgaaaaattccaatggaataaaaaaataagacattccactggtgaacacactttctggtgtggtggctgataactaataatgttataacaaatggagctgcttgactatattttacctctacctctgttaactggccccccaccccaaaactccccacctctaaatacacataatgatcacatttgccaatgagattaattgccttcctcagtgaaccagcaggatttcaagtctacgaatatttaaaaatcaaacctccagtgcaggagttttgcaatttaaatgggtgttattattgagcgtattttcacagttacaaatcctaagagatgtataaaaatgctggcctcattaaaagaaaaagtacagtttagaaaatgtttgtgaaaactctgaggatggtggctctgcattctgccccataaagcactcagtgcgtgtggattgggtagtgccttggactgattagaaggggtcattttcccctgatggcaattgttgcctatgaccaattggattcccactttgcaaaggataaggccacccaaacagctcctttgactctggtgggctcatgggaacgaggcttttccccctggagatctgtttcctttgcagggtagcttagcagaaagagctccaaatttgggcgtgattccttgcttcagcgcattctagctatggcccttgggctagctgctacactactttctgagtcccagcttgcttcacttcctcggttgtaaaaaaaaaaaaatatatgtgataggccccgacttaaggttgcattgcccatgacaagatgaaaaagacgtgaagattcttgtgaatgataaaacaatatctgatgttttattaagttgtgtgaaaaaataataacatagaagaaatatctaggatacatactttcctgcaggaaatggaggaaatagaaagcgagtgtatgaaaatattagtcttgacttagcgtatgtgaaatctctgtctcctaaagtaaccgagagattattaacctggaacaaaagatgagaggccaggccaagaggatcatggtcggtagagaatgtacgtctaccgagctctttcatatccccaagctgctaggttttctctgagttgccagagttttcccatcattggttatctgcatccctactactaccaaactgtgagtatttatgtaaggctctgatcctactgcttattaattcccaaacattcatgtatatcccatggcggttataaagaatttggaacttgtagagttctgcatttttcacaaatgctgcatgtggcagtctggtggccatcctctcaagctggcttcttcctgttccccctaccccagcctctttcctagaactttagtttaggctctacctgggatgcatcccctgatacctcttctatgaagtcttctctgatttcccttccctgcctccactgagatggctatgttcacctttctcactgttttgtgctactctatccctcataagagggtgttgcacttttgtttcctggcctggaatactctgaggatggtggctctgtgttctgccccataaaggcactcggtgcatttggattggttagtgccttgggctgatgaccaggggtcattttcccttaatgacaattgctgctgatgaccctagtgcctagcacactgcctggcacacagtggccccacaataaacacataaaagatctccagtaatgaaaggtagcacgtgctaagttctgtatagtgaaagtggatgagagcctgcgaattcagggaaggtttgtgctggaagcatcgtctgagcagggcagagcaaggtggctgggtgagggatggatctgagcttctttgcttcaggatgccatgaaaggcactgatttctcctttctcattgcccctctcagtagtgccatccagccccaccatggcctcctccacaagcctcccctccaactgcagcagctcctcgggcatcttctccttctcaccagccaacatggtctcagccgtgaaacagaagagtgctttcgcaccagtcgtcagaccccagacctccccacctcccacctgcaccagcaccaacgggaacagcctgcaaggtaagccccaggccccacctgccaatccagattcaatgccctgacttcaccctcccagggcctgaagcagatgcatcaccattgctgagggtatcagccttgggccctgcctgattctctctgccctcatctcttctgttcctttgtatttgctctcctcaaccctggcccttggcccttggccatactcatctctcctctgctggaggtgctcaagaagtcctctttccaacttcagcaattctgctcaggcccgggatttgcttgggaatactgtttctactgactaacagcatcatttctcttttctcctctttcactccttgtggtcgccattatcagatcagtcttttgtggactctagcaagttctccagtgcagggtctctcccgggactggccttctcctgaagtaggtcactcaaccttcccttcctgttgcctgtgtcagagtgaacgtgtgtgggactgataacagggagggggtgagccataacttgatcagagccctgaagttagatcatcatagaccaaaggccaaagacttcctactgggattaagaaaccccagaacaccactagagtattctgattcatattaaaattgttcaatcgctttcccaccattgcatttggaaaataaaatagttgctaagagttgagatgaccttttcattaagaataaaaggttacccaccttttaaaactgagcacaccatttcttacatttttcttatgagcttagcactctgttgtgtgtcatatgttgagacctgcacaacctcattcattgcccccagcaggattgtgtggtaggtactcatatctgctatttgacagatgagaaaactaaaggttagagaggttatgaaattgcctgacttttaacagctgatacatggcagaagctggcttcaaattcagactgaaacattcatctcctaaatactttattattcagaggtgctaaaagagacatagccagggttcctaaggcagctggtagggagataagattagtaaactagtcaaccaccatttattgagcactgaacagtgtacctggggctgtcctatgcatggagcagattttataccatttaatcctcacatcttcctaaagtatgagggccattatggtcttcattgtgcaaatgataaaatggaagcttaaagagggtaaatacctgaccacagacatagtcggttaaacggtggagatgaatgtaagccccatcagagtctgtgcccttaagcccagccatacaaagtttcccacagtgtcttcccttggtggctggcatctcactgatggaggtcagcctggaagtcagggaggggtgaggaaggcagtgcacatgtctgggatatctcagccctgtttcttatgtacaagtacatgcatatttctacttgtctacacatactgtgtgctggatgctttacactgtgatgagcatatagtgattctcctgaagaccgtatgatgtcagcactagtcccattatacagatgggaaacttgaggcttaatttgatccaggtcacatggctaataaatagtacagctaaactggaacacaagccatgtgaccccagagcctgagcacccgatcacgttgtctttctgcctccaggaggactcttcaaaatactcctcagaaccttgcttgcaaatctgcccagcacagcccagactcagcgccccacagagcacgccgctcttccccactctaacatacagtggcaaatccatcttcttagaggaaagaggaaaaaaaaaaaaaaagcgtgcctgtgcaactgcatttcaggcaatattactcatgatagaaaatgcccacctccacaaagtagagccacccattcctgcaaatctcattctctttcagctaaaaataatgctttgtcaccctcagtacacctccagctggcaaactagggatataatgcttgagcgaatataacttataataggtttaaataatgatcatacatatggaaagcagaaatttaccattcttgagctgccaatctcagcccttgctaaacatagatttgacatcagaaacaagatatgatggggtttataatcagcagttgacgggaagcactggagaagaaaaggcccccactattggaaggtcagtggctctatcataggccaacagtgacagaagtgggcagctcccaggaggcccgatgtcttctcatgccctgtggtcctaggaaggagcaggaagtggttggaaacaggggctgggctcagatcttatgacttcctgggtttcaggagatctggttatcaactgaaagccaggatctggatgagggtatgtgcctgtttaagtcatgatgaaatggcttcaggacagggatatatacaaagtttgtgcatttgtcctcccagggattttccaactcaattcttacccaattacagatcccaaaagtacagagactgtccccatttctctgaataactgctgagtctgtgcctctctgtcacctttcctaacacagggccacagtgtgggaggtttgaggtctgattcagggacacaccttgtgctggattcactgttgtggatgacactgccctttccttctgattgaacaaatgtcaaggagacttttttggattttcccctatcccatgccctgactattgagcatgataaaacaactataaaaagaatggactgggcgtggtggttcacacctgtagtctcagcactttgggaggctgaggcaggtggatcacctgaggtcaggtctttgagaccagcctggccaacatggtgaaacctcgtctctactaaaaatacaaaaattagccgggcctggtggtgcagcctgtagttctagctactaggatgactgagggaggagaatcacttgaacctgggagacaggttgcagtgagctgagatcgtgccactgcactccagagcaagactatttcaaaaagaaagacagaaagaaagaaaatggtttttggtttgctcgtactgtcatataccaaatatccctacttttgagatgtcagtgatggacatacggatggagaaattaaagtcaaattaatgtaaacatctcactttaagctcttctttctgcccactgcacccccaggtgctgtgctggcaggtggggcccacactctgggacttgcctctttagcctctgcacacaatctccagcagggcaaagaggacccagccttaggtgggcaccagtttttcagggcactcttgcttgagccacaaaagttttccctgagaaaggtgacattcagagaattacttcatctttaactttccaaactatttctaccataaaaaaaaaaaagaaaaaaaggatgaaggcaggttatggaattggtgtaaggatccctgaagtgttctattccacgtttttccttttcaatgttacagtagcacctacttcattgggacccacctagttcagaattgtgatcattaagacaggttaagtgactaggaagacttggttaagcaaattgcccatgtcaacaagattagaggtgccacatttaggccatttaagtgttttcaaggcctatttacctccaactaccactctgttaactgtgcatggttctgttttttaaagccgactcctaaaagacctcttccccagcagcactcccttagtctcctccggttactacacgcatatttattccccaagaactaagcacggccatgtcacatggtggtgataatggtgaacacagccactgactaggagggcttattcccagcctggctcccaaccacccttaaggtagcttgtctgttgtccctgttatacagatgcagaaactgagactgaagctaaggtggcttgtccccatttacacaactagcaaacaaggaagcctgggctttaagcccagacagattgactggactatgttaagcccctatgctatattacatttctatattcaagtcactaggttaggcacaagagggctacaaaatcctgccctcaaaatctttccctgtattaggggagacatgacaccaaagtaaataaggaagatctgtctgggaaaggctgggcacccagctgtggaagtacagaggaaggaaagatgaaggagaattcagaacaggctcaaggaggaacaagtgggattcagggccagggagatgggggcaaggggcactttcagcagaaagactgaggacaaccttagccaagaagcagagacagacatgtcctggataacatgcggtgaccagtaggattcacagattctatcatgattccagctggctttgtctcccaggtagataaaacgtttgaaaagttaccatatatctgagggttttttttttttttttttgaaaaagcaactctagtctcaacttctggagcctcacaaaatgtcctgttaaaaaataaaaatatggtagtcaaaaacatttagaatgtggtgctccctggatcactatcttggagatccacaattaaagtctctggggcatcctgcagttaaataaaaatgactatttcatttagtttggcaaacttgtttgcctacagagtccttttctgcatgttaagaacacttaatgtcatatgaaaaactttggaaaatgcaactatattttggatttaaagagaaaaatgcagagatacctctttctattcttatgcaggtgaagtaattgataaatcctggtcccagactacctaactgtgtctgttttccagagccaaagacttgagtcaccaactatgctcagtctttgtccatggagatgtcctctcctttctcctgaagcttatgctgcttagagcttgggtttcaggcaatttaggcctcagaggacttcatttattcaagacagaggcatccccaagaaggctgttacatgccattggaacccccgctgatgtagtgattctaaaccttagccatgtcctggacagtctacgcatgaaaaattaaaaacaaaaaggccagagtaatttcacaaaagtagtatccatatactgatgttttttcttttccaccttgctgaagctcaggctggctcttctcaaccctagatatcatgcagcccaggaccaaatcctatggaatcgtcattttttccatgcacatattcagtcggtgcaagatttacccactcacttacccccctgttcctgattagctcataattcctttttttttttttttttttttttttttttttgagaaggagtctccctctgtagcccaggctggagtgcagtggcgcgatctcggctcactgcaagctctgcctcccaggttcatgccattctcctgcctcagcctcctgagtgattagctcataattcttacacatgtggtggtttgggtacgaccacattccaccctctcactccaaaccctcccagctctgcagaactttgttttgtctttgtttttatcaaaaatatggaaacggtaatgaaaaatgcattgcctctcaaagcaatagttttctgagcttctgtcagagaacatgatcatccagctgctggggaaaatggcagagccaccatggtcttgtgatgtcttggcacatggtgctgagagggtggtgtcctcatgggaatctttatgcactccacttgggcaagttagcatgccaatggcattgctggaacattccaagctccagacacccatccctctcacccacataatcttcagattgcagcacagatataagaaaaacaactcctaaaactcaagatcttcaggcagttttgcagtggagtttctctattaaaagggcctctttggaggtatctaggctcagaggccacaggcagggatcttttcccataatttactcaaccgcaagggttctgcccttggagtttaggaagtcatgattgggatttagagaacagtaatgctttgatattacatgcaaaattctgggtgtaggcaacatgggccttagaatgttccagaaatgctgtggcatgctgtcttgcccaagtagggtacatgaagattccccatgaggatactcagcactgtgtgccaagacatcacaacctcttttgaagagaggttccatagctcccattagactctcagagaagtctgtcggctgatgaaggcgaggtaggaaagtaggagtgggccaaacccaccccctagacccatatatttgtttttaatttcaattttgtgctatcatgtataaacttggctatttctttttttaaaaaaacaaagtctaaatctctagcttctcttgaaacatttgagaagatcagtggctgtgagcaggcattcctgcccagtggcatttggtgggagctgagtcactgcccaggcatgcccttggcatcatcacctccatcctcacttacgcacccaggggattcactcactgctgttcgcagcctgggctcttgggatgctggagtttgcagccccaatggtccaaaataaaaagcgctgttaactatgaactggtacatcagttagctttgctttagaacttttaatgtggccctaagtggaggcttaatctagttgatctaacacactatttgggtaccaaaagcctgcttagatttttttttttttttaattctggccattcaaatgggatgttttcacagaccagctaataaatgttggctggacccaccaaccaaattagctttttcctttgctttgaatcatattgatactgcctgagttgtgtgactatactatagggaactgctctttaatgccaggcacgcagaatagattttggtggaaagcgaaagtagacttgcaccttttgccacaggcttaaaactcccgctgtctttaataaaggtgcctggacccacctccagcccagatgaaaagatccttggggaggcagagccatgctgggctgtcacacagcaaagactcccctgcgcctccttgcctttggagtgatagcatctcgaattctccagttaaggcttggattgaaatactgagctcctggtttcagtcaaacctagggctcacttgaatcttagggggactgcatttccaactgatctcaagtctttgggggtttaagttggtctgcgtttggcaaaagacaacttcctgtttctaagaaaaaaaggcttatgagggcttacagaaaggactccaggagcttttgggctgcaaaaaggctcttgcaaaacaacatttggatgatttacgtgtaaatgaatcagaaacatgtggattgaatttccttgtgaatacagatgggtttaaaaattaacggaaaaagtgtttggcaaaatactttttgggtttcattttaattgaatctaaaataccaggggtgggggtggggaagccggaggaacgtgggggtcttggggctaagagcccagggtggcctccctgtgtccacttgcaggatttgtggtactggggttcgcttttttttttttttttaaaggcacattcttccagaatagtaaactaagagggccacttcctagacacagtcatcactgacaagaacactaattaatttacgtttagatttgccataaaaagaaagcaatgactctctctgcctgacaagacacttaaccgtgattgggagccaaagacggctgccccttgcttgtaatgtcagcatctctctcactttgacatgtttcaaaggtgccaccctgttttaattttcttagttatccttttattcttcccagcaatcacacaaagtgtgccacatgggatggtgcctatttgacataagagcaaatacacctcagaaaagttaagcaattaacacaaggtcacacagctagtttagtagcagaagtgatgggttaaaaatcccagcagctaacctctatcaggtcctcactaggagctgaacccaggctaagcactttgcatgtgtcattttattcacctctccaataaccctaagtgttgctgtgattctagctacagaagctgagcttcacagcagaaaagccagaggtgggactcaggcctatctgattctgtgttctctaaataccactatctgcgacctcctagctttgaatgctttcaacaatttttggttacctcaaacaggcttcttttttcccaggatctcactccagcttccccaggctacagttttctaggaaatatggtcagatcattcccgaaacgttgagtgaagccgtgatatggaagacattctgcagtttcatgcaaacctgtcttctcctcccagctatgctttctcccaactttatgttcccagtgaacaaggcctgctgtagctggcatttccttctcccagcttaaggacctaagcaaaggcactcaagatttctgctctgtggcttagtttttgtgctaatacagaggatagggaatgccaagttttttgtagaaactgcttgcagtttggatggaccacttctttatattttgggtgtgaaggggagggaaaaaagagtgacaaagtgaaaattctcactattttgcaaggttcgaagctgcaactttcccagtggtattcaaactatgcaactttccagttatgccttaaaattgaaatcagatttggagagatgtttaggatattttgttctgttaaagacacatacccatgctgatttattataatttttaataaagcacatgtatattttataacgaaaattcattccagagaagatgagagcaaatttgtggctaatagtcgaacaacatagttgtgtgtgggtgtttttttttttttagtcttcattatttttctcagtgagaagtttgaacgcaaagaaaccattgacttctgtcttttctttcatagcgatatctggcatgattgttcctcctatgtgaaagaattgccttgaagaattgtattaatgaagaggttggattctgctacagagagtaatctgatacaagtcccagagtggaacttttaactcaggcctttttaagaggaatcacaataactgcagatttttaaacaaacaaaatcaccgaccttgcaaatactgaaattggaagagggatctgcaagtgcagggtgttggttaaagttgtacctcccaagtatttgggggatatatttattctgtattgacaaaagcaaatccactttttctttttcttttttttttttaagcttaattctgcaatcatttgtcttttataaaccgtaaagctctatacaagggacactataaataagactccatgttttaatttatgatgtttttaaagctgtgtaaaggaagaatgaagtggtgatatttacaaaaaagtaaaaaaaaaaaaaaagaaaaaaaggaaaaaaaaaaaagcttgtatgggacagaataggaatgccagttagattttttagaaaaactaagggtcggcttttgcgccttaaagcatatcaaatggtagttagctcagacagtgcattttcaatatctaacttaacatgccaccccttagcagtgcaagcttatttatctcttttgtattgttgtcttaagcaactgtgtaaataaatgcagcctggaaagttaaaacgcgatgtaagtgatcacatttttccctctactcgaaaatccagtgcctctagacagattgttaaaactgcatatttaaatctgatctcattctctccttttacttaagtcagtttcttctgaagccgatggcctctcgagagcttggtggcacacatactgtgtgagaatctcctttgagacttcatggaacagggtccaggcacagaattccacactctgccctccagttaacaagccaaaacctcacgtacgctcccccatttgcaagtttaaagtttactcgtcctaaatgcagacttcatacctatcttccaaaagttgataaaagcaacgtggcaggtattttcgattttcccattccagatactgcctctatcagtcgacccttaccatttgtaacataatagattgaaacaacaggttaagtgctttggaattaagagttaaagggaaccgggggtggagaaaggaaaagaaggttgagacctccaaaacatagttttctgttctatgggaatttttgctctcattatctgggaagtgttcttaaaaataagaattaatagcaaagatgcagcaaagctctgaggatgcatttgcctgatatttttttctttgctcttgtgtttttgtatgtagttataaatactgtagattttttttttgtgattttttgccaaagttgttgttctatttatacattttaatgtcttaagacattttttcaatatcacaaaaagattttactgcgtattttgcaaagaaaaaaagctcactacctttagcttgcacatacttgcaaagttaattaaaaggctttttgttttaaaggggattttgtaaaatatccatataaataatgtatttatctttcgaatttgtacattgcttttcccttcttcctcttccttccacccccaatttattttattgtgtatgtttgctacgtgaaaagtgcgtatttgtttggtcacctacacttgtattagctgtttcaatgtgatttttaaacatttcatttatagttatttttagtattgttataaaccatgcttcagtttttttaatttccacccaaaagtcattgtctatttttgtattatttgtaagttaagaagttttttccaatatatggcaaaaaaaaaaaaatagtagcatattattcttgtagtatttagttcagtagatttaaaaaaaaatgtatcctttgctttggaagcttacaaaacaaccctaatgctgttttactctattaatatgcatggaatctctccctttggagtgacgcattttgtgcattaaattctagggagaaacttcatagaaatcaatgaacatactttctttcttaagtctgcttgtatatttcctctgtctttcacataaatataaaccagcagattggatgccttaacaatgcaaatcatattcatttcacttgtacattgtaactgtgcaccagaactgtcagtcatcactaacattctaagaaaaaagaaaaagaaaaaaagaaaaaaaaaaaaacaaagaaatcgaaaagcacaaaagaactgttttgttaccttaagacaatgtaactttttctagtagagcaagaaatcatttacaacaatgctgcaactgtgcatgcccccatatggattttgcaatggttttcactaggctgtcaagagtgcgatttttatgggttggggtgggtgggggaggggagttgtgggagggtaggggagggaggaaagctgtttttcatggtgagaaataataatgatgactaataataataaaaaaaactggaaaatgtaagcaaggtggacgcattgcttctcggtactcagaaaggttatctgaatttgcgtggtaagcgctggcctgaagatgtacacaagttaaagccatattttatctggtgagccccttaactgtttctgaaggaatgaacggtcagccgggaaggtgtccggcttagaccttgacaacagacactacccatctgtcagccatgtgcagtggttagaactcttcttgaaagtccaaagagcctttaaaatgtgtataatttgtgttttgttgcttctatttctattgattagatgaaaagacattctggccctctgatcctctttcttctccacaaaagttttacaaataaaagatgttcccctaaatacagaatatggctttaagaagaaaatgaaatgaagaattaaattaagatttcagtgttgggggaaaaaatacagcttctggatgactggattgcataacattgccctggcctcacattgtactaggatgcagcttaaatgaagtcatctctaaatctactaacctttcaccttcttatcaaaactttttgaatagacacacactgtacagttcaattgttagagaacctaactactgtagagattgttaaattttttttttttttttgcaaaaattcaagctgtaaaaacttttcaactttcacaatatttaattaaagttacttcctgtctgtgatggcagctcctagttgtgtattcatttctctatttcagatgagccaaagtccaacataatgtaaaaggtctgtgtttgcaatgactcagatcagtcttgatacccagtgaaaaggaattagggtagtgctgggacaccctctttcttatgtaggtccttggggatttgctaatctgggatgcaaattgaacacgcgcagcgtactgctgccctctgccggcggtagctggatgtgcacatgcccacaccggtccatataggagccaagagcccccagcaacttcaacagccaagccctgagatcctcctgcgtgattgaactgtgaatccaggaagtggccattctagaacccctatccttcgtgctacaaatctgaaccaagcttttcacacacagctgctaattaatcccagcgagccttctggtcaactaattatgtgccctggctcattgatgaggaggcatgtgtgaactgagccttctgttatcaatattttttaaccccacatgaataagatacttttcctgttggacaggagtgaaacattccacaaatactagataggtacctactcatgtaaaattgtttcactttaaattccatcatgatcatgagtctttctaaatgcacactcaatgattttcctacttttacagttattgaacatgatgaggttaatgatacttgtaaaatgcctcaaaaactcagcagataggctgtaggccaacggaaacttgatggccagaggtgataggatggctgcaacacagtcacatgtggtgggcactgtttcggctttggaatatagcccgatttgagtaatgaaagagagtgatatataagttagagaagctgccatccttttaaagaaacttgctgaaaagtgtggccattcaatatatgtttcttttgaattctgtgtttgatatagtttcctgtattagatgcagaagataaagattgaacaagaggccccttttctcaggatgcacaccatctcagaaaagacacacttatattcaaattatgctagaatggtcggccaggctgagacaggtgtgccacaatgctccacagagcacagctgacgtccacacctctgacacgctggcccctacagtctttaagggctacctcttgaaagtgctcattcactcgatcgttcatttattcattcatgcttgtaaactttgcgcgtttcctatgcctctggtgctaggcaagacatggtgatacatcggtgggccatggtgacattatacccacttggagctcatacttgagtggggcaaatgaacgttaagcagccactcaagtgcctgtaacaaacgaatcatggtaatgaagaaaatgtctacaatgctctgaaagtacattgcagcaggatctgatttaacctgaagtgctgggaaaggctccagagaaagtaacatttgagctgaggtataaaagctcagcaggagctaaccaggtgggcctggccccttaggcagaggaaatgagggaggtgtaagaacactgagctttggagcacataaggtacatttaggaacagaaaaactatgtgagtggagtgtgcagatgtgcacaatgagactgtggggcttgggagttcaattcagaacatgtcctgagcacctaccacgtgcctggtactgtgctagctgccaggtacactaagcaaatgggccatagttcctgcctgtagggcctatggcaaggctcataaactcacagccccatatttgttcataggggctatgctggttaaaaaatcggggtgggccaggcacggtggctcacgcctgtaatcccagcacttagggaggccgaggagggtggatcacgaggtcaggagattgagaccatcttggctaacatggtgaaaccttgtctctactaaaaataccaaaaaaaattagctgggcgtggtggtgggcgcctgtagtcccagctactggggaggctgaggcaggagaatggcgtgaaccggcaggtggagcttgcagtgagccgagattgtgccactgcattccagcctgggtgacagagcgagactccatctcaagaaaaacaaaaaatgagggggtaaactagggataaaaacaaccagacagggagtgggagggctggggccactggcaagtgcatgctctgtccaaagtgagaatcccacttgctccaggcaattgctcccatgtgagaatgtggacccagtgttgcccatctttcatttctcaagaatgccagatatgttactagattatttaaaaatctggcataaaattttcatttttaaaatgtcagcaacttatctaaaaacagtgttttaaaaacactttcttggccaaactaagtccagaatcccctagagtgtcagtttgagacttctgaccaaaagataagttacgaacggtgatgttcacacagcctgatttgaaagtcataatgacatgttctctccatggagatcaaggaagactgcaaagaagaggatactccagtggtgttctataggataagagttctccaaacatataagggaaagtaggtaatggaaggcactggtcaatgccctggcagctgactttatgagaaaaaacattattaccataaatccaaataggaatatggaaaattggaatcatgtgcttgtgaaaaaaaaatcctctgtcttctgcagtagctgtattcaatgcagaagtataggtcagcttttaaaaacaacaacaacaacaacaattctgtttgccttgcagaaagacccttatgaatgaatccatttttaagtacactttcagtgaagtggaccctttccaacacaccatgctcaaagccacacctgccctagcatgctccaaaatcatcatatcatcaagaattttgctcctgagattatcttctccctctccagcaccatcacattctctttcctcaatttacattcagaccagcttacaaatgtgatctcattgaggaaaaaaaagatttgacctcactttgcttgtaagctagccacagtcctcctgctcctgatagtagcgaatctcaaaagagttgtctatgtctgctatcttctcttcttcatttatactttctcattattcatattacaatatatgtttattgtaattttgaagagtggagagtcttccatgttgtaaacaagggatctcaatttatattttagaagtaccatcttggttgctacaaaaagaacaaattggagggagacagagggaaaatagaggacattagaaggccattgcagtcatccaagcaaggaatgaacagcttggactaggagaagaaaaaggaggaaaatagagaggattaaaaaatatttaggcaatagaactatcaggatttggtgactgattcaatgtcgggattgagggagatgaaaaagtcaagataaagctcagttttgtgactgctggtaaagaaatagttgatgtctctgtttgggctgtttccttgctctggagcgcaataaagaagccccttcctcgaattgcctttgctttccttccctcttccaaatatgatcctcttctccagaggcttctgtatttacattaggaatgaaattcagtttctggagctggaaacactttgttacttttttttttttttaacttaagcatcaagcagttttatctcttctctctggagagttatgctacagtgggactgatttttatctacttagcatacatttttcccactgattgtagaattttcacattctatattaagaacaaacattctaggccctggcgttaaccacaggcctgatggttggccttctgtaggaaatatcctgcactgggaattatcttataaggaaaatttagtactccacaaagacgctgatgaaatgtcaacacaaaggaaggagagccattgagggcgattcattcaataacattgatatggatgggattctgccaggaaagcaaggagaaatgaatgagaaacaggcattacccatggccttctctgaagcatttatttacacaatatctccttactgaacatctttgtgtcaagtgctgtgctaagggctgggaatatgatttatgtcttaaatagacctatctccttcattgtttactgcctaaggaggacagagacatgactcaaacaatcacacaaacatataattacatactgtgataaactgctctgtaaccctaatatatctgagtgagcatgtggctctatctctgcataaagttgagcctagctcaacagccaaaattaattaaaggggaaccaaattccttatctagacccatcaaaagctattaaaataatctaaatataaagcccacagcaatatctagtaaagtgacctttcttctattatcttttccctcacttctcatcttattcagatactactttctccaatccatctgaccaaaaccccctgctctattctaagtttccatgatttttctttctgccttctccctctttgtccatctctcttattgttttattttttactgtaggggcagagaaggtttctcttccaccctctctgaaggttctttgaaatgactcaccatagacagataaataggagaaaaaggcatacaaacttatttacttgcacaaggaccctggagccctgcaaatatgagactcaaagaagggccagatggctatagcttaaataccctcttcataggggagagggaaacgaaggactataggtaatcttacaaggatagtacatattttttagggaaaatgaatagactggggaggcagacattatcttgtaactgactgtcttataaaactgcaatttataggaatgtgaggggcaaaactgcattgtgaacaaaggttgtcttactgtgcagataaggtcttccaggtaatctctctgagctgctctcagaagaggagataaaggtctgcctgaacatggtgatgacttttagcctcttctctgtttgttaatctttcctggttatttgatgagattcctagggaggtgggtcttaagacaattgcatttctttcagaaagaagtttccttagtcagataagaaaattcgagagaaaatctctccctgtgcttttaggggatgtggggtgggagggtaacaaatagataaggttagtaagttttggcttctgaggcagcttctaaggccttccaagttttaaaaattctgctcagcatgccaaagcaccatactttgggggatcgctctctatgctccaacattagcaagtctcttttccagcaagaacatctttcgtctttagcagagcaggggaaaaaagggagatatggtgctggttaactatgattccttttggcaggctgtgggagggaaagtccataaacattcccttgttgatactcaagaggcagaggcgggaggatcacttgagcccaggagtttgaggctgcagtgagctatgatcatgccactgcactccagcctgggccactgcactccagcctgggcaacaggttgcactccagcctgggcaacattctgtttaggcaacagaatgagatcctatttctaaaaataaataatactaataatcccggatctgttctactttgagaggcaagcatagggaaccatgagcacatatagcaaataaattgatttggttatgtttgagagaagacctggagaaggtgaagcaagtcagaaaggaagagttgggagtgaagaggaaaaatattccagatagagacgacaggttatggagcagtggaagaacagaaagaaggctagagggttggtaccatctattttcccctggggaattcttctcctcagttcatctccttcttccttttctcatttcttttttctgcttttaatcatgacttccttcacctttgtctctgcatcagtgctgaagagtattacgctcactggtagctcttaaagaagagccagcatcctagattttccaatgcccctctccttccatttctcctcatgcctacctgacccctaaatctattgcatggaattttagagacatagtcaacttctcttcaaccctttagacagccataatcagaggaaaggttgggcctcccaatgtgcttctttagaattcaaaggaaaacattcctaccccccaatcacatgccctacaaaccactgcagctcaaagtgcccaactgaaaagagcaacgagcctcctattcttcacaagcacagaatattatagaacatttttgtgtccagtacaatgccaatttactttatcaaacttaaggagcccagaagaagagagtaaagataagcaggaaatcaatactaatggcaattggcatcccttgttgagggcttacttttatgtattattattcacgttaatttattttattttctgagacagggtcttactctgtctcccaggctgaggtggcaatgatacaatcatgtctcacttcagcctcaacctctcaggctcaatcaatcctcccaccttagctccccaagtagctgggattgcaggcgtgcaccacacatctgggcaattatttttttaatttttgtggagacggagtctcactatattgccaggctagtctcaaactcctgggctcaagtgatcttcccacctcagcttcccaaagtgctgggattacaggcatgagccaccacaccctgctgggggcctacttttagatgagctgatatactattagctatagaaacatgtttgttaacttctcacagtagccatgtgatatgggagcaattatctcctgctgaaatagaattgctcaccaatcccgtataagaacaaaggatccccaatggaacttgaaggccatttatttaatgcctataaacacagtagttagtatatctacggaatgcattgcttcaataattcgtatctatggaaatgacttaaatcactcaaattctataactctcagttactcatcttattgttttaagtgacaataagagtatttatgttaaaaggtgtctaagaagatgatgttaaataagtcacatatggagtgattcagtgcccaggacatattagccactctgtcaatatcagatattgttattccgttccacaattccaagttgtgtgtgtgtgtatcataatacatttaactgatctcaaaccaatagacattaggttgtctcttatttcttgatactgcactcattatgatggactccttgatttaaaagaataaaactcttgcaaattcttactgcttcttgaaagctaactgtatagtatccctagcattcacagtgccaccctgaagattagattagactcctttaatatgggagacttgcccaatagtttccatatggatccaaaagatggtctgtggctgatgcttgtcataagcacaagcaaaacaacagttctccttcaaatcatttattttcattatatttctatactatatagtaccagggaaggtaccagggaactccagacaaaaaataaaataaaataatcagtctgaatattgtcatgtgctgaaggaagcagattctaggcaataaatctgcagggcaaaggcttagcactgctgtcagggaagaggataaagatgagaggtgggtaatgtaggggcacagggaaggagaaaaaaagaaatatttcctatgcaccaacatcacttagtagtaagatcctactaagccccttcagagttaaaaaatacaaatgtaacaggtttcagagaaatgagattaggtgtaatttagatatgatgaattcatttacaagttggactgctaggagtccccattttcattcagaatgagaaatctcatgaaataacttacttacccagatagttaggtggttactatctgccagttgctgacctagaagctggtgtgagagccattggatgtagacaataacccagtataaaaccaaaagcaaattagtaagttcacatgtaattacacattgggaagagtcctgtgagagaaactggcaagatattggacacttcatcttactgatgctgggattggccatgggcttgctacagcctgggggaataggtggtaagatactgacaaaggtcttagatgcgactgtgaagtctgtcctggttctttttttttttttttgagacggagtctcgctctgtcgcccaggccggactgcggactgcagtggcgcaatctcggctcactgcaagctccgcttcccgggttcacgccattctcctgcctcaagcctcccgagtagctgggactacaggcgcccgccacagcgcccggctaattttttgtatttttagtagaggcggggtttcaccttgttagccaggatggtctcgatctcctgacgtcatgatccacccgcctcggcctcccaaagtgctgggattacaggcgttgtcctggttcttacactgcagagattggccacgagaagggcttccccatggaagctgttgaaactccaacctgagttctgaaatgtccacacctaaaacaggtatgagcacagtgacatcctggagctaatctctgctgcccctcaactgggagcaatcacccagccatgcctgcaatatcagccgttcctcagacctactgccctgcaaatttgcaagcttgagaattaacacttactgttaattcttgaccttcga

SEQ ID NO: 2729 - DNA, 3091 bp, Homo sapiens
aaccgaaatgctaaccatgatgatttgtttcttcacaggttcttcttgaaatttttcctcaaatgtaaccaaaattgcctaaagaatgcgggaaacccacgtgacatgcggagattccaggtcgtggtgtctacgacagtcaatgtggatggccatgtcctggcagtctctgataacatgtttgtccataataattccaagcatgggcggagggctcggaggcttgacccctcggaagcagctactccctgtatcaaagccatcagcccgagtgaaggatggacgacgggaggtgcgactgtgatcatcataggggacaatttctttgatgggttacaggtcatattcggtaccatgctggtctggagtgagttgatcactcctcatgccatccgtgtgcagacccctcctcggcacatccctggtgttgtggaagtcacactgtcctacaaatctaagcagttctgcaaaggaacaccaggcagattcatttacacagcgctcaacgaacccaccatcgattatggtttccagaggttacagaaggtcattcctcggcaccctggtgaccctgagcgtttgccaaaggaagtaatactcaaaagggctgcggatctggtagaagcactgtatgggatgccacacaacaaccaggaaatcattctgaagagagcggccgacattgccgaggccctgtacagtgttccccgcaaccacaaccaactcccggcccttgctaacacctcggtccacgcagggatgatgggcgtgaattcgttcagtggacaactggccgtgaatgtctccgaggcatcacaagccaccaatcagggtttcacccgcaactcaagcagcgtatcaccacacgggtacgtgccgagcaccactccccagcagaccaactataactccgtcaccacgagcatgaacggatacggctctgccgcaatgtccaatttgggcggctcccccaccttcctcaacggctcagctgccaactccccctatgccatagtgccatccagccccaccatggcctcctccacaagcctcccctccaactgcagcagctcctcgggcatcttctccttctcaccagccaacatggtctcagccgtgaaacagaagagtgctttcgcaccagtcgtcagaccccagacctccccacctcccacctgcaccagcaccaacgggaacagcctgcaagcgatatctggcatgattgttcctcctatgtgaaagaattgccttgaagaattgtattaatgaagaggttggattctgctacagagagtaatctgatacaagtcccagagtggaacttttaactcaggcctttttaagaggaatcacaataactgcagatttttaaacaaacaaaatcaccgaccttgcaaatactgaaattggaagagggatctgcaagtgcagggtgttggttaaagttgtacctcccaagtatttgggggatatatttattctgtattgacaaaagcaaatccactttttctttttcttttttttttttaagcttaattctgcaatcatttgtcttttataaaccgtaaagctctatacaagggacactataaataagactccatgttttaatttatgatgtttttaaagctgtgtaaaggaagaatgaagtggtgatatttacaaaaaagtaaaaaaaaaaaaaaagaaaaaaaggaaaaaaaaaaaagcttgtatgggacagaataggaatgccagttagattttttagaaaaactaagggtcggcttttgcgccttaaagcatatcaaatggtagttagctcagacagtgcattttcaatatctaacttaacatgccaccccttagcagtgcaagcttatttatctcttttgtattgttgtcttaagcaactgtgtaaataaatgcagcctggaaagttaaaacgcgatgtaagtgatcacatttttccctctactcgaaaatccagtgcctctagacagattgttaaaactgcatatttaaatctgatctcattctctccttttacttaagtcagtttcttctgaagccgatggcctctcgagagcttggtggcacacatactgtgtgagaatctcctttgagacttcatggaacagggtccaggcacagaattccacactctgccctccagttaacaagccaaaacctcacgtacgctcccccatttgcaagtttaaagtttactcgtcctaaatgcagacttcatacctatcttccaaaagttgataaaagcaacgtggcaggtattttcgattttcccattccagatactgcctctatcagtcgacccttaccatttgtaacataatagattgaaacaacaggttaagtgctttggaattaagagttaaagggaaccgggggtggagaaaggaaaagaaggttgagacctccaaaacatagttttctgttctatgggaatttttgctctcattatctgggaagtgttcttaaaaataagaattaatagcaaagatgcagcaaagctctgaggatgcatttgcctgatatttttttctttgctcttgtgtttttgtatgtagttataaatactgtagattttttttttgtgattttttgccaaagttgttgttctatttatacattttaatgtcttaagacattttttcaatatcacaaaaagattttactgcgtattttgcaaagaaaaaaagctcactacctttagcttgcacatacttgcaaagttaattaaaaggctttttgttttaaaggggattttgtaaaatatccatataaataatgtatttatctttcgaatttgtacattgcttttcccttcttcctcttccttccacccccaatttattttattgtgtatgtttgctacgtgaaaagtgcgtatttgtttggtcacctacacttgtattagctgtttcaatgtgatttttaaacatttcatttatagttatttttagtattgttataaaccatgcttcagtttttttaatttccacccaaaagtcattgtctatttttgtattatttgtaagttaagaagttttttccaatatatggcaaaaaaaaaaaaatagtagcatattat

SEQ ID NO: 2730 - protein, 373 aa, Homo sapiens
MRRFQVVVSTTVNVDGHVLAVSDNMFVHNNSKHGRRARRLDPSEAATPCIKAISPSEGWTTGGATVIIIGDNFFDGLQVIFGTMLVWSELITPHAIRVQTPPRHIPGVVEVTLSYKSKQFCKGTPGRFIYTALNEPTIDYGFQRLQKVIPRHPGDPERLPKEVILKRAADLVEALYGMPHNNQEIILKRAADIAEAKVPRNHNQLPANTSVHAGMMGVNSFSGQLAVNVSEASQATNQGFTRNSSSVSPHGYVPSTTPQQTNYNSVTTSMNGYGSAAMSNLGGSPTFLNGSAANSPYAIVPSSPTMASSTSLPSNCSSSSGIFSFSPANMVSAVKQKSAFAPVVRPQTSPPPTCTSTNGNSLQAISGMIVPPM

SEQ ID NO: 2731 - DNA, 3094 bp, Homo sapiens
gatgatttgtttcttcacaggttcttcttgaaatttttcctcaaatgtaaccaaaattgcctaaagaatgcgggaaacccacgtgacatgcggagattccaggtcgtggtgtctacgacagtcaatgtggatggccatgtcctggcagtctctgataacatgtttgtccataataattccaagcatgggcggagggctcggaggcttgacccctcggaaggtacgccctcttatctggaacatgctactccctgtatcaaagccatcagcccgagtgaaggatggacgacgggaggtgcgactgtgatcatcataggggacaatttctttgatgggttacaggtcatattcggtaccatgctggtctggagtgagttgatcactcctcatgccatccgtgtgcagacccctcctcggcacatccctggtgttgtggaagtcacactgtcctacaaatctaagcagttctgcaaaggaacaccaggcagattcatttacacagcgctcaacgaacccaccatcgattatggtttccagaggttacagaaggtcattcctcggcaccctggtgaccctgagcgtttgccaaaggaagtaatactcaaaagggctgcggatctggtagaagcactgtatgggatgccacacaacaaccaggaaatcattctgaagagagcggccgacattgccgaggccctgtacagtgttccccgcaaccacaaccaactcccggcccttgctaacacctcggtccacgcagggatgatgggcgtgaattcgttcagtggacaactggccgtgaatgtctccgaggcatcacaagccaccaatcagggtttcacccgcaactcaagcagcgtatcaccacacgggtacgtgccgagcaccactccccagcagaccaactataactccgtcaccacgagcatgaacggatacggctctgccgcaatgtccaatttgggcggctcccccaccttcctcaacggctcagctgccaactccccctatgccatagtgccatccagccccaccatggcctcctccacaagcctcccctccaactgcagcagctcctcgggcatcttctccttctcaccagccaacatggtctcagccgtgaaacagaagagtgctttcgcaccagtcgtcagaccccagacctccccacctcccacctgcaccagcaccaacgggaacagcctgcaagcgatatctggcatgattgttcctcctatgtgaaagaattgccttgaagaattgtattaatgaagaggttggattctgctacagagagtaatctgatacaagtcccagagtggaacttttaactcaggcctttttaagaggaatcacaataactgcagatttttaaacaaacaaaatcaccgaccttgcaaatactgaaattggaagagggatctgcaagtgcagggtgttggttaaagttgtacctcccaagtatttgggggatatatttattctgtattgacaaaagcaaatccactttttctttttcttttttttttttaagcttaattctgcaatcatttgtcttttataaaccgtaaagctctatacaagggacactataaataagactccatgttttaatttatgatgtttttaaagctgtgtaaaggaagaatgaagtggtgatatttacaaaaaagtaaaaaaaaaaaaaaagaaaaaaaggaaaaaaaaaaaagcttgtatgggacagaataggaatgccagttagattttttagaaaaactaagggtcggcttttgcgccttaaagcatatcaaatggtagttagctcagacagtgcattttcaatatctaacttaacatgccaccccttagcagtgcaagcttatttatctcttttgtattgttgtcttaagcaactgtgtaaataaatgcagcctggaaagttaaaacgcgatgtaagtgatcacatttttccctctactcgaaaatccagtgcctctagacagattgttaaaactgcatatttaaatctgatctcattctctccttttacttaagtcagtttcttctgaagccgatggcctctcgagagcttggtggcacacatactgtgtgagaatctcctttgagacttcatggaacagggtccaggcacagaattccacactctgccctccagttaacaagccaaaacctcacgtacgctcccccatttgcaagtttaaagtttactcgtcctaaatgcagacttcatacctatcttccaaaagttgataaaagcaacgtggcaggtattttcgattttcccattccagatactgcctctatcagtcgacccttaccatttgtaacataatagattgaaacaacaggttaagtgctttggaattaagagttaaagggaaccgggggtggagaaaggaaaagaaggttgagacctccaaaacatagttttctgttctatgggaatttttgctctcattatctgggaagtgttcttaaaaataagaattaatagcaaagatgcagcaaagctctgaggatgcatttgcctgatatttttttctttgctcttgtgtttttgtatgtagttataaatactgtagattttttttttgtgattttttgccaaagttgttgttctatttatacattttaatgtcttaagacattttttcaatatcacaaaaagattttactgcgtattttgcaaagaaaaaaagctcactacctttagcttgcacatacttgcaaagttaattaaaaggctttttgttttaaaggggattttgtaaaatatccatataaataatgtatttatctttcgaatttgtacattgcttttcccttcttcctcttccttccacccccaatttattttattgtgtatgtttgctacgtgaaaagtgcgtatttgtttggtcacctacacttgtattagctgtttcaatgtgatttttaaacatttcatttatagttatttttagtattgttataaaccatgcttcagtttttttaatttccacccaaaagtcattgtctatttttgtattatttgtaagttaagaagttttttccaatatatggcaaaaaaaaaaaaatagtagcatattat

SEQ ID NO: 2732 - protein, 380 aa, Homo sapiens
MRRFQVVVSTTVNVDGHVLAVSDNMFVHNNSKHGRRARRLDPSEGTPSYLEHATPCIKAISPSEGWTTGGATVIIIGDNFFDGLQVIFGTMLVWSELITPHAIRVQTPPRHIPGVVEVTLSYKSKQFCKGTPGRFIYTALNEPTIDYGFQRLQKVIPRHPGDPERLPKEVILKRAADLVEALYGMPHNNQEIILKRAADIAEAKVPRNHNQLPANTSVHAGMMGVNSFSGQLAVNVSEASQATNQGFTRNSSSVSPHGYVPSTTPQQTNYNSVTTSMNGYGSAAMSNLGGSPTFLNGSAANSPYAIVPSSPTMASSTSLPSNCSSSSGIFSFSPANMVSAVKQKSAFAPVVRPQTSPPPTCTSTNGNSLQAISGMIVPPM

SEQ ID NO: 2733 - DNA, 3112 bp, Homo sapiens
aaccgaaatgctaaccatgatgatttgtttcttcacaggttcttcttgaaatttttcctcaaatgtaaccaaaattgcctaaagaatgcgggaaacccacgtgacatgcggagattccaggtcgtggtgtctacgacagtcaatgtggatggccatgtcctggcagtctctgataacatgtttgtccataataattccaagcatgggcggagggctcggaggcttgacccctcggaaggtacgccctcttatctggaacatgctactccctgtatcaaagccatcagcccgagtgaaggatggacgacgggaggtgcgactgtgatcatcataggggacaatttctttgatgggttacaggtcatattcggtaccatgctggtctggagtgagttgatcactcctcatgccatccgtgtgcagacccctcctcggcacatccctggtgttgtggaagtcacactgtcctacaaatctaagcagttctgcaaaggaacaccaggcagattcatttacacagcgctcaacgaacccaccatcgattatggtttccagaggttacagaaggtcattcctcggcaccctggtgaccctgagcgtttgccaaaggaagtaatactcaaaagggctgcggatctggtagaagcactgtatgggatgccacacaacaaccaggaaatcattctgaagagagcggccgacattgccgaggccctgtacagtgttccccgcaaccacaaccaactcccggcccttgctaacacctcggtccacgcagggatgatgggcgtgaattcgttcagtggacaactggccgtgaatgtctccgaggcatcacaagccaccaatcagggtttcacccgcaactcaagcagcgtatcaccacacgggtacgtgccgagcaccactccccagcagaccaactataactccgtcaccacgagcatgaacggatacggctctgccgcaatgtccaatttgggcggctcccccaccttcctcaacggctcagctgccaactccccctatgccatagtgccatccagccccaccatggcctcctccacaagcctcccctccaactgcagcagctcctcgggcatcttctccttctcaccagccaacatggtctcagccgtgaaacagaagagtgctttcgcaccagtcgtcagaccccagacctccccacctcccacctgcaccagcaccaacgggaacagcctgcaagcgatatctggcatgattgttcctcctatgtgaaagaattgccttgaagaattgtattaatgaagaggttggattctgctacagagagtaatctgatacaagtcccagagtggaacttttaactcaggcctttttaagaggaatcacaataactgcagatttttaaacaaacaaaatcaccgaccttgcaaatactgaaattggaagagggatctgcaagtgcagggtgttggttaaagttgtacctcccaagtatttgggggatatatttattctgtattgacaaaagcaaatccactttttctttttcttttttttttttaagcttaattctgcaatcatttgtcttttataaaccgtaaagctctatacaagggacactataaataagactccatgttttaatttatgatgtttttaaagctgtgtaaaggaagaatgaagtggtgatatttacaaaaaagtaaaaaaaaaaaaaaagaaaaaaaggaaaaaaaaaaaagcttgtatgggacagaataggaatgccagttagattttttagaaaaactaagggtcggcttttgcgccttaaagcatatcaaatggtagttagctcagacagtgcattttcaatatctaacttaacatgccaccccttagcagtgcaagcttatttatctcttttgtattgttgtcttaagcaactgtgtaaataaatgcagcctggaaagttaaaacgcgatgtaagtgatcacatttttccctctactcgaaaatccagtgcctctagacagattgttaaaactgcatatttaaatctgatctcattctctccttttacttaagtcagtttcttctgaagccgatggcctctcgagagcttggtggcacacatactgtgtgagaatctcctttgagacttcatggaacagggtccaggcacagaattccacactctgccctccagttaacaagccaaaacctcacgtacgctcccccatttgcaagtttaaagtttactcgtcctaaatgcagacttcatacctatcttccaaaagttgataaaagcaacgtggcaggtattttcgattttcccattccagatactgcctctatcagtcgacccttaccatttgtaacataatagattgaaacaacaggttaagtgctttggaattaagagttaaagggaaccgggggtggagaaaggaaaagaaggttgagacctccaaaacatagttttctgttctatgggaatttttgctctcattatctgggaagtgttcttaaaaataagaattaatagcaaagatgcagcaaagctctgaggatgcatttgcctgatatttttttctttgctcttgtgtttttgtatgtagttataaatactgtagattttttttttgtgattttttgccaaagttgttgttctatttatacattttaatgtcttaagacattttttcaatatcacaaaaagattttactgcgtattttgcaaagaaaaaaagctcactacctttagcttgcacatacttgcaaagttaattaaaaggctttttgttttaaaggggattttgtaaaatatccatataaataatgtatttatctttcgaatttgtacattgcttttcccttcttcctcttccttccacccccaatttattttattgtgtatgtttgctacgtgaaaagtgcgtatttgtttggtcacctacacttgtattagctgtttcaatgtgatttttaaacatttcatttatagttatttttagtattgttataaaccatgcttcagtttttttaatttccacccaaaagtcattgtctatttttgtattatttgtaagttaagaagttttttccaatatatggcaaaaaaaaaaaaatagtagcatattat

SEQ ID NO: 2734 - protein, 380 aa, Homo sapiens; identical to SEQ ID NO: 2732

SEQ ID NO: 2735 - DNA, 33142 bp, Mus musculus
  misc_feature (1)...(33142): n = A, C, G or T/U
tctacccccagcggtaacagctagctgaggaattgggaggagttgagaggagttgggaggagagttcttctctgccggatgtccttggtaaaattacaattatcgcatctctggctgtaaggctcagaaacaaaaaggccttttgctggctatagagaacaaagagcttctttctggctgtatttttagagatggggaaaacaagcttggggaacgtccaggggctttacctttcagggagaaacgctctaagtctcacagtcttgaactcaaagaattgtgtgattgtcttgtttcactaggagtttctattttgttttgtttttcaaataaacctcaacaaactctgtacaaaactgtctacataaaattttaatggacactcaaaagttataattttctcttttgcatattgttaattctttttctttctctctttcttttccttttctttctttctttctttctttctctctttctttctttctttctttctttcttcttttctttctttctttctttctttctttctctctttctttctctttttttgaatatagggtttctctgtatagccatgtgtactggctggttttgtgtataaacttgacacaagctggagttatcacaggtgaggaaatgcctccattctccagctgtaaggcattttctcaattagtgatcgaggcaaggagggcccagcccattgtgggtggggttctataagagtagtctgaacaagctaggggaagcaagtcagtaacagccctccatggcttctgcatcagctcctgcgtcctaaccttttggggtttcagtggtgatgaacagcaatgtgggagtgtcagctgaataaattctttccttcccaacttgcttctttttttcctttttaaaaatttttctagacagggtttctctggctgtcctggagctcactctgtagaccagactggcctcaaactctgaagtctacctgcctctgcctacccaagggctgggattaaagtcatgtgctaccaatggacaaacaaaattttcagctggaaaatttggagtggaggccagnnnnnnnnnnnnnnnnnnnnaattttatatattgtggtgtttggttgatgtttggttcttgtgttgtttgggggggggggccttcggctatggttgttttttgtgtgttgttgttgtggttgtgtttttttgttgttagtgggttgtgggtgttgtatttgtgtgtggttgatgtatgaaggtcttattttgtgtgttttattttgtatttgttgagcagtggcggtttaattttttttgtggtcgtggtcgtgtaggtgttgtgtgatggtgttagtgtgtaaatcattcgtgagggtggggttgattgggttgtgtgttgaaggaggtaattagtggagtaatagtgtggtgtgttatgttgttgtggtagggttatagttgagttgtttgtgggtgtaatgttttgagttatgtgtgttgtttggtggtagtgtatgtgtagttatattgttgttattatggtggtggtgtagggggagtttttgttttttgtatatgtatgttttgttgtttgtttttgttgttgggtttttttgtttttttttttgttggtttgttgccctagtcggtgttcttgtgtgttgtgtgtacatcttcttctttccgttcgttatgtgcgtttactattagtttcattatactgagtctctttttccattatgtctatctgttatgggggggtttaaggatgagagaaaatagagagaaggtgtgacgttgcgagctgagggacccgcggcgagcgacagagggcaacggcagtgagtgtcagataaaagtaagatccagacgaacagtatcattctccgctcgcagacagaacaacacaccaactgtacgaggaggaggaggatggacggacggagcaaaaggaggaggaggaggaggggatgatgatatacattgaaacctagaccgtgcatcactctgcttcaacaggtttcagtcttctagcattcctcttttatctctaccctccccccccccatttcacactcctgggccactgtcccctagtccttcattggccaccatggccaccacctccttttgattggttcatgcttgtgttccttttgatttgtgttcatgcttaaggatgtagaggttaatactgatagctgcaaattaaagtactgagcccttagtgtgggtttactagtgttcccgatgctagacatacattggtacattgcgccttgcaataaacctgtgccatggcactgtcccaccctttgcttctgttgctgtgatggaaacacagcctttcaagacagacagagcccccgcctctctgaagttcaccttctgatgggctatttaaatagtaaacaagtgaacagatatagaaataatgtcagagagtataacaacaacagtggtttgacagggtggtgtaaacagtggggtggtcagggaaagacaggtcaaaagatgtgacagtagctgagtcagggaaaggaagagtgagccatcatccagaagacctgaggcctccactgaagaaacagagagggttcagagccttggaagaaccagctggatgctttcataggcagagagagattggaggtgcctgtggaggggcggccgggagagaaaaggttatacctatacgtctttggatctggattctggtgacttcagctacatcattcctaaatgcttggatagaaagatgacaggaggacactggatgtgctgtctcaggggactcccaggctaatcaacacatgatgtcagcacaggatttataaagatgcatatttctatttatccagggaatcacaaagaagaaatacacccagaatttctaagccctgtgtctaagcacatggactagtggttaaagcagcctgactcttcacttccacctgtggcctagttagcttctcagggccttatcttctcattggaatgtgaaagttcagaagtgctaacgtcataactgcagcttgaaatgtgcaaaggaatgaatgtcactgccactgcttcttagatgttcagggttaggccatttgacagctgtaattaaccaaagtgccggccaaatggattgttcctgtttcaaaaattgctacagtaactttagagaaaattaacaatatttgcaaagtagaatttcaaaatcttaagacaactgagtattaatattttcaactatcataaattaaagttcacaaaatattcacaaagaaggtaggtactcttttcttatttatgaactccaccctttggaaactatcatcagcaatagtggtaaattaggagggtttcccaaaatacccagtgattttaatctgacttgtttttcctgacatacagtggaggatccagttattctgggacggctttgggccacgcttcctgtcccagtcactcttgtagaattaggctgttcatcttgacattttggcatcttccttgtctacttcacgagttcctcagaacagtggcatgtgactgacactgatcttgtgtctgggaggcttgtacccttgcacggatgtgacacaacaacgcaataataatgtgagcacttgagaatcattaagtcccaatgcagaccgtgggagaacagtcctctcaagctaaacaaaacaaaagaacaaatcagtgagggttgaaaaaaaatgtggaggtaattttagattagttagatgatagccacaaatgtgcaaaatctggtgatcattttctatatccaaccaacccaactaggcttttttgtttgtttgtttgttttgtctgttttgttcgagacagggtttctttgtgtagccctggctcctggaactcactctgtagaccaggctggcctcgaactcagaaattcacctgcctctgcctcccaagtgctgggattaaaggcatgtgccaccactcccagcctaactaggctgtttttaaagattttgttgttactacatatgtatgactgtgcctgcatctacatgtgtgcctggtgctcttaaaagtcataagagggcatcaaatcctctgaaactccaattagagatggctgtgagctgatagaatgtgggtacttagaaccatatatgagcttttgtttgtttggttggtttgcaccctgaccccccaacaaggtctaactgtatagatcaggctggcctcaaactcacagagacccacctgggtctaccgcccaagtactggaattaatggtgtgcagacattatgtccccccaaactcaggttttcttttttttttttccattttttattaggtatttagctcatttacatttccaatgctataccaaaagtcccccatacccacccacccccactcccctacccacccactccccctttttggccctggcgttcccctgtactggggcatataaagtttgcgtgtccattgggcctctctttccagtgatggccgactaggccatcttttgatacatatgcagctagagtcaagagctccggggtactggttagttcataatgttgttccacatatagggttgcagatccctttagctccttggctactttctctagctcctccattgggagcccgttcctccattgggagccctcaggttttctataagcacacagcaagtatttttaatcactgagacatccatctcttctggccctacagtaacgcttttaaataaaaactgttcaagtggatagttgatatggcaactgtgtgatactctacagtagggaatcataatttgacaaaccacttacatgtgctttcattgctaccagtcttttctttaagatgcaactgtgggattaatttccagaactgagatttgccaaacagggttcatatttaattgtaatttgtagaaatggggaacattcccttttccccttttcttttcttttcttttctttttttctttctttctttctttttttttttttttttttggttttttttttttttgtttgtttgtttgtttgtttgttttcgagacagggtttctctgtgtagccctggctgtcctggaactcactttgtagaccaggctggcctcaagctcagaaatccgcctgcctctgcctcccgagtgctggcattaaaggtgtgcgccaccaccatccagctacattcccatttctaaattgatcatccttccccagtccctcccaagacaaaaagtggaaggaattcaaataacccaaaataaatggatgaataaagaaactttggtatatacacataatggaatgttatttgaccttgatggacaggaaatttaatacatactatatacaacatgaaagaacctataagatgacctgttgtgtggctgttaaaaggcagaatagctggcagcatagtgctgacctacatagggtataggctagcttaggctacatgagactgccttaaatagggtataggctagcttaggctacatgagactgccttaaatggagccctacacacaatacacacagcacacacaacacacacccctcgcacacggacactcgcaggaagattccaagctcacacttgaaggattttgatggctccaggaaaaataatagaattaaaaaacagtagaatggcgttttcaggggttgagtaaagatggttgtcaggttagtgtttgataaacagttttgtctggacagatgaaaagggaccaatgggccaggcattgtagtgcaagccggcaggcaggtctctgagttcttaggccagcctggtctacacagtgagttccaggacagccaggactccacagagaaactctgaaataccaaaataaataaataaataaataaataaataaaagaaaaatattttttaaaaaaaggaggcgatgggggaagaggaggaagggggaggaagaagagggggaaaggaggtggaggaggaggaggaggaggaggnnnnnnnnnnnnnnnnnnnngaggaggaggaggaggaggaagaggaagaggaggtggctctgctccgcctagagatgaacgatagtgaaagcggtacagcactgtgaatgtagttaatgctacatgtacagttaacatgcttaaaataaagattggaggtgtaactcggtggtagagttcttaccgtacgcaaagcccagggtttaaattttaaaaagaaaatatttgttaaaatgatagatatcaagtataccttaccacaaggttggtactgaagaggtagcattacaactgtgagagtgaccattactaattacttttccttttaagtttcgggaaggtctttctttcatttgtattttgtagagaacgtcttgtaaagtacgaatttggagagcacacactgctgttttgtttttgtcttgggctaaaaagttaccatgcgcccaacgtggggctcgaacccacgaccctgagattaagagtctcatgctctaccgactgagctagccgggcgctgtgtgaaacgtagttttattttgccaactctatgtttgaaaaaaagtcagtcctacatttgaggctgtaaccagaatttgatagaattcccaaaactcagaaatgtaaaaatccagccgttggcaccagatcatcccccttacttcctttcattttctgtttacttttttctaccaacaccagggattgtgtgagtgagattttttgttttcccctcgctccttccaccgcgaagctcacagagctgagaagaaaatacacaggtcctaagatctcactagattgcttaccctcaaattttgtcgtgagtagtccgtagctgggagaagcgaagctcttcctaataaaccgcgtcggctcaatccttttcttttggggtgggaggaggcgggtttctgcagctgttggctgtttgtaaatttagaatgtcaaaaaaaaaagactatgctaaaaggtaggcggtagccgtttggagatgccggggatcgaacccggggcctcatacatgcaaagcatgcgctctaccactgagctacatccccactcactgttacagtacgctcagaaatgccctagtgattgcatagtgtgccgcttggctcctaacagcagcttgaatatagctgtttagaaatcacaaccagggggagtgggnnnnnnnnnnnnnnnnnnnnggggtatgggggacttttggtatagcattggaaatgtaaatgagctaaatacctaataaaaaatggaaaaaaaaaaaaaaaaagaaagaaatcacaaccagtcattggctgtccggagtattcctccgatcctcactaacaaagttggtcatccccctagagatacccgagggcagacagattcgggagtagaaactgagaagagggttggaaaaattgagagagacttactcatcaggcacttaggacaaaatagaaccgtgacccgaaaaagaaagatacgtttgctttttgttttaaatgcaagataatgtagtaaaatataaaatgtttaaacgaaataatgaagttaagtgctctaaatggagtaagtgcataggaggtgggcaggttttccagtgctcgatgttgttgttgttgttaataaaggtttattcatcttatgtaatgagtgttttgccagcatgtatgtatgtgtactatgagtgcctaaggaggtcagaagtcactccatcctctgtaactctagttacagttgtaaacaggttctgagaacctggatcctttctgtacttacccactgaaccatctccaatccctacccccaccgccaatcgtaaattgttgtaaggtattcaccatagactcctgctcagacatgggtagaagccaatagaacgtctttatttgtcatctgactactacactgggtttacaggatcccagtgtagccccgagcccttctcagggtgagcttttaaatacacaagcatggtctgagttgacattcttcagttaaccagaacagttggccagaagcagatctatagaagcaaggttagtacatttagagattttcctcagagcgatgcagacttggatggattaggtctttgctttagatggattaggtttttggcaggtggtgctgtctaaacgctgagtgtgacagcctgtaatggcacttccatcatggagtcagttgtgctaagatctcagggcctattaagtctgtggccctgtaacaaaatctgtgtgtgatggtctgtaggcttcatggataaagtagcatttgagaggaggcctggagacgccgggtatcacactgtacagattttggccagaagacagatcagcgagatgagcccagggactggctcgctggtaaagagctagttgtgtgtctgggtgacagtcgcaggtcaaccataaactaatcaaactgcttcaatatggtgtccccgtgagtcaggtgctctgctgtatactcaagaggtctttgccacactggattacatattgtatgtgaatgagagatttggatagaaaaagtgaccaagttaaaataaaaactgcaaaggcataagcgagatacttgagagttccacagaaaaaaactttttttttttttttttttttgaagctgggtttcatataacccaagctgaccatgggggatgggatggctatgacaagggatgaccttgaactcctgaccccgtgccctttaacgctgtgatttacaggtctgtgccaccaggcccagcaaataacacatcaccgaaggtcctcgatgtcatgactctgagttcttggtgaaccagaagagccttagctcaccatcagttgtcctgtgcctgaaaccggtggccattctttagtccagggattcacttgtttcttcaactgacctaataatgttccttatcttcaaaataattgtaggtgagtttgcagaaaatttaaaacgtcccatggtggaagaggagagtcaagcaagagccttgaggttattatgaagacttcaacttctttcctgggagttagcagccactcactggtggggtttgagcagagggctctgatggatactgtggagacatgggctctgaaagggttctctaaagttaaaaaaattttttaaaaatggaagcgattgtagagtgtggtgactgaggccgggggattgaaccagggcaaggagccgagtgggggactctagaacccaagaagaaagtaggaggtcatagaccggagagaaatggaggtggtagcatcccgagtggcgaggagaaaatgctgtgaggaaggacagacacaccagagaggtgaggtttgcaactctcggttagaattgggcgagtggatagagacattgacaagagaggttttgagagaggcagagaaagaagcttgacccaagtggcctccagaatgaaaggatagaaaaactactccaaaaacaaaaacaaaacggtccctggaacccagctgtataccagctggggagagacagagggatttggggtaggtgtggattctgaatgaaatgagggtaaatggctgtattacttgttcaaaattaaagggataactgtaagagatgatgtagttacaaaagtggacaaaaggccacgcttgggatgaggaggtagagccaaattccagaccctaagtttagctcagcgcagtgccaggatgagtcggtatgcggggaaccagacaccttgtcccgggagccaggcctttgcccctgtagggcagggtcagcctaggtcagctactgggagtggagcccagctggccttgcgcgctcacctgtccccgacagttccctactgctgactgggccatactgggcggcctagaaaggcggtggaaggggggtcgacaaaagggagatcggggctagggtggtggctttgggaacccagagaaagggcagcacctgcctccattctcagctgggtgcaccctcggctcacgtctcagcttgcccgctgccggccccgcccctcctcgcccagtgggtactcggagctcagcccagcttggacagtagcatccagggacctccccaaagccacaagactcgaatgtactaaggacacggatggcgactgtggggccgcggaccgggccgaacgcaggagccgaggcgctggccctagcggcagagctccaaggcgaggcgacgtgctccatctgcctagagtttttccgggagccggtgtcagtcgaatgcggccacagcttctgccgagcctgtattatgcgctgctgggagcgtcccggagctgggaccggcacggcgacccgcacgctgccctgcccactgccctgtcctcagtgccgcgagcccgcgcgccccagccagctgcgacccaatcgacagctggccgcggtggcctcgctccttcggcgcttcagcctgccccccaccgcccccggggagcgcgggactccagcggtgcctgcccgggcggcggctgcgcggtgctcccaacacggagagcaacttaagctctactgccaagacgacggccgcgccatttgcgtggtgtgcgaccgcgcccgcgagcaccgttcgcacgccgtgctgccgctggaggaggcggtgcaggaggccaaggtgggtgcaggatgtcccggagccctggctctgctccagccctcccagctctccttgcggactgcaggcagggtcctacagaaaagccccggtctcctttttctctttctaaaactgttttcccctcatctcttctcgtccctcagagcccgatgcctggaggcctggaagatggccccagggacttgaaatcttgtctgtccccaaccgctaatgtaactctgcccaggagaaattctgtttgtcacgcccacatatccactgccacactcctactgcgttcccaggggcgtggcactacacaaagtaccaagttcaaagaggaagaacacagaatagcgtcctgggttaggtggtctgtctgaagggctgtgaagcccattggttctgggcatcttcccttttagtctgtccctcgataggctgcggcacaagaggcgtgtgcagctcccagtctctgctgccctgttgtgctccagccttcctacaggatgagaggagagctgaagataagatagaccgaaccaaggtgggagtctcgattctcaccgcagaccacgtgattgatgcccttgaggaagtgagactcccggacctttggagttcccctgcatttgttctgcaccaataggcttagtctgcaagtctctgttcaccccatagccagagatggtatctatccagtctcctgctcctgagagcagaatcttggctttctcctggatggttctaggaaagtacacgagagggtatccagaattttctgaccacgtgtcttccttctaccacaggagttgctggattccaggctgagggccttgaagaaggtactggaagactatgaagcgttccggtcaacagaggagagggagagcaaggagcttctagtgagtccaagtgtgagaagcatagggttgtggatgaccaaggcagagagagagagagagagagagagagagagagagagagagagagagagagagagaatatggttgaaacagtagggtggatttcagaaagacaatatggtatacattacagaggttgactatataatttataatataaactagagctgttcaattcatctttagggtgcacagtcattcgtaacaaaccagttaggacctgtagcagcatcttgtaatttgaatgcattagcatttcttcacagaaacacgtcatattaagtaggaacatacggtgaggagccacacatgcctgaggcatgttctgccacaggaggaaaaaaaacagtgaggaaaacgttttgttttctgagctttaatttaagaattagaggtttctggctgggcagtgggggcacattcctttaatcccagcacattgagtcaaggccggcagatcactgtgagttcgaggccagcctggtcttcagcatgagttccaggatagcaaaactgcacagagaagccctttgtgctgatgctgaggagggatcagagctgttcctggcagagcactgtggcttggggacttgttttggttactatggacaaacacgagtcactatcattttctacctcacaaattcagttcttggctcaaaggtgcctgagaatgaaaggaggaaccacgagtgccttttaaggcaaggtcatttgtttatgaaactgggatcagaggggaggcctggagggaccctcttatgctttaaaaaattatctatttacctatctatttatttgtgtttctatagttgggtgcatgggctactgtctgcctgtaaaggtcagagggcaactttgtgtcagttcctgtcttctaccttaaggtaaattctagggattgaactggggttgccaggcttatgagccaaacagctttacctgttgagatatttatttcaccagccctaagcccttaggttaggaagggaagcccatgaaactcagatacacaggctcctttctgggccctatgtggttgctattattgttctgttttgtttgagacaaggtatctctctatagcccaggctaccctgaaacttgctacatagaccaggctggcctcagacctacagagatccacctgcttctgcctccttagtgctggattgaagctgtgtgccaccatgcctggccctccccttatccttaactgcttttatatctgtagctattggacatcccagacttttacatctgaccattcatttcctaaagcagagttcacccatccagacctttgttccacctctttggtttgcacctgtgatgaagaggacattctctatggcctgggtaacatcgaagtctctgactctcctccccaggacattgtttagcacatgccatctctgtcctttgccaaaccctcccctaacctatccaaagcagggccttcacagccaagtcagtgctctaccgctgagccatacagtcctcgttctgcttgccatacagcaacaggtgagcctccctctgttgtcctactcaacacggtttttacagttgtacctacagtatgggctggaagggggcggataggaaggggagagtactttcacccgaaagatgcccttaccccagaggtcacccagtactgctagaggctttttagttgccagcactgtgagtgttgccactgaccaccccagctggatatgggggtccctggaatgagggttctcgaaagctaagtgggtaaggattcggcagtgatgaacaaaaaacaaacacagaggcagttagaatctgagtgtattttgcaactctcaagcagaagttttcatacattaaaaaaaaatatatattatagctcctagaagatgtgttcagtgagtgaagcaatcacaaataccatcattatcatttggcatagtaaagcacaaaaatcaagcaaacatcacaactcaggaaagatgtactcagtgaatcacaaacagaacaggtgacatcatgattaatagagatcatccaagcattacaactctgaaagggtgcattcagtggggcagtcatccaaggctagaggcctatttccaagagcaggttaataaatctttatggtcaattattgtttaacatctaatgcctgattgtttttataaatcttcaatgggtgaatttaaactatgttaattctttttatttaaggctttccttaccatatatcaaagcctacctgatgacacacatgtagccatatgaaactttattgttgggaaagtttttaatctatcataacactattatataattttgtaaataatttataaagagttggtttctccagggataaggtcatgttaatgacccccatctcaagagatggcttcttaccaattattctcgattaagattgtggcctcggctaccaggaacatgtcgtaaataagaaacggaataagagaaaaaaaaaacagataaattgctcagtatgttgttctgagcaagagttccacacccggtcccaggaggcctctttcttttgaagtcttcatatcagtctgtggaacttgtgacacagattctactggggttgatgtgccagagtgtcacttgcatttagtggcaggggtcttaggtgtgttagatatcccagaatgcagagggaaaccctcagagccaggaattatctggccccaagtgttgacaatggcaagattgggacacttctgtttacagttttcttgggctgttagtcacaatatatcatcaagtgtgtgctttttaaggaatataggcctggtggttggtggtggcctaagcagaggcaggcagatctctgtgagttcgaggccagcttggacagagagccaaggctgtaaaaagaaaccaaaaaataaaaataaagaatagaatttagagtttagctgggtatggcagctcaccactgagttccagtgcttgggagactgaagctgacggttatccatgagtttgaggccagcctggtcttcatagtgaattccaggacagccaggattatatagacaacaacaacaacaacgaacagttatttagtttacagttctggagggtagaaagcctaaaaggatggtgcccttagctgctctgcacttcatgagacctttcttactgagccaaaacaaggcggagggcaagacagagagagtatgttctcagggttttcactgccctgttcccttccttcctctctcccacctccagtttttaaaggtggtgttgttacccggtgtcttgtgtgccaggaggaaagagagagagagtacgccagtgggctggtgaaacagcaaagccttttatcatttatgccacaagtcgggtcactgctggatcagggacgccaggcaaggggctgaagctgggtttataagcataaaacctgcaagcgcctgtgccaagttacagttacaattctcaccaatcagaatttggagattggggactttccctacgcgttcagtcattgtcaactgacacagaatgtaagctttgcagtccaacagattcatccgggttttgttttgttttgttttgtgcttaggaacaggcactgtgttttgaggaaccattgttgctttgcttgtacccaacagtgtctcattatgtagctcaggttggcctggcacttgctatgtagtccaggctggcagtgtccttgcagagcctcatgctcctgggtgctataattacagagcctcaccaccaggcacagacaagagagctgctctgagaaacacttttgcttgggttgttcccttgggagtccatgctatagagttagcagaagtgcagactttgaattcagaccaccctgccttagaaccgtagcctaataggtatgaggatgggtttcctcgccctaaaatggagtaagaagtgtgctgacctcattgggtcagggtgagtgaacaaaagtatctttggccgcagctgtggctgctgctatttaatgtgtgtttctattcaatggaaatggggcaggtatactgtgggaagccttgagacccatgatctgagcccagggctcctgactttacttttctcacaatctctcttcttcccaccttccttcctctgtaatagcctgggaaaggagcttccatacctgagcttgccctgtgaggacagggtccttacttgttgatagccatgagagtccttgtttactatattggagttttgctatgcaagtgtgtttatataaaccaagtaggtaaaggagtgcatctagacacgagaggccctgaatgtgataattcaaagattagaacgtcgagtctgcacagcgcattcactcggtgctgcgcgagcggctgtgctgcacctctgctaacaggaagctttcttcttctctccttgcacctctggaattctgtgttttgagtttacatttctgcttgtagtcagggtgtcccaggagaggagccaaggtgcaaaggagaagtgagacaggtgcagtggacccttgcagctctgactgactgactagcaatcagactgcgtccgctcctctgagtgattagtaaccaggtgcctctttatttatacacgtctcacagagacagatcaatgattatctgagaagtacaaattatgtgttttgatttttcatcacatgtttgatgttacaaggccactcacaattagaaagtacaaaaaggacagattttattttttattatcagccctgtaactccaatttaaagaatctaaagaacgtctcctccaaagcaaacgtgattataatacaatggtcttctttcaggctggcggtgtttgcagttttaaaacactccagacaaacagaaaaagtctggacaggtctttttctgggtagcaaatactaatatttagcagcttttactgtgttgtttcatcatctaccctataaagcagggaacctatattgtagtctgtctatctcgtttactgagttcaactcttccatggctattccatgtatgaccccctatctttacagttccagagagttctaaacgtgttgaaaaaagaggcctcagatctgtaacctattctcctggccagtcagtttatcaatggtctctttttactctgcaccaagtatactgtttgaatttgcttaggggtggataccacagaaagattcctggagtaatacatggccttataaagaaatttctagctatgtgcatatctgtgtttaatgatcttcagggcataaggaagactttcaaatagcagctagttaatattgtgtttagaactttccttaaaagattcaggtataattttcttgggaatacacataaagtgagtcctaatgcagaaagtccctaagaatgcagtgtgtagagccccagcccctaaacggagagacagagagatcgtcagcaactgcagtgctcagctaagctttgctggaactgtgtcagacagccttgctagcttaatgactcaccaaaaggctgtgccacctttccatcagaattgaagccaaaatagcgccttaaaaagagagaaagaaaaaaaaaatctgggtttagttacgcttcctttaatcccagcactcgagaggcagaggcagaggcaggtggatctgtgagtgcaaggccaggctgttctacagagacagtttcagaacagtcagggctacacagagatacccgtcttgaaaaacaaacaaacaataaaaaacaaggatggaccaggcacagggacacacacctttaatcccagcactgaggaggtaggcaggtatctgtgagttcaaggctatcctggtctacagtgaaacctccagaccagccaagactacaccatgaaaattcatctctaaaataaaataaaaatagggtgaaaggtgactaaatgaatatatagagaaaggaaagacaacctttgatttagccttcactatggataaattaattagcacactaacttatctctctcattttcttttcttttcttttcttttcttttcttttcttttcttttctttcattttttttttccaagacggggtttttctgtgtagacctggctatcctggaactcactctgtaggccaggctggcctcagaaatccacctgcctctgcctcccaagtgctgggattaaaggctggggccaccactgcccctgtctctctcatgttttacagaaggaaattgcagcttgaagtagttgtgaggagttgaagatgctcaaagatagaagagtccaggtcttaagagacgccagagaacgtgtgtggcaggggagagagcagcatgtgttgaggctctggcttttacagagttgggctattaatgtacagtatgcatgcatgggtgtgtctcattggggaagcaaccctgacctggaggatacctgtcttaaagtcctgtcttaatgtcatgcccaagtgccttcccctctaagtcgtgtgcccacatctcttcccgagacagaagcagatggcagcagagaaagagaaggtaggggcggagttccaagcgctgcgggccttcctggtggagcaggagggtcggcttctaagccgactggaggtgctgtcccgggaagtgacacagaaacagaatgagaacctggcccagctggagggtgagatcactcagctgtccaaactcagcggccagatccaggagacagctcagaagccggacctagacttcctccaggtgacgctggctcagtcagagccttgaggcatttgcccgaggtgttaggaaacactgctggagaacaaccagaccctgggagaaagggaagaagaggaaggggtactgagtctcctgggattggaaggctagagacgatgtgataaaatttaatgattataagccattatagtttattttacactattctagtctacacacacttgagtccaaagtctctgaaaacagtccttactaagttacctaaaattcactggaatgtgttttctgatattctattttattaaaaaaaacatagttggggctggagagatggcacaacagttaacagtactggctgtttgatccccagtacccacctgtgaaaggaccactgttccacacaggacacaccaagaccaagttctcagcacaaaggagattcatttgtccccccgagggacaaaggacaggaaatgagagacagacaaagccaggagacagagggtgagggagaagggtaaaggaacaaggaagaaggagaagaaatatttgccccagggacaaacgtctgcctctggatagagaggaggcaaggcctgaggcaactggcagtttataaagggaaagggggaaccccatttttaggatgagttgatttgttttgagtgggcatgttaattaggatagccaaagagagactttttaattgttgggttccaaaactttgagagttgaaccttggtgatcagctctaggaggaggaagtgaccaattatggaacagaccttagcttcagggatgcagtctatggtttacaagggagaggggatgggggaaaggcaagccctgctggagcctgtagagcctttcaacctgtaactccagtttcagggagtctgacaccctcttctggcctccatgggcacacatggtgtacagacatacacaaacacttttataaataattaattaaaaaaaaagtcaccaggggctggagagttggctcagcggttaagagcactgactgctcttccaaaggtcctgagttcaaatcccagcaaccacatggtggctcacaaccatccgtaatgagatcagatgccctcttctggtgtgtctgaagacagctacagtgtacttacatataataaataaatcttaaaaaaaatagtcaccagaccaagcatggtagtatacacctttaatcccagcccccaggcaggaagcaggggtaggcagagctctgtgagtttgagatcaaagagtgaattccaggacagccagagctacatacatagcgagaccctgtctcaagaaaaacaaacaaaatccagaacaaacaacaacaaaagaccaccagcatattcagatagatttcacaagccacaaaagagtcaagcatgaaagacagaacgacagaaaagacaccgaggcgctgcccagtgtggtggcattcactttgggatcccagcactgggaagtgggagtagaagtatcaggagttcaagaccaccctctgttccaaatgaaattttgagaacagcctgagcctgtgagtctgtctcaaacaaaacaatacaccagcaagacgttgtagcttgtgtgggctgataaccatgctaacagtaaacactgggtcttgttagaaggctcagggaggattttacagtaaaggctttgcatatctgagagggagggagcgttgaaggtatcatcactgtgataccatccagtagccagccacagctggaagccactgtcacctgtgtttagtggggcatggcttattttctgtgtgtcatgctttctccaaggcgatagaggttatatgatgctgacttgattttcttccatgttttcttccaggagttcaaaagcacactgagcaagtgagtgaacttcacgcttcctagggtctttccactccacgttgctttgctctcccctcaagctttctctttttatcctaacatcatctctctcctcctgacccccaactgctacttccttccctgggtaccctttgaggcaaaggcccacttacctagctgtgggaatccctgtgtaaagttggattttctgttttctctcaactgggagcaacagggaagagggagtggaggggaatgaataagattgtctgctcgatgaaattctcttcaaaggcaattctccaatcatgtaaactccctaccacaagccccacctcctaaaagatgggatatcttctaatagggacacaagctggcaatcaagcctttaacacataggtctctaggattacatgtatctaaactatagcaccggcctaatttccatagggcagtaggagtggattggtgttctcgggactttctctggggtcttgtcctgcaggtgcagcagcgtgcccagctccaagccaaccacagtctcatctgagatgaagaataaagtgtggaatgtttccctcaagagtttcgtcttaaaaggattgctgaagaagttcaaaggtggggctctgggtgtgggctggctgcatagtgttgggtggaagggtgggtgtgctcctggtagtcatgggatgtaaggctgtgtctttcttgaactgagaagaggaaacaggagttggagcatagtaaagccagattgggcatcctgcttcctgtggggatactatagaagaatactgggggcacggagaagctaaagggggaggggtcaggtcagaccagttctagacaatagagggagagggggagctagaacacttgggggggggtcgcttccatatgttcccatcttggctccatacgtgtaactcagcctctggagtatctggagtatctggagtatctggagttgtaagtgagggagaagaggaggttttctggtcgggcagtgtcccacgctgtgcactttggctctgctttgtgtctctgtagaggatctccagggagagctggagaaagaagagaaaggtatgaagtgtgatcgccactgtgagtacaaggctgaccatgtaggcaacctgcttcctgccagaggtggtatctcagggctttacaagtggttgactctgtccgtgcctgtccacctcagtgacgtttgttactctgcccccatcctaatccatgattgacatctttgaaccctcaggtggcagtggagccctttggttcataagcagagggtggtctgcagcaggaatgagttggcctcaggttgcttggggcagagaaatctcaatatcctggatgaacccactcttacctcgacatctaaacaataaagggcctctggggttgggggttatgtgtgtgtgtgtggtggggaacatgcacaagaaggtaggagggcagatcatagggttctaagaatgtggctggttatcttgggtaaatgatgtcactgagtgctggttttcaggtgcagcctggggtgtagtggggatccccactaagctacttttatgtatctaacaggcattaaaaaaacaaacaaacaaaaaaaccaaaaaactacagtcattacattctcagacctaagttcaggctttctttacatccaggctccacaattattcttgaaatcagatttcctgacctgctcaaattgagatccaaatcaggcccgctgtatttcttaaatttaaataaatgtctgttgaagattttaatacgcatttgttaaattgaagaaagagaaaaagaagaaagaaagaaaagaggagaaagctaggtagctaatgtggagggaggagtgttggcaggtgacaagaagggaatgtaccctgattgtagaggcagcagtgtgtgtggagacatccttcctttttctctctcctcagtggaactcactttggatccagacacagccaacccccgtctcatcttgtccctggatctaaagagcgtacgtctaggacagcgcgcccaggacttgcctaaccatcctcgccgctttgataccaacacccgcgttctggcatcctgtggtttctcctctgggcgacatcactgggaggtggaagtgggctccaaggacggctgggctttcggtgtggcccgggagagcgtgcgtcgcaagggcctcacgccttttacccccgaggagggcgtctgggcaatgcaactcaacaatgggcaatactgggcggtgaccagccccgagaggacacagctcaactgtgggcacttgtcgcgggtgagggtggcgctggaccttgaggtgggagcagtgtccttctatgcagtggaggacatgcgccacctctacaccttccgcgtcaacttccaggagcgagtgttcccccttttctctgtttgttctaccggcacatacttgagaatctggccttgaagagctgtcaggcttactaggaggggacagggcagcggtgtatctcggtgagaccgaggtactttatcttggaccttccttcacacccctacttctgctgcccaagaaggctgccagagagcacaacacaggcgctgaagactgattgagcaaagaggccctgtgggtaacttcgcgattgcacagcgaagagatgccttggacccttggtgcctgctggctcctgtaatgttcctgcaaattgtgtctgaactatggagaggcatggctcactggcataaaaacccagctttaagcaaggctgcttcttaccacaagggcttactgccttgatttagaagggtcccctgtttacacagaacaatgtcaaagactagtccccttgcaaagggtgtggtttgaccctgggcccatcatgtattactttacattttgtgacagctgcaggctctgcctggagaggtcgttgagtcccttggatccagctggccttcctggattgtttattctgggaggagcattgtgctccccaattagaagccagtctggctggatctgaaaggagactcatgacttatacaagaggccagaactatagtatatacatataagcacattgccgttctccagcaactcccccccccccccccatggcttctctgtgtagccctggctgtcctggaactctgcagagcaggctggccttgaactcagaaatccacctgcctctgcctcccaagtgctggaattaaaggcgtgcctggctctctccagcactctttggggcatcctttaccacattgactgccagtgtggtcacagatgccttaagcctcacattttcctttggctaaggagatcagaggttctggaactgtgaaacacatgttgatacttaggagtttacagatgcagctagcacccgtgtagagatgcacacagctcaagcacagtcttaacaaaccctttctggaacgttctaaatctatgcaaacaccagaacatgctggtgacaaggattcctgagcatctgccctggagggggttgggcaggccagcctccttagcctctcctctcaactggcttttgttccatagtgtccacaaagcgaggcaaagaagggcaggagtgggctgttccctgcttagtgctctgcttggaagtgggagaggagatcgaaatacagattgtgagcacatttctaggggtgtctggactcattcttgattccatggtctgactgaacgaggatatgtcggagtattggtttctgctagaataatcccaaatgttgtgcatttgggatgtgtgagctcatgtgcttgtatctcagatttgggatgaaggttacaggagagggcgattatgagacactgtgtaggggttagctgttggaaacagacatccacacaaaaacagtttactgtgaaatcatgaggaccagagttcggatcccagcacccaaggaacaggcagcatgccatgtaaagatccaggtctccagcttcaagggatatggtgccctcttttggccactgtatgcacacctcagagtctgtgcatgtacatatgtatgtacattcacacagaccaatgcattaacaaaacaaaacaaaacaaaacaaaacaaacaaacaaaaaaaccaaccacagctttcacttcaaagggaataagagatagtttattctggtgtgaggacatgacagccagcccaaacctgagggcactgtgttgttattgcctgcttcgtcccagtcaactagtgacacttcccctagagtgcttagatctgtgtaataatttacatccagcttccctgtgatggtgaaagaaactcaatatggtaccaggtaactcttaagggccactgacctttgcccaggaatgccctgagatcctagtggcctgcaggtgagataagagaaagaggaatggagcttataaaagcaggtacttctggttttataagctccaacattgccgtgggactggggtaagtggtcttttcattactgtacaagaggaatgagaaacaactgagggggaaaacaattttcttgcccagctacgaattctgtagataattatactgggcatctttggtgtctgcctttataaacatttcctttagctctctctggcgcagcatgctgtttgactctaaaactgcctcctgctagcagtgagaataaatccattgaatctaaatttgattgccacaacactggagtcgagtttaagtgattaggttctgggaacagttttaggtaattccaaatactgtgtttttaaaagataaagtctcactctgtatctttggctggcctggaactgtttatgtaggccagactggccttggactcagagatcctcctgcctctggccctgggattaaaggtatgtgccaaccatgctcaacttgcatggccttttgatgatgattaattcccttcgcatcacttaatagctatgcttggaatgacacaatattacatgtcacaaaaaagtggcttgttgggtgtaggcgtcccatgtgaggccaggactgagaacggtgggtagctgtctgtagtgtatgtgcttgtgtctgtcagagggtggcatttgtagagtaattatacatttctgtataatagctataattcgacaacagttactgtgacaattacttggctacaggacaacttagtgacttggctacacatgctcatatgagactgtgtgcaccaccactctcaccttttgggcatcgtaagatctccagcattatcaggtctctgagaataactggtctaggcgccaaaaatccaggactctgaaccttatcttcacagaattccagcactcaaatgaagggcaggcccctgggttgtacaacgagtgagccagccatcatcagcgttacagaaaccttagggccggttagccaccaggcagagggctatggactgccgccacttcttgttattctttcagattaggactcttgtcctcccccaaaccttcatcttctctgacctcccctcagggggctctgaggggccatcacaaattagctcactgctagcattaagatgcatcataagagttggttgtccttttcaaatttgcctgtgagtatggtgggaccaggggattctaggtctttgctctctactgagcacgtctgctgctctctactgagcacgtctgcagaacccgaccactactgtcaccaccaggtaatcaatatttctgacttggcctctcacaggacagggtcatcgattccttcccgtgagcattgtctgaatgttgaccttgattataagccttgattgtaatcgttgattacaacatcgttccctgttccttcggcagaccagggcactcctcgtagggaccgttccctcgctcacacggcaggtacaactcggaccagttttttaaaagtctctttccgaatactcacgttccttctgttttatctgtctcggtggatagtgtaatcctgtcggctgctgccgctactcggttgaaagactaaaattagattttatcatttttccaatttggcgttagagtctgcggctgcgcaacgattgtgattctgttaactactcgtgcacaagagccacatttgtgactggctccatagctcaggggttagagcactggtcttgtaaaccaggggtcgcgagttcaaatctcgctggggccttaaggttactttttcaccattatagtccaggaccagaacatgaagaggaaatgctggaactgtgtttctgggtctgttcttttgcttctcatgaagccgcaacccagagctgaattcctgtgcccttgaaatcagatccactgcaaatttccctatcatgatcatacctccagtgctatttttccctcgctgttccttttctgtactctcttattgaggtcactccctactcaacgcccctgtcgtcccaatcggctaggctgtcacgcacttttatagctcaaacccacttcccctttctggacggagagctttgcaccaatgcgccccttcgccactaggccagcctccgcgtctccggcaccgctgggcaactgtgtctgcggttcttgttgcccgccagtgtggcgtgtcgcgtcgcgggactgtaggtctctgtcacctccgcgtggaattaaagaaaggaaaatacaagtaggcgctcactttcctaacatccggctggcccaacgactaactttgttctttccacttaatcttttaagaaaaaaacctcaatccataactaattaagttcgttggcaaaagtaaagtgtacagaatgagggcaaactctcagttgaattcagtgtggttgtcgtgcaagggccaggggccaagtttctgaagaagtttccctggggagacatgaacgaacatatatattcattccagaaagggcacaacgaaagacccagcaaacagaagattctatttatgtctagcttgacaaatgtgctgcgaagtcttgtgccagcttgacacacaaactagagttacccgaaccttaattgagaaaatgccttcataagatccggctgtaagacctttttcctaattagttactaattgggaatggcctagcccattgtgggtggtgccatccctggaatggtggtccttggtgctacaacagagcagactgagtcagccatggggagcaagacgcaagcagcactcttccatggcctctgcatcagctcctcctgcctgcaggttcctgccctgtttgagttcttgtcttccttcagagatgaacagtgctgtgcaagtgtaaaccgaataaaccctttcctccacaacttgctatttggtcatggtgtttcttcgaagcaaacagtaaccctaactgagacagcgaatctatcagtttatggggattgcttccaggactgtgggtggagggttatttgcgggaacatatatgattcgaaaacagctgcatctctgaaaaacccaccccagcagggacagtgagtgacccacgaaggttacatcccaggagcgccctagtgtacttgcaaacagctccaccagagtccaccccagcgacagcttccagtttttatactcctagggagagaggctttgtgcttcttgggcctctctgggctttcagagcctgttataaatgtcctgagtcttaacaaatttcgttagcttgttaatcttaccagcctccttaccagtctctgtattcggaggaaatagttagacagcccaggagtttcaggtgtctggggataacgttgctttcctggctcgtacatattccagaggaatggggacctcagaaaagccccgagtgggttgtcgtaggaggctcaggattcgaaaacacaatctacatccaggttacgagagcaagacaatctctagcgggtggaggctggaggtgaccgcggtgagtggggagagtagcaatcagggtcgcccgctgtttcataacagctgttgatatcgacagaaaactcaacccgaggcccggctctgagtgaatgattgcgaatgtaaacgacagggagcccgaagcactctcttttgctatgaagtgaaccagcgcaatcaaagccggttagacgaaggttgggtcggatgcataggaggagggagcgcttcccagcacgcctgcgcctcagtcagtctgcgcaggaggtggttcccgggcaatccaggagaacttggccagtgctaagaaccgcacggtctgtgaatcaactactccggtcagattcaccgcgagcgggcatttttaaccttaatgattccctatggcttcttttgcaaacaaagcttttctttttgcattgctttttatattttcataaagtgatgaggaagaacccttactcctttaccgggatccccacctaaaggaactaccacgtttagacttgcctctctccattcaccagccaactagcctgtcaccctccaggctctgcgttcttccagagctttcgggcatggtcacagctgcgtctcagttaggttcacgtcagaaagggtgcccagcctctgcagtgaaagaatgcttctgcctcccaactccggatccaggagttctcaaacaggccaaaggagcatggacatttacgctgtacagcattggctatggctgagtctgggggcagatacaaggttagactgttataaataaatttaggaaaaagtaaagtcttgaagattctgccataccatctcattagtttgataaagtttttcatacacagaacaattatgatttgttttagcgggccacatcagctggctcgttggtctaggggtatgattctcgctttgggtgcgagaggtcccgggttcaaatcccggacgagcccaagcattttacatttgttttggtttggggcagtaattagggactctcagccaagatttccgggagtgctgggcatttagaagaaattcggaccggaagatatgagataatcagagaatcaccgtgttggctacgatgagcgcagaaccttggttagatgcttgtgttcatgcataaaatttctcgttgtaaatacgtgtaacttacggaccaattaccagcaagagaattgcgagagatccattgctgagaataatagaatttcagagggccttttaagccgtgagtttccgtagtgtagtggttatcacgttcgcctaacacgcgaaaggtccccggttcgaaaccgggcggaaacaagacacttgtctttttctttacttttacaaaaccgagcaagaatagtttgtttctcttgtgagtattgtcttgttaaagaccttgttgtcatagaaaataaaacagctttctcaccctaatcctaacacacatatagcgctgttttcaacagcaacggtcttcacatagcctatttcaaatgggctggcacagtgcgccacctaccagtcaatcggaaatacagaatctcagaatggacggcaactacttttctcaaaagttactggcagcggtgggattcgaacccacgcccccgaagagactggagccttaatccagcgccttagaccgctcggccacgctacctcgacgtgtaggtctttaatttaattccactcggtccatatacatcctcgggggtctcaggtacagagaatctaaacgcactgcaaaattgtgcggtctgaggtggggttagtagatctgtccaccccggaaattttcttcacccgctctaggagaggaatccacatgcgcatttatcaagatctttctttctgaaggaaggcactaaaaaatgtgtcgccccgtttccctttggccttgagcacagaggaaatctaattattttagcatgttttaaaaaccacgtctgtgtgttgcttttataattcttttaaaagaaagagcaaatgccatattctcatttaaaaaaaattaataacttttttcccgtttctgtggcactcatgcataggatcatattggccatggactggggtcttggggactctgctgtcttcggtttctagtctttaaacaggttttctagcaggaggcaccggtcttgaaaggacttttgtcaaaacccgcttgtttgcacactacacttttttttttttttcggattagccaaatgtcggttttttgtttttttgtttttgtttttgtttttgttttttttagcaaggtttaaggaaacttatagaaaaaatatctatctatctatctatctatctatctatctatctatctacccatctatcatctaccttggtttttcgagacagggcttctctgtgtagccctggctgtcctggagctcactttgtagaccaggcttgcctcgaactccgagatcctcctgcctttacctccaggctccgctactgctaggcttagattttcagtttactgaatttttcaaagcttccttggaatggctgagtcaaacttaacaaactgaacccacccacgccctttcccacaaagaaagccatattttccttattcatttctcctcagatgcacgctttcccattgcgaacgaaacagccatgacaggtcccttcagctatctttaacaccctgtgccggagacacttactgattgattccgcggctctcttccgaggtccaaaacccccgcccttgaaatcgtgatgttcctatgtcccaaccagcttccctcacatgctctgtcatccacaaaatagtgccagctgtctaacccacgtgcctactgggtaaccctatctagactacgacattagcaccgccaactctctccaggtttgtcacagggctcttgccaggaatcccagaaacacttccggcgatctagaagaaccgcatcatgcccactaaacaaattcaaaggaacgcatggtcaaagtgcagaactccctgtgaagtaaaacagaagggccactcgagaaaggtgttcccagggatcacaggtgagctcctggtctcaccacctacccgcccagagcagacgcatgctcctccaaagccgggacatacattttaattcctcttttgttgcgtcagaccagtggttctcagccttcctaaatgctgcgaccctttaatgttgtggcgatccccacccccacattggtaaaattattttcattgctactttataactgtaattttgccactgttatgagttgtaatgctatgaatctgtattttctgatagtctttagtctgttgtgaccccataggttgagaacctctgccttagactgtaccgaggacagctggaggagaagacttgtaatgctgctatttctgtttttgtagatggactgtggataaatacctaccttaatgctcgcttttcataagacacagacaatcacgttttacacaaacacattctttgttatgttgatgcaacagtcatgccgagaccctaaagctcttcaatcatattatcaaagttggtccctgatagtagctttttccaaattctgctggtcctacaaaattctagttcttaagaggcatggtggcattcgtggtagtccaaattacttgggaagttgaggcaggaggattgcctgaacctaagtaatttgagatcagcattagttaaatagcaagaagacaggtctctaaaatagatggatagatggatagatagagagatagctccatcaatagctcgacagacatctaaatcaaccgtcttcaaatgcatttgtaattcaaatggacagaaacgtcctagtgttaggctactggcgccatctactgtcaatagttggtgattacgatgtcttcgttggttcagatttctcttaatcacctttgagaaataaacaatagttcttccttccctttttcttggcatctgatgctcaagtgatgataaagcctgcttgagaagaaatagatattcattcaaggcagaggagtaagttgtcttgggaattgtgggccaggctttgacagagtgtttgaggggagagaaggaagcgtcagaggagagctatacataggagatttggggctctgtacatcctgacttttggattttctcagggtaccaggacattctcactaagctttaaacttgatactctcttgtcagtgttaacagggcaccagggatggttcaggtcctgttctagatgctgggatcaagatgaatcagattgttaatgacttgttaagaaaatgctgctattgcagggagaatacgccaaagagtcagagtgtacatggattctgtgtgaggctggcctggtccaggctgatggccaggcttgcaaacaaacctgacttagtctacatgcccaggtacatggaaacaggcactaggtagggccacgaggttctccttcagctgctggggatggaaaacttcaagttttgttagatgttagacctcagatcctctaactgccccactgtctcctagagatcaggcctcacactcctgcagtctttttttccaggacagaatcgataaaaatgctgtgctgtgaccttgaagtaatgcatatatagaatatgagttaattgttacctaatacacacatgtgccataacccataagtgccggggaccagccccgctgtggggttcttctttctggtcagttcttcttgaggcaggggaggggaaagagtgtcagtggggggtaagactttgtcttaggagatatttagggttgctgtataataaaaagtttacttatctaagtctaagttactatgctatgtagctgtgatcctctgaggccagagactgcagtctcaggcgcttagcacctcatcctaaaacagcaggagataaagtaaataaaggactaataattgcttgagccttttccctattgtccagctgcttcttgcttgtcaggctagggggaagtttggagcaataaacttctattgaaccaggataagagaataacactcacagaagaaaaaacttttacataagtgaatatgcataatctcatgagttcatatacagattcatgcatgctcatttattcatttatacatttccattcaaacccagttgggtccaacttgcatgcatcctcacaattacatacttacacacacacatgcatacattctcacaattacatacttacacacacacatgcatacattctc

SEQ ID NO: 2736 - DNA, 2693 bp, Mus musculus
agtagcatccagggacctccccaaagccacaagactcgaatgtactaaggacacggatggcgactgtggggccgcggaccgggccgaacgcaggagccgaggcgctggccctagcggcagagctccaaggcgaggcgacgtgctccatctgcctagagtttttccgggagccggtgtcagtcgaatgcggccacagcttctgccgagcctgtattatgcgctgctgggagcgtcccggagctgggaccggcacggcgacccgcacgctgccctgcccactgccctgtcctcagtgccgcgagcccgcgcgccccagccagctgcgacccaatcgacagctggccgcggtggcctcgctccttcggcgcttcagcctgccccccaccgcccccggggagcgcgggactccagcggtgcctgcccgggcggcggctgcgcggtgctcccaacacggagagcaacttaagctctactgccaagacgacggccgcgccatttgcgtggtgtgcgaccgcgcccgcgagcaccgttcgcacgccgtgctgccgctggaggaggcggtgcaggaggccaaggagttgctggattccaggctgagggccttgaagaaggtactggaagactatgaagcgttccggtcaacagaggagagggagagcaaggagcttctagtgagtccaagtgtgagaagcatagggttgtggatgaccaaggcagagagagagagagagagagagagagagagagagagagagagagagagagagagaatatggttgaaacagtagggtggatttcagaaagacaatatggtatacattacagaggttgactatataatttataatataaactagagctgttcaattcatctttagggtgcacagtcattcgtaacaaaccagttaggacctgtagcagcatcttgtaatttgaatgcattagcatttcttcacagaaacacgtcatattaagtaggaacatacggtgaggagccacacatgcctgaggcatgttctgccacaggaggaaaaaaaacagtgaggaaaacgttttgttttctgagctttaatttaagaattagaggtttctggctgggcagtgggggcacattcctttaatcccagcacattgagtcaaggccggcagatcactgtgagttcgaggccagcctggtcttcagcatgagttccaggatagcaaaactgcacagagaagccctttgttaggaagggaagcccatgaaactcagatacacaggctcctttctgggccctatgtggttgctattattgttctgttttgtttgagacaaggtatctctctatagcccaggctaccctgaaacttgctacatagaccaggctggcctcagacctacagagatccacctgcttctgcctccttagtgctggattgaagctgtgtgccaccatgcctggccctccccttatccttaactgcttttatatctgtagctattggacatcccagacttttacatctgaccattcatttcctaaagcagagttcacccatccagacctttgttccacctctttggtttgcacctgtgatgaagaggacattctctatggcctgggtaacatcgaagtctctgactctcctccccaggacattgtttagcacatgccatctctgtcctttgccaaaccctcccctaacctatccaaagcagggccttcacagccaagtcagtgctctaccgctgagccatacagtcctcgttctgcttgccatacagcaacaggtgagcctccctctgttgtcctactcaacacggtttttacagttgtacctacagtatgggctggaagggggcggataggaaggggagagtactttcacccgaaagatgcccttaccccagaggtcacccagtactgctagaggctttttagttgccagcactgtgagtgttgccactgaccaccccagctggatatgggggtccctggaatgagggttctcgaaagctaagtgggtaaggattcggcagtgatgaacaaaaaacaaacacagaggcagttagaatctgagtgtattttgcaactctcaagcagaagttttcatacattaaaaaaaaatatatattatagctcctagaagatgtgttcagtgagtgaagcaatcacaaataccatcattatcatttggcatagtaaagcacaaaaatcaagcaaacatcacaactcaggaaagatgtactcagtgaatcacaaacagaacaggtgacatcatgattaatagagatcatccaagcattacaactctgaaagggtgcattcagtggggcagtcatccaaggctagaggcctatttccaagagcaggttaataaatctttatggtcaattattgtttaacatctaatgcctgattgtttttataaatcttcaatgggtgaatttaaactatgttaattctttttatttaaggctttccttaccatatatcaaagcctacctgatgacacacatgtagccatatgaaactttattgttgggaaagtttttaatctatcataacactattatataattttgtaaataatttataaagagttggtttctccagggataaggtcatgttaatgacccccatctcaagagatggcttcttaccaattattctcgattaagattgtggcctcggctaccaggaacatgtcgt

SEQ ID NO: 2737 - protein, 241 aa, Mus musculus
MATVGPRTGPNAGAEALAAELQGEATCSICLEFFREPVSVECGHSFCRACIMRCWERPGAGTGTATRTLPCPLPCPQCREPARPSQLRPNRQLAAVASLLRRFSLPPTAPGERGTPAVPARAAAARCSQHGEQLKLYCQDDGRAICVVCDRAREHRSHAVLPLEEAVQEAKELLDSRLRALKKVLEDYEAFRSTEERESKELLVSPSVRSIGLWMTKAERERERERERERERERERIWLKQ

SEQ ID NO: 2738 - DNA, 2231 bp, Mus musculus
tagcatccagggacctccccaaagccacaagactcgaatgtactaaggacacggatggcgactgtggggccgcggaccgggccgaacgcaggagccgaggcgctggccctagcggcagagctccaaggcgaggcgacgtgctccatctgcctagagtttttccgggagccggtgtcagtcgaatgcggccacagcttctgccgagcctgtattatgcgctgctgggagcgtcccggagctgggaccggcacggcgacccgcacgctgccctgcccactgccctgtcctcagtgccgcgagcccgcgcgccccagccagctgcgacccaatcgacagctggccgcggtggcctcgctccttcggcgcttcagcctgccccccaccgcccccggggagcgcgggactccagcggtgcctgcccgggcggcggctgcgcggtgctcccaacacggagagcaacttaagctctactgccaagacgacggccgcgccatttgcgtggtgtgcgaccgcgcccgcgagcaccgttcgcacgccgtgctgccgctggaggaggcggtgcaggaggccaaggagttgctggattccaggctgagggccttgaagaaggtactggaagactatgaagcgttccggtcaacagaggagagggagagcaaggagcttctaaagcagatggcagcagagaaagagaaggtaggggcggagttccaagcgctgcgggccttcctggtggagcaggagggtcggcttctaagccgactggaggtgctgtcccgggaagtgacacagaaacagaatgagaacctggcccagctggagggtgagatcactcagctgtccaaactcagcggccagatccaggagacagctcagaagccggacctagacttcctccaggagttcaaaagcacactgagcaagtgcagcagcgtgcccagctccaagccaaccacagtctcatctgagatgaagaataaagtgtggaatgtttccctcaagagtttcgtcttaaaaggattgctgaagaagttcaaagaggatctccagggagagctggagaaagaagagaaaggtatgaagtgtgatcgccacttggaactcactttggatccagacacagccaacccccgtctcatcttgtccctggatctaaagagcgtacgtctaggacagcgcgcccaggacttgcctaaccatcctcgccgctttgataccaacacccgcgttctggcatcctgtggtttctcctctgggcgacatcactgggaggtggaagtgggctccaaggacggctgggctttcggtgtggcccgggagagcgtgcgtcgcaagggcctcacgccttttacccccgaggagggcgtctgggcaatgcaactcaacaatgggcaatactgggcggtgaccagccccgagaggacacagctcaactgtgggcacttgtcgcgggtgagggtggcgctggaccttgaggtgggagcagtgtccttctatgcagtggaggacatgcgccacctctacaccttccgcgtcaacttccaggagcgagtgttcccccttttctctgtttgttctaccggcacatacttgagaatctggccttgaagagctgtcaggcttactaggaggggacagggcagcggtgtatctcggtgagaccgaggtactttatcttggaccttccttcacacccctacttctgctgcccaagaaggctgccagagagcacaacacaggcgctgaagactgattgagcaaagaggccctgtgggtaacttcgcgattgcacagcgaagagatgccttggacccttggtgcctgctggctcctgtaatgttcctgcaaattgtgtctgaactatggagaggcatggctcactggcataaaaacccagctttaagcaaggctgcttcttaccacaagggcttactgccttgatttagaagggtcccctgtttacacagaacaatgtcaaagactagtccccttgcaaagggtgtggtttgaccctgggcccatcatgtattactttacattttgtgacagctgcaggctctgcctggagaggtcgttgagtcccttggatccagctggccttcctggattgtttattctgggaggagcattgtgctccccaattagaagccagtctggctggatctgaaaggagactcatgacttatacaagaggccagaactatagtatatacatataagcacattgccgt

SEQ ID NO: 2739 - protein, 513 aa, Mus musculus
MATVGPRTGPNAGAEALAAELQGEATCSICLEFFREPVSVECGHSFCRACIMRCWERPGAGTGTATRTLPCPLPCPQCREPARPSQLRPNRQLAAVASLLRRFSLPPTAPGERGTPAVPARAAAARCSQHGEQLKLYCQDDGRAICVVCDRAREHRSHAVLPLEEAVQEAKELLDSRLRALKKVLEDYEAFRSTEERESKELLKQMAAEKEKVGAEFQALRAFLVEQEGRLLSRLEVLSREVTQKQNENLAQLEGEITQLSKLSGQIQETAQKPDLDFLQEFKSTLSKCSSVPSSKPTTVSSEMKNKVWNVSLKSFVLKGLLKKFKEDLQGELEKEEKGMKCDRHLELTLDPDTANPRLILSLDLKSVRLGQRAQDLPNHPRRFDTNTRVLASCGFSSGRHHWEVEVGSKDGWAFGVARESVRRKGLTPFTPEEGVWAMQLNNGQYWAVTSPERTQLNCGHLSRVRVDLEVGAVSFYAVEDMRHLYTFRVNFQERVFPLFSVCSTGTYLRIWP
